United States Patent Application Publication US 2026/0191916 A1 - sequence listing, part 60

SEQ ID NO: 311 - DNA, 2084836 bp, Alistipes onderdonkii
  source 1..2084836: mol_type = genomic DNA
caggccgccctgcaacagcagctggtcgccgcccagctccagcgtacggtcgatcttctcgcggtattcggccagcgtggtgacgaatgcccggtctgtctggtggggcttgcagtggaaattgcagaaccggcaacccgagatgcagacgttggtgatgttgacattgcggtcgatctgccaggtcaccacctccgggtcgggaaccacggcgcggcgcacctcgtcggccacgagcgccagctcctgcaacggagcctggtcgtagagccggtaggcctcctcgcgtgagagcggctcccttcgccggcatttgtcgtagatgcgttgcacggctatcggtttttacggcgggtgctgcggcgtaccttcgggccgtcctcgcggggtgcgggggccatggggcggccgttgtctatcagcagctcgaaatcgagctggcgcttctgcaggtcggcacgttttacgcggatgcgtacggcgtcgcccagcgtcatgcggcgacccgtcgagcggccgacgatctcgtaattggcttcgtcgaactggaagaaatcaccttcgatgtcgcgcaggaatgacatgccctcgatgtgggtttcgtccagctcgacatagatgccccattcggtgagccccgaaatgtgcccgtcgaactcctcgccgatgcgctccttcatgaattcgaccatcttgtacttgatcgaggcgcgttcggcctcggaggcgatcacctcgcgttccgaagcgcgggcgcacagatcttcgagcgtcgtcttgtctgccgccttctcgcctgcgaggtaacgcgccagcaggcggtgcaccatcatgtcaggatagcggcggatgggcgacgtgaaatgcgtatagtaggggaatgcgaggccgtagtggccgatgttgtcggtcgtataaaaggcttttgccatcgagcgtacggccatcgtcgatacggcgttctcctcggtcgaacctttgatctgggcgaagagcttgttcagctccttggccacggcccgcccgcccgtggccttgaagatgtgcccgaagcgcaggataaactgccggaaacggtcgagcttctcttcgctcggcttgtcatgcacgcggtagaccatcgtgcgttccacggtgcgccccttgtcggttttgcgcttgccgcagaactcggcgacacggcggtttgccagcagcatgaattcctcgatcatctggtttgactccttctgttccttgaaatagacgccgatgggcttcccagcctcgtcgagttggaatttcacctcctcgcggtcgaagctgatggccccgtttttaaaacgtgccttgcgcagcgcctgggccagccggttgagggtcagcacctcttcggcgaaatcgccccgtcccgtctcgatgatctcctgcgcctcggcataggtgaaccggcggtcagagtggatgaccgtgcggccgaaccattcgtcgagcagttccagcccttcgttgatcgtgaataccgccgagaaacagaggctcgcctcgtgcgggcgtagcgagcagagctcgttcgacaaccgctcgggcagcatcgggacggtgcggtctaccaggtagaccgacgtgccgcgttctacggcctcgtcgtcgatcaccgagtgcgggcgcacgtagtgcgtcacatcggcgatatgtacaccgatctcccatatgccttccccgaccttgcgtaccgaaagcgcgtcgtcgaagtccttggcgtcggccgggtcgaccgtgaaggtcgtcacattgcggaaatcgcggcgctgggcgatctccttggccgtaatccggccgtcgatatcctccgccgcctgctcgactttgggctcgaagcggtagggcagctcgtattcggccaggatggcgtgcatctcggtgtcgttgttgcccgccatgcccagccgctcgatcagctcgcccacggggctcttgctcccttcggcccagtcggcgatgcgcacgacgaccttttcgccgtccttcacgtcggggtacagccgtttggagaggtagatgtccatcggcatacggcgcgaatccgcccgtacgaatatctggtgtgcccctacttcggcgatgccgacatagggtttgcggctgcgttcgacgatgcgtgtgatctcgccctccatcttcccgtcgcggccgcggtgcatgacgaccacctccacgcggtcgccgttcagggcgttggccgtgttgcgctggttgacgaagatatctttctcctcaccttcgacgcgcacgtagatcgaccccgtggccgtcatgtccgccacgccttcgaagtggggcaggtgcttgtgcgtgaggcggtatttctcgcgtgcgcactcctcgacgatgccttcgtcgtgcagccgtcccagaatttcgaatgtttcgcggcgcccctctttcgtggcgcctcccgaggccgaagccaggtgcttgagcgagaatttattgttggggaactcccggaaaaggctcaggatgactgccgccctgtcggtgttcttcgcaccctttgccgggcgctttttttgtgtttgctttttcatttcttcagaatttgcagggcaaggcgcttcatgaagccgatgcccacgttgatagccccttcgtcggggttgaatgtcgccgtgtgggggcgtcctgccgcggcgcctacgcccagccggtagaacagcgacgggtatttggtacagtaaaagccgaaatcttcggccgtggtgcgcagcgggagcatctcgacctgcagtttctcctcgcgggccagtgccgcggcctgtttcacgaggtgttcgtcgttgaccacgcaggggtaaccgtggctgatgtcgacggcgatccgcacccccaggcgcttgtcgatctcggcggcgatgttgcgaatgcgctggtggatgatttcgcgttcacgctcgtcgaacgtgcgcagcgtcccctctaggtagacctcgtcggggacgatgttcgtggcacctccggcctctatgcgtccgatcgagagcacgcactcctcgtggttgagcgcgatgagccgcgtcacgaactccgcggcggccgctacggggtctttcaactgcgggcgcatggcgccgtgcccgcccgtaccgtgcaccgagaagcgcagttcgtcgctggaggccatgtatttcccggcgcggaatcccagcgtcccgacctccagttgcggctcgacgtgctcgcccaccacggcacgcacctcgtacccgtcgaacgggttttcggccagcaccagcgacgcaccgcccgggttgcactcctcgcccggctggaacagcccgaagagcgtgccgcggaagtcgggttcggcggcgagctgctgcaataccccgaagagtaccgccgcgtgcatgtcgtggccgcaggcgtgcatgacgccgggggtgcatgaccgccagccgatgtcgttctgttcggtgatcggcagggcgtcgatgtcggcgcgcagtactacggcgcggcgtttgggatcggctttcccgcgtccttcgatccaggccagcacgcccgttcgggcgataggacggtgctcgatgcccagctccgtgagccggtcagcgatgaaggctgccgtgtcgtgttccttgaacgacagttcggggtgtgcatgcaggtggcggcggaattcagtgggattcattcgtgtcgtttaaaatatcgcttttgcaatcttgatgatgttgtcggccttgcccatcgggtagtagtgcaggacggggacgcccgcttcgaccagctcccggctctgggcgacggcccactcggttccgatttcgcggacggccttcgggtcgtccttgtggcgcagcacctcgcgcccgagttcctcggggatatggcagccgaaggtctggggcagtagtgtcaggtggcgcaccgtcgataacggcttgatgcccgggatgatcgggacggtgatgccggcctcacggcaccggcgcacgtagtcgaagaaccgcgcgttgtcgtagaagagctgcgtgacgacgtattccgccccggcgtcgaccttcgccttgaggcaggcgatgtcggcctcgggcgaggcggcttcctcgtgcatctccgggtaacccgccacgccgatcgagaatttcgagtggtggcactcctcgacctcgccgtcgacgaactggccgcggttcatggccgcgatctgccgcacgaggtcaacggcatgcgtgtgtccctgcggatggggcatgaagaacttttcgttctgcgacttgtcgccgcgcagcgccagtacgttgtgcaggccgaggaaatcgaggtcgatcagcgcatcctcgatgtcgtatttcgactgcccgccgcagatcaggtgcggcacgacttccacgccgtatttcttctggatggcggccgagatgcctaccgtgccggggcggcggcgcacgacgtgccattcgacgctgccgtcggggcgcaccgcctgcttgatgccttcgcggtggaacgtcacgttgatgtaggccgggtcgaagccgatcagccggtcgatactcccgaagacgccgccgcagccgtctcccttgagcggcggcagcagttcgaaggcaaagcgcgtgcggcgttccgaaatggctttattgatgatgtctacgacattcatggggttcagatattatgcggtatgagttttttgaccagttcgacatcaagcccgcggcgccgggcatagtcgagcagttgttcggtgtcgaccgtgccgaccgagaagtagtccgcgtcggccagcagcagtccgcagagtgcctccccgggatcgaccatgtaattttccgtgagtttcatgcccgtggtcagctcagccgccagcaggtcgaagacctcgcgcttgagcgagtggtcgggtgacgccgggtagccgaacgccatcctgcggccgcggtattcgccgcggatgacctgccggggagtgggcgcttcgccggtttcgtagccccacatctgccgccgcacgaacgagtgcacggcttcggcgaacgcctcggtcaggcggtcagccagcagcttggccatgatggcgttgtagtcgtcgcccgcagcgcggaatttttcgcacagctccttcagcccgatgcccgccgtcacggcgaagcagccgatccaatcgcctttgggggcgatgaagtccgccagcgagaggttttcctgcccgcgggtctggttgcggagcatcgccaggcggtgttcgcggcccttggggtctgtgatccagatgtcgtcgccctcggaacgcgccgggaagatgcctacggcggcctgcagcgtgagcagtcgctcgtcgcggatacgtgccagcagcgcctgcgcgtcggcgaataccttgcgggcctcctcccccttttcggggtggtcgaggatctcggggtaacgccctttcagcccccatgccgggaaaaagaagttccagtcgatgtagggctcggcatcggccacgtcgaaatcggggaagaccatccgtccggggtgcgccggtacgacgggacggtgcggtgtggcgcccttgcgggctttgcgcgcctcggcgatcgggatcaggttgcgcgtgcgctcggcgtgctcgtattcgctccgcatagcctgctgtccggtgcggactttgtcggcgtaaagcgccccgtcggagcccagcagttgtgccagtatctggctgttgcggctggcgttgggcgaatggacaaccacgcccgcgtagaccggggcgatcttcaccgccgtgtgcaggtcggaggtcgtcgccccgccgataatgaccgggatgcgcagggcgcggcgttccagctcctcgcagacatgcgccatctcgtcgagcgacggggtgatcagcccgctcagacagatgcagtcggcgccccacgccaccgcctcgtcgacgatgcgctgcgactcgaccatcacccccagatcctttatttcgtatccgttgcaggccatcacgaccgccacgatattctttccgatgtcgtgcacgtcgcctttcacggtggcgatcagcaccttgcccgcgcggttcgacaccccggccgccccctgctcaatgtagggcgtaagcgccgccacggcgcgcttcatcacgcgggcggttttcacgacctgcggcaggaacatcttgccttcgccgaagagcgtgccgacatgctccatggcgggcatcagcagcgtgtcgatcacggccatcgggctgcccagggtttcgtaaccctccagcgcatcctgctcgatgaaatccgccacgcctttgagcattgcgtggccgatgcgctcgccgagcgtccccgcgcgccatgcgtcgggagcctggggctgcgtctgggcaaccgtgcgcacttgctgggcatattcggtgagccgttcggcagcgtccggacgccggcagaggatcacgtcctcgacccgttcgagcagttcgggctctatctcgctgtaaacccgcaccatctgcgggttgacgatgcccatgtccatcccggcacggatggcgtggtagaggaacgccgagtgcatcgcctcgcgcacggcgttgttgccgcggaaggcgaacgagaggttcgacacgccgcccgagaccttggcatggggcaggttgtgcttgatccagcgcgtggcgtcgataaaggctttggcatagctgtcgtgctcggggattcccgtcgccacggccagcacgttggggtcgaagatgatgtcctcggcagggaatcccgcatcggtgagcagtttgtaggcgcgtgaggccacctccgtcttacgttcgtaggtgtcggcctgtccccgctcgtcgaagagcatcaccacggcggccgcaccgtagcggtgtatctcctgcgcgcggcgcaggaattcggcttcgccctccttgagcgatatggagttcacgacggccttgccctgtgtgacctgcaacccggccacgagcacctcccatttcgacgagtcgatcatcgccggcacgcgggctatctcgggttccgacgccatcaggttgaggaacgtgcgcatggcctccgcaccgtcgatcagcccgtcgtccatgcagacgtcgacgatctgtgccccggcgtcgacctgggcgcgggcgacggagagcgcctcctcgtagttgccttcgcggatcagccgcgcgaatttggccgagcctgcgacgttggtgcgttcgccgacgttcacgaaattggcttcggggacgatgcgcagcggttcgaggccgctcagcgtcgtgacatgtttgggtgccggcacggggcgcggggcgtagttccctgcgatcttcgccagctcgaagatatgtgccggcgtggtgccgcagcatccgccgacgatgtttaccagcccgcggcgcatgtattcgccgacgtcgcgggcgaacatctcgggggtttcgtcgtagccgcccatgacattggggagcccggcgttggggtgtgccgagatgcggaattcggccaccgcggccagccgttcgaggtagggcatcagttgtcgggcgccataggcgcagttgaagccgacggagaggagccgcgcatgcgataccgaggcgtagaaagcctcgacggtctgtcccgagagggtgcggccgctggcgtcggccagcgtgcccgagatcatgacggggattgcgcgtccgagctgggcggccagcgtgtcgatggcgtagagggcggccttggcgttgagcgtgtcgaaaacggtttcgaccaacaggacatccgcgccgccgtccacgaggccgcgcgcctgttcggtgtaggcttcggccagctgcgtgaaggtcacctcgcgggctgcggggttcccgacgtcggccgacatcgaggccgtgcggttggtcgggcctatcgatcccgccacgaagcggggcttctgcgggttgcgggccgtgaattcgtcggctgcgctgcgtgccaccccggccgccgcacgcgaaatctcataggcgtatgcctccagcccgtagtcggccagcgacacggcgttggcgttgaaagagtcggtctcgatgatgtcggcacccgcctgcaggtattttacgtgtatttcgcgcaccgccccggggcgtgtcaccgtcagcaggtcgttgcagcctttgagcagtacgttccagtcgcggaaccgttcgccgcggtaatcctcctccgtgaatccgtactgctgcaccatggtgccgaagccgccgtcgagcagcaggatgcgggattcgagcacctcgtataacttgtttgccatttactttccgatgatttctatttcgaagagtttgctccagttcttgccggtcacgaagatgcgcttcccggcggcatcgtatgcgatgccgttcagtacgtcggtcgtgggcgtaacctcctcgtcgggcaacagtcccgtgaggtctacgaccccttcgaccacgcccgtcgccgggtcgataatgacgatctggtcggtcgtgtagacgttggcccacaacttgccgccgatccactccagttcgttgaggaaattgatcgccatgcctttgagcgtcaccgtcgtgcgtttctcgcgtttgaacgtcgcagggtcgagcgtgtagatattggccgtgccgtccgacatgtagagcttttgcccgtcggtggtcagtccccagccttcgccggggtagcggaactccttgattttcttgcctgttttcaggtcgtagacataggctttgttcgattgccacgtgagctggtacaacttgccgtcgagcagcgtgatcccttcgccgaaatcctcctgcggcagccgtgcgaacacctccgtgcgcccggtttcgaggtcgagggtctgcacgaccgattcgccgtgctctccggtgccttcccacagcatgccgtcggcgaattgcagcccctgcgtgtaactggtcgtcgggtgggggtgtacactccgtacggcatatgtgtattctttcggcgctgccggggcttcggggcgcttggcccgcgcctggttcccgccgcatgctaccagcagtaggccggataacaggacgcttgcgaacttttccattttctcgttttacttggaggcaaagatacgaaaaacccggcatatgacgaattttttatcgttcattgcacaatcggtgcggcggcggacgtccgggacagctccgcagcgcctgtccgtccggcaggcagtataccggccgggtctgccgcctgcctgtccgtccatccgccgcttggccctttgttggcttgtcgcctgccaaccttccgcctgcccgctgtttcccgccgaacgggctggtatacatataatttggaaaaattgttgctttctcggtgaaaatcgctatctttgcaacccgatttcggaacggaaaaataggataacaacaatatagcaaccattcattatgaagatcgtaagagaacaacgcgaagaaaacaactcgctgctccgggtgacggtgggcgaggaggattacggccaggccgtcgagaaggagctgcgcgagtacaagcgcaaggccaatatccccggcttccgtcccggcatggtgcccatgggccttgtcaagaagatgtacggcaagggcgtgctggccgaacagtcgtaccgcacggcgtcgaacgccgtgttcgaatatctccagaaggagaagatcgactatctgggcgacgtgatcccttcggaggagcagggcgatttcgatttcgaaaacggcaaggagttcgatttcgtgttcgagatcggcgaagctcccgagatcaaactcgatctttcggacaaggataaggtgacctaccacaagatcaaggtcgacaagaagatgcacgacgactaccgtgccaactacctgcgccgtttcggccgcctggtcgacgccgacgaggtgacctcggacgaggcgctgtccgtaacgctcgacaacggcgagatgaacgttgccgacgcttacgtcgggttgatctcgatgtcggaggaggagcgcaagccgttcatcggcaagaaggtgggcttcaagaccacggtcaacgtcaacgaactttacaagaatccgtcgcagcgtgctgccgtgctgcaggtcaaggaggacgagttggagggcatcaaccccgaattctcgctggagatcaccaagatccgcaagtttgccgaaccggagctgaacgaggagttctttaagatggcattccccgcaggcgaggttaccgaccaggccgggctggataagttcatcgacgcgcagatcgggcaggagctccgccgcgaaagcgattatctcttcacgctccagctgcgtgactacctcgtgaagaaggccgcgctgaagatgcccgagaaattcctcaagcgctggctttttaccatcaacgaaggcaagttctcgatggaggatatcgacaaggatttcgaccagttcctcaagatgttcacgtggaattacctccagaagcatttcatcaagcaggacaacctctccgtgagcaaggaggaggcgcttgctgaggccaagtcgctggccgccgcgcagttcgcgcagtacgggatgccgtcggcgcccgaggatatgctcgccggctatgccgagaagatcctcgccgacaaggatcagggccagaagatctacgagaaactctacgagacgaaggtcgtggaagatgtgaaatcgaagatcaaggtgacggaaaaggccgtatctgcggaggatttcgctaaattggcccaggcactttagtatttgcggaaaaaatcttatctttggactttgcaggcgtgatgtttgcaaagtccttttgtttgatgaaaactcttcacaatatgtcagaatttgaaaaatacgcacggaaccattgcggtatcagttcgctgaaactgcatgacttccagtcggtaagcgcatcgtatgtgtcgccgacgatcatcgaggagcgtcaactgaacatcgctacgatggacgtcttctcgcgcctgatgatggatcgcatcatcttcctcggtgcgccgatctacgacgacgcggccaatatcatccaggcacagttgcttttcctcgaatcggtcgatcccgaaaaggacatacagatatatattaattcgcccggcgggtcggtttcggccggattgggtatttacgacaccatgcagctcgtcaattccgacgtggcgaccatctgcaccgggctggcggcctcgatgggagccgtgctcctgactgccggcgccaagggcaagcgctcggcgctgccccattcgcgggtgatgatccaccagccgctgggcggggcgcagggacaggcgtcggacatcgagatcacggcgcgcgagatcatgaaaaccaagcgtgagctgtacgagatactcgcggcgcattcgggcgtctcggtcaggaagatcgaaaaggacgccgaccgcgattactggctttcggcccgcgaggcgaaggagtacgggctgatcgatgaggtactttcaaaacgcgggaagtgatggcacagaataagaacaacaataaccatcggggcggaacgggcggcgacagctgctcgttctgcggtgccaagcgcggggatgtggagatcatgttccagggcgtggacggcgccaatatctgcaacaaatgtatcgagaacggctataagatcatcgttgagaacgacgtggcctcggagcagcggcgtgccgctgcggcacctttcaagatggaggagttgctcaagccggcgcagatcaaggagttcctcgaccagtatgtcatcgggcaggacgacgccaagcgttatatgtcggtagcggtctacaaccactacaaacggctgctctacgcccccaaggacgacgacatcgagctcgacaagtcgaacatcatcctcgtggggcccaccggtacgggcaagacgctcatggcgcgcacgatcgccaggttgctcaaggtgcctttcacgatcgtcgacgccaccgtgctgaccgaggcgggctatgtgggcgaggatgtcgagagcatcctttcgcggctgcttcaggttgccgactacgacgtggcacaggccgagcggggcatcgttttcatcgacgagatcgacaagatcgcgcgcaagggcgacaacccctccatcacgcgtgacgtctcgggcgaaggcgtgcagcaggcgctgcttaaaatactcgagggcacggtggtgaacgtgccgccccagggcgggcgcaaacaccccgagcagaagttcatccaggtcgacacgcgcaatatcctcttcatctgcgggggtgcgttcgacggcgtggagaagaagattgcccagcgtctgaacacccgcgccatgggatacgggcgcctgaatgccgaccggatcgaccgcggcaacctgatgcagtacatcacgccgcaggatctcaagtccttcgggctgattcccgaactggtgggccgtctcccggtgctgacctacatgcagccgctttcgcgcgaggcgctgcgctcgatcctcaccgagccgaagaatgccatcgtcaaacagtacaagcgcctgttcgagctggacggcgtgaagctctcgttcgacgaggcggtgctggactacatcgtcgacaaggccgtcgaattcaagctcggcgcccgcggcctgcgctcgatctgcgaggcgatcatgatggatacgatgttcgacattccctcgacggatgcgcggaaatttaccgttactttgccttatgcaaagaaaaagatagaaaaagcaaatattttggagttaaaacaggttggataatatcttttttattacttttgcagcgagaaccctaagacaaaaccataaaaccacagactgatatgtcatctaccaattccaaactgacccgtgtggccgacaatatccgtatcctttcggccgccatggtcgagaaagccaaatcggggcatcccggcggcgccatgggcggtgccgacttcgtgacggtgctctataccgagttcctgcgttacgaccccgataacatggcttacccctaccgtgaccgtttcttcctcgatccggggcatatgtcgccgatgctctactcggtgctgtcgctggcgggatactatacgaccgaagacctgcaatcgctgcgccagtggggcagcgtgacgcccggccaccccgaggtggacgtgatgcgcggtgtggagaatacctcgggcccgctcgggcagggacatgccatggcgctgggcgccgccatcgcggagcggttcatggcggcccgcttcggcgagtggatggcgcacaagacctatgcctacatctccgacggcgccgtcgaagaggagatctcgcagggcgtgggacgcatcgcagggcatctggggttgagcaacttcatcatgtactacgattcgaacaacattcagctctcgaccaaggtcgatgaggtggacaccgagaacgtggccatgaaatacgaagcctggggctggaacgtactgtcggtcgacgggcacaatatcaatgaaatccgcgaggcgctcgtggcggccaattctgaaacggaacgcccgacgctcatcatcggccatacggtcatgggcaagggtgcccgcactaccgacggcgggagtttcgaggacaaggtgtcgacccacgggcagccgcttacggcggctggcgccgatttcgccgccacggtgaaaaacctcgggggcgatcctgaaaacccgttctccgtgttcgacgagagccgcgaggccttcgccgagcgccgcgaagcgctccgtgcatgggctgcccgccaggccggggtcgagaagacgtggcgcggcgagcacggcgagctggcccgcaagctcgacatgttcctttcggggcgcctgcccgagatcgactacaaatccatcgaggtgaaggcaggcgttgcgacgcgtgcggcatcggccacggtgctgggcgtctttgccgagaagatcgaaaatatgatcgtggcttcggccgacctctccaattcggacaagaccgacggcttcctcaagaagaccaaggccttcacgaagggcgatttcagcggcaagttcttccaggcgggcgtctcggagctgacgatggcctgcgtggcgaacggcatggcgctgcacgggggcgtgatcccggcctgcggcaccttctttgttttttcggactacatgaaacccgccgtgcgcctttccgcgctgatgcgcctgcacgtgatctatgtctggacacacgactcgttccgtgtgggcgaggatggcccgacgcaccagcccgtcgaacatgaggcgcagatacgcctgatggagcatctgaagaaccatcacgacgagcgttcgatgcttgtgctgcgtcctgctgacggcgatgagacggtcatggcctggaaactggccgtcgaggagcaccgccccgtggcgctcgtgctctcgcgccagaacatcaagacgctgccggcattgggtacgagccgccgcgaagaggccgcgcaggtttcgaagggcggttacgtggttatggattcggccaaacccgaggtcgtcatggtggctaccggctcggaggtcgctacgcttgtcgaaggggccgaattgcttgctgccgaaggtatttcggtgcgcgtggtgaatgtcccgagcgagggcttgttccgtgaccagcccaaatcctatcaggagggcatcctgcctgccggcgtcgtccgctacggcctgacgtcggggcttcccgtgaacctgctcgggctggtgggcgagaagggcatgatccacggcctcgaccacttcggctggtcggctccctacacggtgctcgacgagaagttcggctataacggtgccacggtggctgcggaggtcaagaggctgctcggtaaataatcgcccgggttccccgcgcccgaataatacacaatggacaaggccacgaaatcatattcggggccttgtttgcaaggcggttgtcgcaccggaattccgcagtccggaacctgccgggatcgtttctgtcggcgcagcccggaatcggtgcctgtccgggttttgccgggcaatgccctattgcatgtagagtgtgacccggtcgtagtattgcccgtcgatgaaaagttcgcctgtcagcctgccccggcggatgtatacgttgcgcagttcgcgcgggtaatcggcccgtccgtagctgatgtagattttgtcgtcgtaggcgtcccactggatgttgagcgtgtcgaggtaacgccccgtgtcggcgtagcggagctcgtcggtgccgaagccgtccgccccgaaatagacatagctgtccagggggatgcgcccgtcctggtagaatcccaggtcgcccgcccagactctccccgagagggtgtcgtacagctcgtcgtcatcgctgtcgcagcctgtgaaggccacggcggcgcacaggagcagtgcggcgaggaaaaatcttttcatatacggagtgttaagaattgtcggatgcaaaggtatgttttttttgcatattgtgaaaatcctgcgtatctttgcagtcccgtctgtcaagcgggaaaatgtggaaagatttgactgattgcaaccacagtaaaaaattgctaaaacagcttattttttattccaacagccaatttttcccattttatacgtttaaccattaaaaatgtatgaaaatgggctttttgtttacatcggagtcggtgtccgaggggcaccccgataaagtttcagaccagatttccgacgccatcctcgacgaattcctgcgtcgtgatgccaattcgaaggtcgcctgcgaaacgctgtgcaccaccggactggtggtcgtggcgggtgaggtgcgctcggatgcgtatgtcgacgtgcagggcgtggcgcgccgcgtcatcaaccgcatcggctacacgaagagcgagtatcagttcgactgcaattcgtgcggtatcctgtcggccatccacgagcagtcgtccgacatcaaccagggcgtcgtgcgtgccgccgaggaagaccagggcgccggcgaccagggcatcatgttcggttatgcctgcaacgagacccgcgagatgatgcctgcgacgctgatcctctcgcacgtcatcctcaaggagctggccgtcatccgccgtgaaggcgaggtgatgacttacctgcgccccgactcgaagtcgcaggtgacgatcgagtacgacgagcggacgaacaaaccgctgcgcgtgcacaccatcgtggtgtcgacgcagcacgacgagttcatcctgcccggcaacggcctcacggagaaagaggccgaggagcggatgcaggagcgcatccgcgaggatgtgcgcacgatcctcatcccgcgcgtcaaggcgcgcctggagcgggccggcgacaagctggccggtctgatcggcgacgattacatcctgcacgtgaatcccacgggcaaattcgtgatcggcggcccccacggcgataccggcctcacggggcgcaagatcatcgtcgatacctacggcggccgcggcgcacacggcggcggcgctttctcgggcaaggattcgtcgaaggtagaccgctcggcggcctatgccgcccggcatatagccaagaacctggtggcggcaggcgtcgccgacgaagtgctcgtcgagttgtcctacgccatcggcatcgcccagccgctgtcgatctacgtcgacacgtaccgttcgccccgccccgcggcgctggaggggatgaccgacggcgaaatcgcccgccgcattggcaggcttttcgacctgcgccccgccgcgatcgtgaaacgcttcgggctgaagaacccgatcttcgaggctacggcttcctacgggcatttcggcaaccgtccttatacgcaggtcgagaaggtctgggagaacggccgcgaagtggaacgcgagatcgagtatttcggatgggagaagctcgacgcggtggattgcatccgtaaagagttcgggctgtaacgctccgggacacggcagatcgggacattcggcgcggatgtcccgatttttgtgtatttccgcatactaaccggacgttttcgttcgtttgtcctacgaaataaaaaattttaataagcctatggcggaagttgcctctgattaatttattgaaccaattagtgattatgaaaaaggcatttttaattttaggagtagttgccgtgtcggccgcagcaggcggatttacggcttggaaagttaccgcgccccgcgagggttcggtgcaatacatcgagcgtgaggtggaacgtacgcccgcgctgggaacacattttacgtcgtaccaggccgagcagtaccccgacctgacgtacgccgccgagaacgcggtgaaagccgtcgtcaacatcgaggccgtgcagcaggtggagatgccccggcgccggggttacgacccgttcctggagttcttcggtatcccgcaggggtatgacgaagggccgcagttccgcgagcagcgtgccggcggttcgggtgtcatcatctccgaggacggctatgtcgtcaccaacaaccacgtcgtggacggggcctcgaagctcaaagtgaagctcaacgacggccgcacgttcgaggccaagctcatcggcaaagactcggcgaccgacctcgcgctgctgaaaatcgaggcctcagacctgccgaccgtgccgttcggttcgtcggacgcactgcgcctgggcgagtgggtgctggcgatcggttcgcctttcgacctgcaatcgaccatcacggccggcatcgtgagtgccaaggcgcgtaacctgggcgtgatccccaacgatttcagcatcgaggctttcatccagaccgatgctgcggtaaacccgggtaattcgggcggtgcgctggtcaatacgcacggcgaactggtgggtatcaacacgctgatcaaatcgcagacgggcagctacgtgggttattcgttcgccattcccgagtcgatcgtccgcaaggtggtcgtcgacctgaaggagtacggcatcgtgcagcgtgcgctgctgggaatccgctatggcatcgtcgaccaggacttcatcgacaacatgggtgaggagacgggcatcaaggaactgggcggcgcctatgtcagcagcgtcgtcgaaggcggttcggcttcggaggccggcatccgcaagggcgacgtcatcctggacatcgacggcgtgaagatcaacgacaatgcgacgctctccgagcagatcggccgccgccgacccaacgataaggtcaaattatcggtaaaaagagacggcaaggtgaaacaaattgacgttactttgcgtaataaagcaggtaaaacggaattaattaccaaagaagacgtcgatatggtcgaggttctcggaggtaagttcgccgatgcgggcgccaaactctgccgtgagctcgatatcaagggcggcgtgcaggtagtcggcatcaaggccgacggaattctggcccgtgcccgtgttaagcagggatttgtgattacccacatcaacgaccgtccggtctactcgctctccgacatggagcgcttgaccgacaaggtacgttcgatcgacggcatctatcccaacggccgtgctgcaagctacgtgcttgtggaatagcaggacgacccgggcgggttttgtttgagaagctaattttttaggaagttaaataagaacatgcgtcaattaaagattacaaagtccatcaccaaccgcgagagcgcttcgctggacaagtacttgcaggagatcggcaaggaggagctcatcacggtcgaagaggaggtggaactcgcccaacggatcaagaagggagaccaggaagccctggagaaactgaccaaagccaatctgcgcttcgtggtctccgtagccaagcaataccagaaccagggactgagccttcccgacctgatcaacgaaggtaacctgggccttatcaaggctgccgagaagttcgacgaaacccgcggcttcaagttcatctcgtatgccgtatggtggattcgccagtcgatccttcaggctttggccgagcagtcgcgcatcgtgcgcctgccgctcaaccaggtggggtcgctcaacaagatcaacaaggcattcgcccgcttcgagcaggagcatgagcgcaccccgtcgcccgaggaactggccacggaactggaactcccgaaggagaaggtcaccgacacgctgcgtgtcgccggccgccacgtctcggtcgatgccccgttcgccgacggcgaggacaactcgctgctcgacgtgctggtgaaccccgattcgcccaatgccgacagggggctgatcaacgagtcgctttcgaccgaggtcgaccgtgcgctcgagacccttacggaacgtgaacgcgacatcatcaagtatttcttcggtatcgggacgtcggagatgaccctcgaggagatcggcgagaaattcgacctgacgcgcgaacgcgtgcgccagatcaaggagaaggcgatccgccgcctgcgccactcgtcgcggtcgaaactgctgaaatcctatctcgggtaaacggtattgtgatcgtaaaatcccggactaaatcagttagtccgggattttttttgtgcctttcgcttccctttacagcaacaatccgagcgtgagcagcaggccgaacaacaggatattgcgtgacgtggcgcccaggacggcgttcagttcacggccgcggccgatccgtatcatgcggcgccatgcagcgacatgcggcggcaggtagagcagcggcaggagtgccgcccatgtccgcccgtcgccccaaagcccgaggcagagcgctgcggcagcgaatcccgacagcaggtagagccgttgtcctgcccgttcgcccaggcggacgacgagcgtccgtttgccgttgcgggcatcctgctcgcggtcacggtagttgttgaccatcagcagtgtgtcgatcaccaggccgcaggctgccgcgacgaccgccacctgccatgtccagccgccgcagaggacgtagtacgtgcagctgacggggacgaatccgaagaaaagcaatacgagcatgtcgccccagccgtggtaggccagcgggtaaggcccggccgtgtagaggaatgcgaagaggacgcaggcggcgccgacggcgatgagccaccagcccccgtaggcgatgagcccgcagcccgcggcgcaggcggcgagtgtggttgcggcgatgcccagccgcatggacttcggggtgatccacccctgggcgcaggcgcgttcaggcccgaggcggtcttccccgtcggatcctttcaggtaatcccacaggtcgtttatcaggttggcgtcgatctgcatcagcaaggcgaatgcgaagcagagtaccgcgggcaagaggacgaacccgccgtccgccgccgcaaggccgcagcctagcatcaccgggacggcggctccggtcagagtcttgggacgtgccgcaagcagccatgcccgcagggaatcggtgcgtatctcttttgtagtcatcgtttcggtttgtgggcgcggggctatcccggatttaccacacgatgggttcctgccccacgctgaggaggtattcgttggcgcgcgagaaatggcggcagccgaagaacccgcggtagaccgacagcggcgagggatgcacggccttgagtatgcagttgcgctgcgggtcggcgatggccccttttttctgtgcgtagctgccccagagcatgtagacgataccctgcttgtgctgggcgatggcgcgtaccacggcgtcggtgaaggtttcccacccatgccccgcgtgcgaggctgcctcgtgggcgcggacggtcagcacggcgttcaggagcagtaccccctgctcggcccagcggtcgaggttgcccgtcggggggatgggtgtcccggtgtcgtcggaaacctccttgaagatgttttgcaacgagggcgggaacggcacgccgtcgcctaccgagaagcagagcccgttggcctgcccggggccgtggtagggatcctggccgatgatgacgactttcagtttgtcgaaggggcatttgtcgaaggcccggaagatattgctgccgcgcgggtagatgcggtgcgtggcatattcctgccgtacgaattgcgtaagggcggcgaaataaggtttctcgaattcgggagagagcagctctttccagtcgggggcgatctttacatccatgttgcaaggtggttaaagtggtgtaaatgtagtaaaaagttggcagattcctgttatctttgcacgaggatatgaagaaagcatttttgtttctggcgttgtgcctgctcggtgcaggccgcgcagcggctgcggaacccgtcgacagtgtccgcaatgtgatttatatgatcggcgacggcatgggcctggcgcatgtttcgatgctcgccgtcgaaggtggctatgccccgacggctttcgaccgggcacagggtattgccctgatctcgacctattcggccaacaaccgggtgacggattccgcggctgcggggacggcgctggcatgcgggagcaagacgaataacggtacgttggggctggatccccggggcgggcgtctgcagtcgctcatcgagtgggcggtggccgaagggatgcctgcggggattgccgtgaaatgccatctccagcatgccacccctgctgcgttttacgcgcatgttccggatcggggcaacgaaaaggccattacgcgcgacctgctggcgagcaatatcgacgtgctcataggtgccggcaggcggctcgaaaaggagtcccccgagggcggttcgtatcgtgatgcgttcggtcgccgcggctatgcggtcgtcggttcgctcgaagaggcggagccggttcgtgcgggacggttgctgtgtgccgtgaccgatgaaaatatcccgaagacgatccggcgcgaagattacctgcgctgcgccacgcagaaggcactggaaatactctcccataatgccgattccgtcggccgcggctttgtgctgatggtcgagggctcgcttatcgacggtgcgtcgcatggtaacgatgcggagaagatactggccgaaatgcgcgatttcgagcgtgccgtggctgcggcgatggactttgccgactgcacgccggggacgctggtcgtagtgacggccgaccatgaaaccggggggctcgccatcccgagctgcgacggtgattttacccgctccgagagcggtatccgatatgttttcggatccaaaagccacacggcgacctacgtccccgtttacctttatggtacgggtgcggggcgtattgctgggataatggacaacacgcaacttgcccggcgggtcatggcgctgctcgggaaggaatagccgtttttgtgcagcgcgcccggtgcggccccaccggaaggtcatgccattgtccggtgaacgggggccgggaattacgccctgcctgcacgggtgatgctgtttcggagaattgctgcgccgcccggcggcaaacggctccggttccaccccgtattaaatacaaacggcgtccactgaactcggggtggacgccgtttgctgcttatggttggtgcgatgcttcggaaagcctactttttttgggtgccatagccgactactaaaatctcttccatgtcaccttcccgctgtgcggtgtccttgtcgtggaggatgccttcggatgtctggacagcgaagtctaccggcatgccgaattttacgcgtacggcctctccgcgctgtttgccgggcgtccatttcggggatttgccgatgacgcgcagtacctcgtccgcaagggatttatcgggcgatttgaatatttcggcgttgcccaccgagccgtccttctcgatgacgaacgtgaccaggactttcccgtaaatgtttttgccgagggcttccgccgggtatttcacgttcatttgtacccaccggcgaaactcgccgatgtcgccgccgttgaattgcggcggggtatccaccaccaggaacggctcttccccggaacctttgttttcactggtcttagtgtcctgtgccgtagcagttattctgaaatcaacgggcagcgtatatctcacacgcaccttttcgccgcgctgttcgcccggtttccatttgggcgaagctgcgacgacgcgccgcgtctcttccgagaatgccttgcccggcgtctgaagtatctggatattgcttaccgagccgtccttttcgacgacgaacgacagtacgatacgcccctgttccccgttcctgaatgcctcggcggggtattttatgtttttctgcacccatgcgcgaaaagtgttgaggtcaccgtatcccgggttgccgccctcttgcatcgggaacaagggcatggtctcggcgatcaggaacggctggtcgtcctccgtttccccggtttcgcggatcgcttcgtcgtgtgcctcagcctgtgttgtggcgtttccatgctcctggcgggcgttctccggtctggcgggcagggccgtatcacctttggtcgttatgattaccacgccgttgcgggcttcctgcccgtaggtcgctacggcggattggtctttgagtaccgttatgttttcgatgcggttcggatcgagcttgtttatgaaatcgggggccacctcgatcccgtcgaccacccagagcggtttgccgatctcggccgaaagcaccggtgtccccggggtttcggattccagcgggatcccggcaaactgacgggctgcctctccgacctccagcaggtagggtttgcaaccgacgtaggtgacggtgagtattgacccctgcggggcagagatttccgcatgtcccgatttatcggtgacaacgcccttttgcgtatcctttatcgttatcactgctccgggcaggggttcgccgtccttaagtaccgttacggcgacctgtttttcggtggttgccgctccttggtttgacgagcttgcggccttgttttcagttcggagcaacacgacgacgctggcctccttttggctatgccgcttcgtatcgaccgttgccgattcgtagccgggatagcttaccaaaagtttgctgccgtccgggacggtgatctcggcatgtccgtccgcattggtcacagtgccctgtgtcgtacctacgacctgtacgatggcgcccgggagtgcccctttgtccttgttccggacatctatcgacaccctgcatgacttgtcctttttttcatctccggcatgctgtgcttcctgcccgggagcggtttcgataccggtgccggttgccggggcgacgatcactgcggcgcgcgtagtgaaagagaatgcgcacaggagcccgatcagggctggcagtgtacctgccagccggagcaggctgtgcctgctttttgtctgcgtagtcatcattttaaagcgttttttagtaagtgagttacgcagcccgttggctatttccggactataaccgaaaagctgcttgaagatcgtttgcatgtattcggccctgtcgtagccgctcgtgagtacgtcgctgtcggcctcgaactcctcggcctcggtcagccgccgtgcggcgatccatacgaaggggttccaccacagggcggctttcatggtttccatgacgatccgctcgagggagtggcggtgggctatgtggctcgattcatgggccaggatcgcccccatctccgcggcgggtgttgcggcccatatgtagattgtgcggaaaaacgagaacgaagcgatctcctgccgcgtgcgcacgatcttgtatttgcccgtacgggtgacctccgcgccgcgccggaggcgccggatacggaatacctgccacaacatgatgccgaggatcagggctgcgcccgccaggtaaagccccaggcacagatgcccgggcgtgatggcgtgcgcctcggcgtcgggcagcacttcggccgtccagtcgcccggggcaggcgcagttacggtcggggtcgccacgatgacctgccccggccatacggggatgcgtagcagggggatcagtgcggctgcggccgtcgaggcaagcaggtacaggcggcaccagcggaatttcaccctgcggtcgagcaggatggtgtaggccgctaacagcacgctgctgcatgcgaggacttcgagggcatatatggccagcgttttcatggtcgtaagggcttggggcggagcgggcgattatttgcgggcgttctgcatgatttggagaatctcctccatctccgtgaccgagatgtcctcatggcgcgagaagaacgagaccatctgtgccagcgagccgtcgaaataggacgacagtaccgacgacatgaccccgcgtgcgtactcttcgcggcttacggccggatagtagcggtggcttttgccctcgggcatgtggttgacgaaacctttgttttcgaggattttgaggaaggttgcgaccgtggtgtatttcgggcggggttcttttgtttgggcgatgatttcgttgaccaccgcatcgcccagcctccagagtatctgcatgatctcctcttcgccgcgtgtgagttccgttaatttcttgtccatatcaaaaagcgcttttttagttcctgttgcaagtttactactaaatttttagatatgcaaatttttcttctaaaaaattagtagaatggtgcgggaggggatcgtacctatgtttataagataagcatttgattgcggagtatgcagcactgggtcgggacgaggcgtcgggagagccgaggcgggcggagaaaggggcggagatagggatggggcaggcctgatccggggcgtcgcagggaggtggctgcgaaggtaagggcgaaatagacaccggaggcaggacggaggagcaggccgtgaccgtatgtcggcatggcggatggggctgctggatccgcaggtgcgggccctgccgaatggcgggagggcgtgatcgggagtcgcgggaactcggaagcctggaggctaccgggaagaggagcggcgggttgcggtaaccggggctcggatatggaaatccccgcagaaggggggatgcggggatcgggtaaatggctctacccgggcaaaactgctgggcgcgtaaccagctccgggcatggggtagatcgggcaaatgactctatgcggcaaaaaatgcggggtgcgtaaagagtcccgggtatggggtgaggtgtcgaaccttacctattccttacgggcgttgcggccggagctatgcttttccggccggcgtgctaacccagccgtgcctcttcgttgtccttctccgccttctcgtcctcttcccagtcgaaccacgggaattcatggcgcccggcgagcgaaaaacgggtgtaggtgatcggaagccccatttcgaggaatcgtttttcgtaggcggtcttgaccgacagtacctcgtcggcgtagcccgtgccgtagatgtcggcgttcgagacttcgcacggcaggccgtagcggcgcaccacctcgttcgtatagccgaaaagatgtttcgaatcggtcttgaggttgatccatccgcccggggacagtatgcgggcgtaatatccgaggaaaagcggcgaggtgaggcgtttcttcgcccggcggctcttgagttgcgggtcggggaaggtgatccatatctcgtcgacctcgccctcggcgaacaggccgttgataaactcgatgcgcgtgcgcaggaaccccacgttgggcatcctgcggtcggtggcggttttggcgccccgccacatgcgtgcacccttgatgtcgatgccgatgaaattgcgcgacgggtcgcgctcggccagcgctacggtatattcgcccttgccgcagcccaattcgagtacgatcgggttgtcgttatggaaaaagtcgctgcgccaatgccctttgagcgggtggtcgcaacggaatacctcgtcgaattcgggttgtatgaaacagtcgaaagtcaggttctcgcggaacttgcggagcttgtccttgcccattgttgtctcttattcgctttttacgatatttatgccgacggcctcgatgcccttcaccgggcggccgggtgtgacggttatgcagtagtcgcccgtgcgggcaaaacggatgcggcggcgataggggaggtcggcctcgcgcgacagggcggccggagtgtgcgcggtcgggagtacgagccggaaagcctcttcgtgccggagcgaatcgggtgtgacgactgctatgcgtaccgtcagcgtgtcttcatccatgcggtcgtcgtagcgcaggaacaaatccatgtcacgcagcgtcgtcgtatcggtgttggtgaagacgatggcggcgggggtgtcccagcccgaggcattcacatcggtcaccgcggctccgtggggtgacacgcagcctgcggcaaaggccgcggtggaaaggagtactgcccgacggactttccggaatgcgctgcccgtccgatcccggtatgcggttgtgccggacgctgccctgcccgacctcggcgtatggaaccacgttggatcgggttttgttgcgccggtctggggtgcgcggggttctgtcgtgccggtcagcgttgtgccgggttgtgttgcgcagggttctgtcgtgccggtctgtgttgtgccgggttttgtcgcacagggctgcattgcgccggcctgcgtggctgtgctacccggaatgccggccgtctgccgaagcgttccggctgctgcgcgacgtgccgctatgtcacgtgcccgtatcaccgcctattcgtttgaacccccgttgcttccgctgccgttgtcgctgcccccttcgcggcgttcgcctcccggatggcggcggttgcggttgttgcgcctgttgccaccttcgcggcgttccccgccgtttgtattgccctctgcgccgttgttgcctccgttgttgccgttgccattgttgcggggagctgcctcattgcggttcccgttgcggcggtcaccgccgttgcggccctccccgttgttccggttctcgttgctgcggccttccccgttacggttctccccgttgcgggaacggtcgctgcgccgctggcggcgttcggggcgctcctgctggggctgctgccccggctgggcctggcggcgctcctgtcctgtttcctgggaaggctgtccgttctgcccctcctgcccgttctgtttgccccggttgcggccgcgcttgttgcgccgtttggccgagtcgaaacgggtgatgctgtcctcttcggagcggtaggtcggctcctcggctatcgggcggatgtcgtcggcgtgctgcagctggtcgaccttcttgcccgcacggttcagcgccatgatttcgcgcacgcgcgacacgggcagcgtggtgacattgaccatcgcatccttgcttgacgagaaggtcatcgtgccggcgaggatgtcgcttttgacgaggaaatattcgccgtcgatggcctgcaacggctcacgcaggcgcgggaactccttgcgggcgtcgacataggtgtcgtattcgtacatcatgcagcatttgagcttcgagcactgcccggccagtttctggggattgagcgaaatctcctgtgcacgggcggcacccgtcgtgacgctcgagaagctcgacatccacgatgcgcagcacagctcgcgcccgcaggcacccagcccgccgatgcgcccggcttcctggcgtgcgccgatctgcttcatttcgatgcggatgtggaaccgctcggcgaagaccttgatcagttcgcggaaatcgacacgctcgtcggcgatatagtagaaaatagccttgatcttgtccccctggtactccacgtcgccgatcttcatgttgagtcccatgtcggcggcaatctggcgcgaagcgatcatcgtctcgtgttcgagggcaatggcctcctgccatttctcgatgtcgtagggtttggccttgcggtaaactttcttgaactcgccgttgtaggggttgaatcccgtgcggcgcatctggcgtgctaccaggtcgcccgtgagcgaaacgacgccgatgtcgtgtccgggcgatgcctcgaccgccacgatgtcgccccgcttgagttgcaggttgttggcgttctggtagaacgagcggcgcgtgttcttgaaccgcacctccacgatgtcggtcgggatattctcggggtactcctcgagccacgccgtttcgtggagcttgaaacacccgtcgcagagtttcgcctcgcactctgcgccgcaatcgcagaaactgcatccgcggccgacttcgggtttacactttttcgtatattgtttttcggtgtccatttgtgggcataatttgcgtaaagatacgaaattttttttaaccggcggccactgtgcctaaatcgttgcctcaattgcccaggcggagcttgcggacgctgcgccggatgcggacgatcatcatcacggccgcggccgacaggccgaacgagaagccgaggaaaagccccgtcgggcccatgccgagcgtgaagccgaacaggtagcccaccggcaggttcagcagccagtaggatacgaaggcgatcggcatgatgatcttcacgtcctgtatgccgcgtagaatacccaccgaaacattctggatgccgtccgaaagctggtagagcgccgcgaagaccagcagttgcgaagcgatggcgatcacctcggggttggtcgagaagaacgtcgggatgatgttgcgcatggtgatgaagaccagcgctgcaaaagcgttccaggccagcaccagatggtacgacgccttggccgccagcgacagctccccgatgttgcgggcgccgtagcagtgcgacacgcggatggtggtggccgcaccgatcgacatgacgatcatgaaggcgcagttgccgatcgtgacggcgatctggttggcgctcatggtctccttgccgaaccagcccatcatgatccccgtgccgacgaacgccgaggcttcgaggaacatttgcatcgagattggaagccccatgtgcagcaggttcttcaccgtggcccacgaatagttgcggggcgagaacccgtcgaggtagccgcggtatttgtggcggttgtagaagtagccgatcatcaggatcggggcgatgatgcgtgagagcagcgtacccagcccggcgccttcggcacccatctcgggaaggccgaagcggccgtagatgaacaccgcgttgaagccgatgttggccaggttggcgatgatcgtcacgaccatctcgaccttggtgttgcccacgccttcgaggaattgcttgaaggcgaagaagagcatgacgaacggcatgctgaataccagcatcttgtagtagggaatggccatgtcgacgacctcgacgggctggccgaggtggtacatgagcgggatgaccgcatattgtacggcggccatcgcgaacccgagcagcgtgtagaacaggatgccgttttgcagcagcccggccgacttctcgcggtcgccctgcgcgtagagttcgcccacgaggggcgtcatgcccagcgcgatgccgatggcggcgatgaaaaggatgaagaacaccgccccgccgaacgatacggcggccagcggcacgggatcgtcgccgccgtagcggccgaccatcaggttgtcggccacttgcgtgaggatttgtcccaattgcgtcagtacgacgggcagggccagccgcaggttggatttgtactggtctttgtatttcgagaaactgtacatcggttttccggattagggtgcaaagatagccatttatgtccggattgcaatcctcgggctgtcccgggatgaaaaatccgcccgtttctgggcggattccatgccggaggtcagtacgggagcgtgatttcgatgcagcagcccgcgcggtagtcggggcatacgcggattgcacccccgagccgggtgacgatcaggcggcagaggtacaggccgatgcccgacccgggtttgaacgaatctaccttggtgaaacggtcgaatacccattcctgcttgtccggggcgatgcctatgccggtgtcggttacgcggatgcggagtttgcgggtgcggtcgtccttgtcgcagcagaccgtgacggaacccgcagcagtgaatttggcggcgttctgcaacaggttgtcgatcacgcgcgtcatgtaggtttcattggtcgggatgacgcaagtgccgcgacccccccccttgaggacgtactctaccgacgggttttgggaaagttcgcgctggatttgcagccgttcggcgcacagcaggccgagatcggtttcggcgagcggcaagggctcttcggagctgaccaggctcgacaattcgagcatgttttccagcagggtggtcagcgcggtcgtgctcgcccatatctgttcgcggaattcgcgccgggtatcgtggtcgtggtcgccttcgagcagtagatccgaaaacccgttgatggcgttgagcggcgtgcggatttcgtgacacatcgagttgatgaaggccgttttcatcttttcgctctccatggcgcggcggctttggcgggttatctcttcgttggcatcggtcagttgccgccttatctgcttcagctgccgaaccatgacgtactggtagacgctccagccgacgagcagcagcaccagaatgccgcccgcaagcagggcgatgaatcgtatgcggccggtcagccgggacttttcgaattccagcctgcccacctcgaacaaggtctgcatttcggcaagactgctctgcgcctcttctacccgctcgttgaagcggatgttattggttgtccgcaccgctttgagggcgtttttataatcgcccatttcttcgtacagataggattgggtggcatagataggggctaagtccgcttttatgcctttgcttttgtagacggttatggtcgagtcgatgtaagccacggcccgttcgtaatcccccgtacactgataataccgggcgctggtgctgtatatttccgccatgtcgcctctggcgcgggccagcccgatgcatttttggtaatactcgttcagcttatctcgggagatcaggtcgcgcaggtataccattttggcataggcgcgcatcatgtagcccgtcgtgtcgcggtggggccgttcgaagcggtcgtccatcgccagccatttgcggtgcaggtcgatacattgcccgatctgctcttcggcgcgcttgtccttgcagagcatatagagatcggaaagttcgtcgtggcaaatcttttccaggtggagacgctcttcgagcgggtatttcctgaggttttccagcgctcgctccacataggggattgccttggcgatgttgtcgtaggcttcggtcgtgaccgacgaaaagtcgatggccaggcctgtcaggaattcccattcgatgcgctcctcgggcgtgagccgatcgtagtttttgcctttgagttcttccagcgcacgcgttaccgtttcgatcgaattgttgtcgttcatctgtttccagaggtagtaggcgtaaagcgacgaacggaacagggcgtggtgggaacccgggagaatgctgtccgagagggcgatgtatttctcggctcgccgggtgtcgcggtcggcgaatttacgaaccagaaagtccagcgcatctttgcatccgtaggtatccccggccttgtgcgcttcggcgagtgccgcttcccaatagggtgcggccagttcgaggctgtcgccgctcagatcggccagttggacgtatattcgtccccggtcggcggcatcgggtgttttcggtaagagcgtaagcagactgtcggtttgtgccggcttgggggacgccgatattgcagcgtacggaaacaaggacataattagccctgacgcaagggctttcaggagaatatgatgcatgtcggtgtcgtgaaacaatattaaattcggacaaatttatgaaaaaaatctttcggggaattatcatttaaaaaatagcaaacataaaaacagagaccggttgcaagccggtctcttttaacgggacgggtctgaaccgtccgggagtcatgccacccgcagctttacgccgtgcgatttgtccgactcgacgacgaccgtgtcgccttcgtggagtttgccgtcgatgatcagcgtcgaaagcggttcctcgacgttgtccatcagcgtacgtttgagcgagcggactccatagcgcgattcgtagcccatggccgccaggcgacgcttggctccgtcggtgatcttcaccttgtagcccaggcggcgcgtgcgttcgaacagcccttgcaattccagttcgatgatccgctccacatcgctcagttccagcgtgcggaacaatacgatgtcgtcgatccggttcaggaactccggggcgaaggtctgctcgagtgccttgcggtattcgcaccggggcgtcgcggaggctgtggcactcttcgatacggtgctgtaacctacctgcaccgatttcttgaccacgtcgcgcgacccgacgttcgaggtcatgatgatgatcgtgttgcggaagtccaccttgcggcccgagccgtcggtgaggtgtccctcgtcgaagatctgcaacatcgtgttgaagacctcggggtgtgctttctcgatctcgtcgaacaggatcacggcatagggctggcggcgtaccgtctcggtgagctggccgccctcgccgtagccgacataacccgggggcgagccgatcagcctggcgacgttgtgcttctcgctgtattcgctcatgtcgatgcggatcagtccgcgctgttcgtcgaagagccatttcgagacctccttggccagcagcgtcttgcctacccccgtggggccgacgaagaggaataccccgatcggacggttctcgtccttgagtccggcccgcgagcggcggatcgtgcgcgagatcttctcgacggcctcctgctgccctacgacccgctgcgaaaggtgctggcagagggtttgcaggcgggtcatctctccgcccgaaatgcgctcggcggggatgcccgtcatcgaggtgatgacctgctggatatgctcggccgtgatctccacggggttggtttcgagcgaccgctgccattcgttgcggctttcgcccagtttcgaacggagtgcgatttcgcgcaggcgtgccgaggcggccttttcgtagaccagctctttgaccgcctcgcggcgttcgcgccgcacttcgtcgagtgcgctctccatctggcggagttcggccggttcgcgcgccgattgcaggtgtatgcgcgagcctgcctcgtccagcacatcgatcgccttgtccgggaagaagcggtcggtgatgtagcgcccggtgagttccacgcaggcttgcagcgcctcttccgtatagcgtaccttgtggtgctgctcgtagtggggggcgatgttgcgcaggatctggagcgtctgctcgggcgtcgtgggctcgacgacgaccttctggaaccggcgctcgagcgccgagtcgctttcgatgttctcgcggtactcgtcgagcgtcgtggcgccgatggtctgcagttcgccccgtgcgagtgccggtttgaggatgttggccgtgtcgaggctgccctgtgtcgaaccggcacccacgatggtgtgtatctcgtcgatgaatatgatcgtgtccttggccttgcgcagttcgtcgagcagttgctgcatgcgctcctcgaattcgccgcggaacttcgtgcccgccacgagcgacgatacgtcgagcgagaagagcgtcttgtcggcgatggtgtagggcacctcgccgcctgcgatgcgcagagccagcccttcgatgatggcgctcttgcccacgcccgcctcgccgatgaggatcgggttgttcttcttgcggcgcgagagtatctggactacgcgttcgatctcctgctcgcgccccacgacggggtcgattttaccctctcgggccatctgcgtgaggtttacgccgaacttgtcgagcacgtgcgatgtgtttttctcttcgggtttgttttcctcgctgaaatcgagcatgtgtacctgtatctccgtgcggaaatcgtcgccggcggcgaatttcttgatgtcctcggatacgacttcgcctgtgatgccgtacatttcgagtacgcgcgatgtcgcggtcgagcggtcgccgacgatggctcgcagcgcgtgggccgtagaaacgctccgcgtggcgcccgatacggcgcacaactcgtcggtaaaggcgcggtaaaactcttcggggcccgttttctcacgcagcctcgaccccaatacctcgcgttcgatacgcaggcgtacctggtagagctcccagtccttcaggcgggaggataaaagctggtaggcgagcgatccctcttcgcggagcatctccagcatgagaaaatccttcagcgagtggtcgattcctgccttggtcgtattaaacgccgcgcgggcgatgatgccctcgagcgtctttgaaatttttacttgcatgttgcgtcgtcatgaaatttaatgttctaacttttgattcttcgcctatctaacggcgtgttattgccaaatattatgttaacttgtttgtcggcatttattgcattgtctctgagtggattgtgtgggtgaaatttttgacgtgcgatgccggaaacgggtttgggtgtattctgaaagggttttcggcctttttcgcggggaagagacgctccctcggaagggtgtcgcgtgtagtatggaaagggtgcgcggaggcaggatcggttccctgcggccagtgtcggaaagagctcttgcggggcggggttcgccggctttggtttccggggctgcctgcggtgcagagcggctctgtgccgggcggcttcttgtgcggaatataccgactgcgccgggattagttgcctgttgccggccggtgccgggcgtcagttgctgttatacaattatgattcggaatgttttatttttgatacgaaggccgaaagccgtaccgataccctgccgaaaccggatgtaaatttttccagcgtattatctctctgaaagataattattattacgactataaaacgggacgtatgtgtttttattgtgctggtcttgtttatttgtgttgttaattttgtatttttgtgaaaaaggcccgtccggggctgttgacaaccgacttcaacccgaaaagaatatgaaacggatcctgatccctctgctggcgctcgccgccgccatgacctttgcacaaccgccgcgcccgctgccaccgggctatcccgatcgttcggggagtatagacctcgaaagggggttccgaaccccgccggcaggttacggcgaggtgcccttctattggtggatcggcgacacgctcacacgcgaacatctcgcctggcagctcgacatgctggcccggaaacggatcagcagcctgcagatcaactattgccacaccgatacgggcggcatcacctacggcaggacattccgttcgaagcccgacctcttcactccggcgtggtgggagcttttcgggtggttcatgaccgaggccggcaaacgcggtatgaccgtcagcctgagcgactatacgctgggcgtggggcagggctcctatgtggacgagatgctggccgaagacccgacgctcaacggttcggaactgcatttcgacagtctggaactcggccgcggggagcgtttctcgcgggcttatgcgcagcggccgctttcgctgaacgcttacccgctcgatgcccggggccggatcgacggggcgccggtcgacctgttgccggaaatggggcccgacggggtcgagtggcagaacccctggccgcgggccctcgtggccgaagtgaaggccgagcggcgcctgccttcgctcgatccgatgcaccctcgggcggggcacagttacgtgcggcactttttccaacgttttgccgaccgtttccccggggaatcggaaacggggctcaatttcttcttctccgatgagctgaacttcaacctgcagggcaatatctggaacgatattttccgcgacgagttcatgcgccgcaagggatacgacatcctgccgcagatcgacgcgctgttcgtcgacctgggtgacagttcggtcaaggtacgcatggactataacgacgtacgcgtggcgctgagcgaggaaaacttcttcatccccgtctatgagtggcaccagcggcgcgggctgcttttcggatgcgaccacggcggccgtggccgcgacgtgggcgagttcggcgactatttccgtacccagcgttggaaccaggctccgggttgcgaccagccgatgttgcagaaggacattattaaaaacaaggtcgcctcgtcgatctcgcacctctacgaacgccagcgcgtctggctcgaaggtttccacagcagcgagtggtcgaccaactcggcgcagctgaccgatgcgatcttcgccaatttcgccatggggcagaacctgctgagcctgcacgggctttactatacgactatggggggctggtgggagtgggcggcgccctgcaaccatttccacgagccttactgggacgagatggacgggttgctggagtgtaccgagcgcctgagttatatcctgtcgcagggataccacgtcgccgacgtggcgatcctctatcccgtcgagccggtggtggccgggtacggcaacgaggctgtcgaagccgcctttgccgccggggaggcgatttaccgcgacggcatcgacttcgacttcatggattacgaatcgctcggccgggccgaggtgcgcgacggtcggttgcatgtggccggggagtcgttcggcgtggtcgtggttcccgccatgcgggcgatccgccacttgtcgctcgaaaaactgcgcgacttcgtccgcgacggcggcatggtcatcaatatcggcccgctgccggaggcctctgaaaaggaggggcgcggcggccgggcgttgaaggaactggtggcggatctcttcgggggcgggcacgaccgggttttccgtatcggcgacccggcggatgcgatcgcgctcatcgaccgcaatacgcagcgtgatttcacgctgctccgcccggcaacggatgccggggcgcatcctgccaagcaaaagacgggcaatccgaccccttacgtcatgcaccgccgcatcggcggccgcgacctctttgcggtctataacgtcgggcggggcgcaacgtgccgtttccgcgcatggggagccgcggagctgtgggatccgtggacgggcgggaaacgcccgctgcgggttgccgccgtcacggatgctggaaccgaggtggtgatgcccctggagcgtacggacatgcagctgatcctcttcgacccttcccgcgatgcggaggtcggggcggaatccgccggcgcggggagcacgcagcggatcgacctcggcggggagtgggatttccggctggaacccttgctggacaaccgtttcggcgattaccagtggccggggacggacgaaaagatcggagcctgtatttatgatgccgaatacgaacggcttggcggcgaggctcggaaaggccgcggacggttcaccttcggggagcgcttcatgcttctgggagcggtacccgcctcggtggatgaacggacggtgctggacaacctgcccggcacggcgtcgggcgtggaggcagccggcgtgcggtacgactggcagccctatgcgttctcatggcgctggggcgtcgagggcgacttcgggcatcagggctggcacggcctgaaggcggagatgtacgacgatttcatccgcctgggtgcgaccgaacgggctttcaacggcatggttcgcaaggccgaggcatccggaatgaaggattattacctttacacctgcgtggatgccccgcgcgacgggttgtacgacgccgaatggggcgggatgcagcccgtggggttctatgtcggcggggaacggcgggagcctgcgccgcaggtcgccctgaagcagggcatcaacgagatcgtgctgcattacgattcgttcggcatggcgcggttcgccctgcgcgacggtgcggcggacatcgcgcccgagacgctggccgaggccccgttgcggatgaagttccgcggcgaccgggcgctgctgccgttcgacagccggaagacggcggatacgcgggcgcggttcacctttacggcggcgcccgggctggaggcgctggaattcacggctttcggccggaaacccgaagtgcgtgccgacggccggaaatgccgggtcgccgaggtcgcacgccgcagcgacggcgccgtaacctaccgtgccgtgttgccccggcgtgccgaacttccggcggaggtgtcgctgacgcttaccgaagaacgcgggtatgccggcggtgcggcgatagacggccctgtgaagctggtttgcggggcgggacgctatacggccggcgattggtgccgtaatgatgccttgcgtacttattccggtgcggcgtggtacggccgggactttacgctgacgaagaaacccgtgggtcgtgtgacactcgacctgggcgaggtcgtctcgacggcacgggtgctggtcaacggtcgtgaggccggtttgaggctgacgtcgccctggcgtttcgatgtgaccggactgttgcaggaaggtgccaaccggatcgaaatccgggtttgcaatacgacggccaatatcttcctctcttcgccgacggtctaccgcggcgatacgaaggccggaatactcggcccggtgcggatcgagatcgccgaataatctgcggccgggagtgttaaggcgggcgccgcaattttgcggcgcccgccttaatcggatgaagccccggcgtggattctccggcgtattttcgggcgggcgtcttcggtacgtcttcggggcggattatttccgcggccactccccgacctccatgtcgcgcatgtcggcgccgtcgatcaccagccgcacggccgtgcggactttgtggaaaccgtattcgccggctgcgcccgggttgacatgcagcaggtcgtaaaccggatcgtagaccaccttgaggatatgcgaatgcccggcgatgaagagtttgggatgcagcgcctgtatctttgccgctgcgcgcgggtcgtaatggcgcgggtagccgccgatatgggtcatcagcacccgcacgccctcgcattcgaatgcgaggaaatcagggtagacgcggcgtgtgagccctccgtcgatgttgcccgagacggcgcgcaggggtttgaacgacgcgatcgtgtcggccagttcgagcgagccgatgtcgcccgcatgccagatttcgtccacgtccttgaggaattcgcgcagcgtgtcgtcgaatgtcccgtgggtgtcggatatgatgccgatgcgtttcattttatggtcgtgatgcgggttgccgtgccgggaatcgtgcgtatgccgcgcgtgccgccggaaatcttcgatgtactatttatacttgtccttccacaactcctgcatgcgctgggcgatcttcgcctcggtggcattcccggtgttgggttcgtagaatttcgtccctgcgaggctttcgggcaggaactcctgctcggcgaaattgcccgcgtagtcgtgtgcatatttataccctttgccgtagcctgccttgtccatcagcttggtcggggcgttgcgcaggtgcagcggcacggggcggttcgtggtgtcgtgctcgaccagcgacatcgccttgttgatggccatataggccgagttgctcttggggctggtggccaggtagatcgtcgtttctgccagcgtgatccgcgcttcgggcatgccgatcttgtgtaccgtgtcgaaacaggcgttggccagcagcagtgcgttggggttcgccagcccgatgtcctccgaggcgaggatcaccagccgccgtgcgaggaagcgtggctcctcgcccccggccagcatgcgcgccagatagtagatcgcggcattggggtcgctgccccgcaccgatttgatgaaggccgagatgacgtcgtagtgctgctcgccgttcttgtcgtagagggcgatgttctgttgcaggcagtcggtgacgtactggtcggtgatcgtcagtttgccctccgtcgccccggccagtatgtcgaggatattgagcagcttgcgggcgtcgccgcccgagaatttgaacaacgcacccgtctccttcacttcgacctggcgtgctttgagttccgtgtcggtcgtcagcgcccggtcgagcagcgtttgcaggtctttgttctccagcgatttgaggatgtagacctggcagcggctcaggagcggcgagatcacctcgaacgaagggttttcggtcgtggcgcctatgagcgtcacgacgccctgctcgacggctcccagcagcgaatcctgctggcttttgttgaaacggtggatttcgtcgatgaacaggaagggcggcttggcgtcgaaaaagcgctgtttgcgggccgactcgatcacctcgcgcacgtccttgacgcccgacgtgacggccgagagcgtgaagaacggacggtcgagctgcgtggcgacgattttcgccagcgtggttttacccacgcccggcgggccccaaaggatgaacgacggcacattgcccgtttcgaagaacttgcggaacacaccgttcttacccacgaggtgctcctgcccgatatattcgtctatcgtgcgggggcgcagtctttcggctaagggagctgacatgatccgtgtcgttttatgatccaaaaataggtatttttcccggaacaggcaaatgcggtgccgtggatgcaggcaaaaaaaagtgccgccgtcaggcggcaccctgtatcgcatggaacccggccgggcgttactcttccggctttaccagcgagaggcacagctcgtcgagctgcgcctgatcgatgcagcccggggcgtcgagcatcacatcgcggcccgcattgttcttcgggaaggcgatgtaatcgcggatcgagtccgagccgccgaagagcgagcacaggcggtcgaagccgaacgcaaggcccccgtggggcggtgcgccgtatttgaaggcgtccatcaggaacccgaagcgcagctgggcctgttcggccgtgaagcccagcacttcgaacattttggcctgcagcttcgagtcgtggatacggatcgaaccgccgccgatttcggtgccgttgcacacgaagtcgtaggcgttggcacgtacccggccggggtcgctgtcgatatactgtacgtcctccggcttgggcgaggtgaacgggtggtgcatggcgtagtagcgctgcgtttcgtcatcccactcgaagagcgggaagtccacgatccagagcggcgcgaacttcttcgggtcgcgcagtcccaactgctgggccacttccagacgcagggcgcagagctgcgtcagcgttttgaacttcttgccgcagaggatgaagaccatgtccccggccttggcgccgcagcggccggccatcgcccggatctcgtcgggcgtgtagaacttgtcgaccgacgattttacgccctcctgttcgacgcggatccagatcagccccttggcgccgatctgctggcgcttgacgaactccgtgagggcgtcgatctgcttgcgcgtgtaggcggcgcagcccgtggcggcgaatcccgtgacgtattctgcgtcgtcgaagacctggaagccgtggcctttcgcaaggtcggtgaggtcggcgaactccatgccgaagcgcaggtcgggtttgtccgaaccgtatttctccatcgcctcgatccacggcatacggcgcagcggctcagccagttcgatgcccattacctccctgaacatgtgcttggcccagcgctcgaaaatctccagcacgtcttcctgctcgacgaacgacatctcgcagtcgatctgtgtgaactcgggctggcggtcggcgcgcaggtcttcgtcgcggaagcagcgcacgatctggaaatacttgtcgtagccggcgaccatcagcagctgtttgagggtctgcggcgactggggcagggcgtagaactggttggggttcatgcggctggggacgacgaagtcgcgggcgccttcgggcgtcgagttgaccagatagggggtttcgatctcgaggaagccttccgcgtcgaggaagcggcggatttcctgcgccatcttgtgccgcaggatcatgttgcgctgcaacggcgggcggcgcaggtcgaggtagcggtatttcatgcgcaggtcgtcgccgccgtccgaaacctcttcgatcgtgaacgggggaacttcggcttcgtggagtatggtcaccttctgggcggcgacctcgatgtcgcccgtcgccatcctgggatttttcgattgccgttcgatgactttaccgatcacctggatgacccattcgcggcctacgcagcatgccgtttggcgggcttcggcgggcgagtgctcctcgatgacgacctgagtgatgccgtagcggtcgcgcaggtcgatgaaggtcatggcgccgaggttcctcactttctgcacccatccggcgagggtgacggtctggtttacgttttcggctctcaggcagccgcacgtatgggttctgtacataggggtttgtattttttgtttgttttgtccttgcaacccgcaaagttaaataaaagaagcgaaatacggaacgcgggccgggatttttatttggcgcggggcgtgccgcggcggctcctgcgcgggataatccgccgcccgacgaggccgtttgtaaaagtttgtctatttttgcggaaaatacccgaaatggaagaacagcggaaaaccgacgaaaaattcatgcgcctcgcactaaacgaggcccgcaaagcgttaaatgaacaagaggtaccgatcggtgcggtagtcgtagccgacggtgcggtggtgggccgtggccacaaccttgtcgaaacgctctccgatcctacggcccatgccgagatgcaggccctcacggccgcggcgtcgaccctcggcggcaaatacctgcaagggtgtacgttatatgtcaccgtcgagccgtgcattatgtgcgccggagccatcggctgggcacaggtaggacgtgtggtgtggggtgccgacgatcccaagaaggggtacagacgttattccgaggcggtcttccatccgaaaacgacggtcgtgcgcggcatcctcggcggggaatgcgaggcattgatgacctcttttttcgccgggttacgcgattaggccgcatttagattttgaaaaaaaagaaaaaaaacatacttttgcatccaacgtatccgcaacccgggatacatgaactgaaaaacttaaaaaacgaataggagaatgaaaaaattattagtatcggtaattgcgctgttcggggccgtatcgctctcggcgcaggatgtcacggcaatttacaatgaggcggccgccgcattcggggcaaagaatttcaccgaggcagctgccaagttcgaacaggtcatcgaccagggcatggacaacgagagcgccgcttcgatggtggctacggcaaaatcgacgctgcccaaatgctatttcatgctgggcggcggtgcgttgaagaccaagaattacgacgaggcgctgaagaacttcgagaagtcggccgagttggccgagctttacggcgacatgaaccagatggccaagtcgaacggctgggttgccaagatttaccagatacagggcggcgacgctttcaacaataaagactatgccaccgcgtcggaaatcttcgccaagggctatgccgccgaccccgacaacacgggcatggcgctcaacctggcgatgagctattgcgaaatggccatgagcagcggcgacatgtcgcagtacgagaggggtatggaaatctacgaggccgttgctgccaagacgcaccccaaatatgccgaagatgctgccaaggccaaggaggatatggcgctctataccaataatatggttgccaagatgcaggctgccaacgatttcgacgggatcatcaagatggccgacgacctgctggccaagaatccccagagcgcactggcgcagaatgtccgtctgcaggcttatgccaacaagaaggactatgccaaggttatcgaactgggacaggctgctgccgatgctcagaccgatccggccgacaagagcctgatgtactacctgctgggcgccgcttacaatgccaaggagatgaagccgcaggcaatcgccgccttcaagcaggtgaccgacggcccggctgccgagaatgccaaggctgccctggccgaactttccaagtaaacggggtaagtgccgatatgaagcgggttcgtgagaacccgcttttttttgtgcggaatatgccccccccctgcggaatcggcttgttattgcgggcgggcaggaaaccgcggtgtccggcgtttgtcccgggccgggttttgcatttccggccggggcgtgggtttgccctaaggtggatgtggaagtcgtgccgaatgcccgggttgttgttgctgcggaagcgcggggcgtctgtcctgcgtatgcggggacgggttattcggggccgggggtgccggcgatgttgcttcggatgcgtgccagtccgctgcgggtcagcggtgtcgtgcccatgcgggcttcgaattccgcttcgtccatcgccagccatgcctcggtgtccatcgccagcgggtcgaacacggggtcgaaggccgggttggtgtgcatcggggccttctggttgtgggggcaacaactctggcagcggtcgcagccgaagatccagccgtcgaggccgatcccttcggagggaaccttctcgatcgtgtgacaggagatacagcgtcccgtgtcgatcaccttcggggcgacgatggcgcccgtcgggcagctttcgatgcaattgtggcagcgtccgcagcgcgacccttcgaacggcgggtcgtagacgtcggcatcgtccgtgagcagcagttcgcccagcaggacataggtgccgaaacggggtgtcaccagcagcgactgacggcctatccagcccagcccggcttcgacggccagttgtttttcgagcagcggggccgtgtcgacgaacgcccgccccgacagatcggggcgtgaggcgcggagtgcatcgagcatcctgccgagcattcccctgatcgtcgtgtggtaatcggccgcacaggcgtaggaggctactttcgtgcggtgcccggggggataaccctcgcccgcgcggtttttataactcacggcgcagaccacggccgtgcgtgcgccctcgaccagtttgcgcgggtcggcacgcttctcgatattgcgctccatataggccagcgacgactggtagcccttgcccagccatgcccgcagcatcgactcgttctcggccaggtggcggcacggggccaggccgcaaaggtcgaaccccgcatcggcggcaagttttttgatgtactgatggtcgagcattttattattttggttcaaaaatagtgatttttaaccggaaattagtaatttcgccccaaactttcgcgttattgaaacgtagttaaaacgaaacgtattatgaccatcaatacactttacgaactggcccgcaacagcgtggaaaagttcgcgtcgaaagtcgcattttcgatgttcgaaggcgacgacgtgacctatgctgaggtgggccggcgtatcgaaaaagtgcaggagatacttaccggtgcggggctccgtgccggggacaaggttgccttgctcagcagcaacatgcccaactggggagtctgctatttcgccgttacttcggcaggcatggtcgccgtgccgatcctgcccgatttttcgggcgaggaactcgacatgatcatcgcgcattccgaagccaaggccctgctcgtttccgaccggctctttaccaaactctcgaaacagaccattgaacggctgaacgtcgtggtgcgcaccaagaacctgggcgtcattgctcagcgggtcaggggggagggcaccatggccgtgccgaagcccgatgacctggccgtgatcatctatacctcgggtacgacctcgaagcccaagggggtgatgctgacccacgcggcactctgcgcccaggtcgggatttcgtcgggcatctttcccgtactgcccgacgacgtattcctctcggtgctgccgctctcgcacacctacgaatgttccatcggcatgatctatcccttctcgatgggtgccagggtcgtttatctcgaccgtccgcccacggcctcggcactgatgccggcgctgcgtgccgtgcgtccctcggtcatgctgattgtgccgctcatcatcgagaagatctaccgccaccaggtgctggccaaattcaattccaacggtttctggcggacgctctataaggtgggattcttgcgccgctacctccaccgcgtcgcgggcaagaaactgctcaagctcttcggcgggcggctgcggttcctcggcatcgggggcgccaaactcgacggcggtgccgaaaagttcttgctggaggcgaaagtgccttatgccatcggctacgggctcaccgagaccgcgccgctgcttgcgggcgccgcaccttcgcaggtgcgcctcggctcgaccgggccccaggcgccgggtgtgcagttgcgcctggagaatatcaaccccgacacccggcagggcgaggtcgtggcgctgacgcccagcgtcatgctcgggtatttcaagaaccccgaggcgacgaaggaggtctttaccgacgacggctggttccgcacgggcgatctgggcgagttcgacaaggacggctggctttatatcaaggggcgcctgaagaatatgatcgtaggccccggcggcgagaacatctatcccgaggatatcgaaaccgtactcaattcgcacgtatatatcgccgattcgatcgtcaccgaacaggaggggcgcctcgtggcattggtgcatttcaaccgagatgagatcgaggccatggtcgacaactggcgcgaggagtgggagacgaagaaggaggcctgggaggccaagaccgagcagctcaagaaggagatcatggatttcgtgaatgccaaggtcaaccgcttctcgcggatttcggaggtggtcgaggaaaaggacgatttcgcaaagactccgacgcacaagatcaaacggttcctgtacaataggagcaaagacaacgacaaaccgcagcgggaacagcctgccggaaaacccgaaaccaaatgacaagacgcccctccgcggaggggcgtcttgtcattctgcgtcagacctgtcttctacctggtcgaagaatgcgccgagcgatatgccgtaatagcggcagaggcgagcgagggtgctcaccgtgatattgtatttctcggtctcgatcttgccgatatggatgcccgtgtcctcgtagacggtcttctgggaaacacccttttctgcacgcagttccctgagccgacctgcgatcgccttcagtaatgttttgtcccgccaaggttgtttcatgttaacaaagaaacaaacctccccaatatttgataatgatttatacatcattatcggggaatttgcctatctttgtcatcatacaggaaacgcgccaaaacggcttggcaactcactgtgcgggatgaggcgtcactgaaaatgtgtacccgttgctgccgataccgttttgaccgcagggaacccaccgaggcgggggttccctgtctttttacggcgggtgcccggggacgggatgaggcggttttggttgttgcagctgcactgtttccgcccggaagccccgatctgtaatatggggaaagcccctccgcaaaggaggggctttcgccttttgtccgtggtagttgctattgcgcggtgtctttgcgcgggataagggtcgtatcgacctggtggggcttgtcgcccacatccacgaggttctcctcttcgaccccgagcgaacggtaataggcgttgatctcgccgatgatttccttgcgaccggcatatacagccaggtagtagacgtcgcccagctggtcgagtttctcgtcgatgatcggcgacaccatgtcgccctgcacgccgtcgaaacgcaggtaatattcgatgtactcgatcagtgtcctggcgtattcgcgcagcagtgcgtcgcccttgtcggccgcatcctccacgcccatcgccgaagcggcgtagtacgcttcgaggaacggataggtgttggagtccgtaaagcgtatctgcgacgggggcagcttctcaagccccatgtcgagcagttcgacggcttcctgcgcgcgatcttgccgcagcagttcctttgccacgcgggcaaaggcatcgcgggcgtgcgaggcgctcaggttgtattggatgaagtaatcggcatataccctcgggtcggccagattcccgtagcggaatgtctccttgagcagcggcgccgcgtaatccgcgtcgatgcgcccgatttcccaggggttttgcacgggagtgaggatcggcacgaaacggtaggcgtagccgtcgaactggaggtaatccatcagtccgaaatcctgcaatatgtagacctgcgtcatgtagagcgggcgcttccagtcgaagttggccagcatgtcgaggatcatcagctgcgtcttgtcgatcgagttcttccgcaggttgatgtataccgtgtcgaccatctgggcgcggtctttttcggcgacgatgcccgaggcgatggcgttctccttgttcaccggcagtgcgatgcgtttggtcgggatgtagtcggtcatcgtcccgtccgagagcttgatcttgctgcgcgggtcttcgctgcgcacgaattcgatcacgtccttgatgtccaccgcgcggtcgaagcggttgtccaccggcacccagtcgttggtgaaggtatacttgctcttgggcagcgagaagggtacgcccggggcgtcgttggccttagttttcatctcgtcgatgtaccattcgccgcccaggtaggaggtgttcatgatacgcacgtcggggcgtacgccgtagatctcctggttgttccagagcgggaacgtgtcgttgtcgccgtagttgaggatgatcgagttgggcagcgtcgacatcaggtagttccagccgatatcgcgcgccatgtagcggtgcgaacggtcgtggtcgtcccagttctgcgccgcgaggatcgtcggcacgcccatgcagaccaccgtcgccgccacggcggccgtgacgttgttgcgcctggtgagccatgcgaccaggtcgcggatggccagtacgccgaacccgatccatatgcagaatgcgtagaatgaccccgcgtagacgtagtcgcgttcacgcggttcgcccggcgaagtgttgaaatagaaaaccagcgcgatacccgtcataatgaagagccacatgacgatcgagaaattccgctggtcgcggttgagctggtagatcagtccgatcagccccagcaggaacggcaggaaatagtaggtgttgcggcctttgttgtcggcgatctcgcgcggcaggccgtcctgcggcccgaggtatttctcgtcgatccacttgatgcccgacagccagttgccgtcggtgatcgtcacgcgggtgggctgtatgtcgctctggcgccctacgaaattccacaggaaatagcgccagtacatgtacgagagctggtagttgaagaaatagttgaggttctcgaggaacgtcggctcgacgatcgtgcgcggttcgtacccgtcgtcgtataccttcttggtgccgaagtcgagcacttcgccctgcatggggcgtccctgcgagtcgcggacgatttcgcccttttcgtcgcgcatgatctcggttttggtgcggtaggcggcccattgcttgtactccttctctcctttgcgcgcatcccacatgcgggggaagaagtggatgaattccggggcgtgggtatatcccgtgatgaccgatgcgggcttgtacttgccgtcctcgtcgaggtagtagaaatgcttttccttgtacccttcgggcggggccgagtagtaagcgccgaacagcagcggacggtcgccgtactggtcgcggttgagcaccgacatcagtgcgtgggggttgttggggttgttgctgttcatcggcgggttggcggcggcacggatcgtcaccgaagcgtaggacgagaacccgatgaggatcatggtcgtcgagagcaggacgatgttccacacgaccttgcctttgcggtgggtgtaccacgaagcccagcccaggccgccgatcagcgccagcgcgaagagcaccatgcccgagttgacgggcagccccagcgtgttgacgaacagcaggtcgatcatcgccccgacgtagaccgtgtaggggatgatgatgttgttgacgaagatcaggatggcgcccgcgatcagcgtggcgtagacgatgcccttgaaagtcaccttctccgtcttgcggaagtagtagatgaacaccagcgccgggatggtcagcaggttgaggatgtgcacgccgatcgacagtcccatcatgtaggcgatcagtacgatccagcgcgacgagtggggctggtcggcctcctcctcccatttgagcatcagccatacgaccagcgccgtgaacatcgacgagagggcgtagacctcaccctcgatggccgagaaccagaacgtatcggtgaaggtgtaggccagggcacccacgatgcctgcacccaggatggcccacacgtttgctcgggtgagctggctgccgtcgcgggtcacgaggcgccgcgccaggtgggtgatcgtccagaacaggaacaggatgcagaatgcgctggcgatggagttcatgccgttcaccgccatgcccacaaagtccgggttgccggcggcgaagagcgtcgccaggcgcgccagcatcatgaacagcggggcgccgggagggtgcccgacttcgagtttataggaggttgcaatgaattccgagcagtcccagaggctcgaaaccggttccatcgtcatcaggtataccagtgcggcgatggcaaagaccgcccagccgacgatgttgttccagcgtttgaaggatgtcatattttttcggtatgtttcgctttatgtcctgcaaaagtaatcatttaacggcgaaatccaatcaatattacctgccgaaggcggaaagttgctatttttaaggcttttcggagccgggccggatttccctgttctgccgtccggttgccgtagcgtctgctgacgccggtgcgggtttgtggcgtggccgttttcgaatggctggccgggacaaggtggtgggccgcgatgtgcaaaaatgtgaaatgccggagcgttgctccggcatttccagatggtggtgtggctggcgggcacgctgcccggtggttatttgcgccccggcctgaggatgccggacagccagctgcccatgccggattttttcttctccggcgcctgtgcttttcggggtgcctcggggcttaccgcttcccgtttgtcccgggcggatttctgacttccggattttcggtcatcctgtctccgtcccgtgtttgcggccgctgcgttttgcctgtccggtttttgcctgccccggttacggttgcggcggcgtgccgggcgtgccgcggcgtccttgtcctgcggctgttgcccgtccggggtctgcttgccgccggttcgttgcccttgcggtttcggatcgccgggagcctgtccctgcggcttgcgcctgcccggcctctgtccggcctgactttgtgcgggctgtttttgtgcggctcgcttttcctccgcttgcttctgccctccggtttgtgctgtatccggttttttcccggctggctttttccggctgttttgtgcgggagccagttccccggaatccgggtcgagttccagtccggtcagtttgaggatgtctttcagcagcgggcgttcctcctccgagcagaaggcgatggcctgtccgtcgcgcccggcgcgtcccgtgcggccgatgcggtggacataggtctcgggcacttccggcaggtcgtagttgattaccagcggcagttcgctgatgtcgattccccgcgcggcgatgtcggtggcgatcagcacccggcaggctcccgagcgaaagtcgttcatggcccgttcgcgggcgccctgcgacttgtctccgtggatggcgcgtccttcgatgcccgctttggtgaggatacgggcgatgcggtcggcgccgtgcttggtgcgcgaaaataccagcaccgagctctcggggcgttcgcgcagcagggaggccagcagcgtccgtttttcggccttttcggcgaacaggacgctctggcggatggtctcgaccaccgaggccgggggcgtcacggtgacgtgcgccgggttgcggagcatcgtattggccagttttacgatgtcgtcgggcatcgtcgccgagaagaagagcgtttgccgttcgcggggcagcagcgggaggattcgccggatgtcgtggatgaaacccatgtcgagcatccggtcggcttcgtcgaggacgaagaagcggatgtcggacagcgagacgtaaccctggccgatcaggtcgagcaggcgtcccggcgtggctaccagcaggtcgatgccgcgttgcagcgcatcgacctgcggccgctggttgacgccgccgaagatcacgcagtggcggatgtccgtgtagcgggcatagtcgcggcagcattcgtcgatctggatcgccagttcgcgcgtcggcgtgagcaccagcgccttgatcgtgcgccgccctttggtgcgcggctcggccgcgagcaattggaggatcggcagcgtgaaggccgccgtcttgcccgtcccggtctgggcgcagcccatcaggtctcggccttcgagtgcgggcgggatggcctgctgctggatcggagtgggggtcgtgtagcctttttcggccacggcacgcttgagtggttctatcaggttcagttcctggaatgtcattgcatatcggttttgtcccggcgtcgtgtgccggataattcggtgttgataatatacggagggaaaaacgggaagcgtcagaccaacgcgcactattattggcacaaaggtacgattaattccgcgattctggtgcatctcgattaaatttcttatttttgcacaataatttttcgcaatttatggaatcgaaactcgtactttacaatacgctcactcgccgcaaggaggtgttcgaaccgctgactcccggccgcgtgggcatgtatgtctgcggccccacggtctacggcgacccgcacctggggcacgcccggccggccgtgacgttcgacttgatgttccgctacctgaagtcctgcggctacaaggtgcgttacgtgcgtaacataacggatgtggggcacctggagcacgacgccgacgagggggaggacaagatcgccaagaaggcgcgcctcgagcagctggagccgatggaggtggcgcactactatacggagcgttaccatcgtgcgatggatgcgctcaacgtcgagaccccgtcgatcgaaccctatgcctcggggcatatcatcgagcagatcgagttcgtcaagaagatcctcgccgacggctttgcctacgagtcgaatggttcggtctatttcgacgtggagaagtacaatgccaaatataattacggacgtctgtcggggcgtaacctcgacgacatcatcgccaacacgcgcgagctggacgggcagggcgacaagcgccactcctatgacttcgccctgtggaagaaggcgtcgcccgagcatatcatgcgctggccttcgccgtggggagaggggttccccggctggcatatggagtgctcggcgatgagtacccgttacctgggcgaacgcttcgacatccacggaggcggcatggatctgatgttcccgcaccacgagtgcgagatcgcgcagtcgaccgccgcgctggggcacgattcggcacgttactgggtgcacaacaacatgatcacgatcaacggccagaagatgggcaagtcgctgggcaacttcatcactctcgaggagctcttcaccggcagccataaattgctggcgcaggcctattcgccgatgaccatccgcttcttcgtgttgcaggcgcagtaccgttcgacgctcgatttctcgaacgaggccctgcaggctgccgagaaggggctcgaccgtctgatgaagggcgtcgaatcgctcgggaaggtcaaacccgccgaaacgtcgacggtcgatcccgccgaactggaaaaccgctgccgcgcggcgatggacgatgacctgaactcgccgatggccatttcggcgctgttcgactgggtgcgcatcatcaaccagctggtcgacgggcagcaaagtatcacggccgccgacctcgaagagctgaaagccacggtttaccgctacacgttcgatatcctcggcctgcgcgacgagaaggccgcaggtgcggcttcggggcgcgattatgtgaccccgctggtcgagatgctgctcgacgagcgcctgaaagcccgtgccgcgaaggactgggcggcttccgaccgcatccgcgacgggctggccgcagccggtatccgtgtcaaagaccgcaaggacggcagcgactgggagctggaataaacgggacgagggaaagcccggatcccgggcggaactgtcgctgccgtgcgcggacggtcggggcgggcacccctgcgggtgtgccgctgtggcgggatggccttgtgcagtatgccgggcgtgtccccgctcccgttccggaggtgcctgcgtgccgtaatcaaggaatagttaggtagttcgtccggcttttgcccggacagagttgataatatatgatatgtctgcaacgataaaaggggcggcgacggagctcgggacggagcgtatccgcaagctgctcatgcaatatgccgtgccggcgatcatcgccatgacggcttcttcgctctacaacatggtcgacagtatcttcatcggccacggggtagggccgttggccatttcgggccttgcgctgaccttcccgctgatgaacctcgccgcggctttcggttcgctggtgggtgtgggtgctgcgacgctggtgtccatgcgcctcgggcagcgcgattacgggacggcgcagaacattctgggcaacgtcgtggtgctgaacctcatcatcggcctggcattcggtttcataacgctgctgctgctcgatccgatcctctactttttcggggcgagcgaggcgacgatcggttatgcccgcgactacatgtcgatcatcctcatggggaacgtcatcacgcacatgtatctgggcctgaactccgtgctgcgggcttcggggcatccgcgcaagtcgatgtacgctaccatctatacggtggtcatcaacgcggcgctcgacccgctgttcatctatggcttcgggtggggtatccgcggcgcggccatcgccacggtgctggcgcagattatcgcgctcatctggcagttccacatcctttcggacaagagcgaactgctccatttccggcgcggcatttaccgcctgcgccgcaagatcgtgcgcgacatcctggccatcggcatgtcgccgttcctgatgaacctggcggcgtgtttcatcgtcatcctgataaacaaggggctcaagcaatatggcggagacctgatgatcggggcctacggcatcgtcaaccgtctggcgttcttcttcgtgatgatcgtcatgggcatcaaccaggggatgcagcccattgcgggttataacttcggtgcgcggcagtacgaccgtgtgctgcgcgtgctgcggctgacggtcatcggcgccacgtgcgtcacgggcgccgggttcctgatgggcgaactggcgccccggctggcggtgtcggccttcacgaacgaccccgaactgatccggctggcggtcgagggaatgcgcatcgtcttcgtctgtttcccgatcatcgggttccagatggtggcgaccaatttcttcatgagcatcggcatggccggcaaggcgatcttcctgtcgctttcgcgccagctgttgttcctgatgccgggactgattttcctgccccatatcttcgacgtccatacccgttgggacggcagttggggcgtatggtgcgcgatgccgctgtccgacctgatggcgtcggtcgtagccttcttcatgctggtataccagttgcgaaaattccgggcgcagatggatgcggcccgttcaacgaacctccaataatgccgattatggaagataaattcgtcatcaacatcgggcgccaactcggtagcggcggcaaagccgtcggcgaagccatcgcacaacggctcgggatcggggtctacgacaagcagctcatcaacctggccgccgagcagagcggcctgtgtcccgaggtgttcgaacgggtcgacgaaaaagagtcgcgcaacctcttttcgacgctcgtcgcctatctgcgctcgccgttcgtcggaagcgaatatgccgggagcaacgtgctcagcaacgacgccctgttcaagatccagagcgacgtgatccgcgacatcgccgcgcgcgagtcgtgcgttttcgtcggccgctgtgccgactacatcctgcgcgaccatccgcgggcggtgaatgtctttgtcgcagccggccgtgccgaccgttgcgagcggctctgccgccagtgcggcattacgcccggggaggccgaggcccggatggatcgggaggatgcgcggcgcgcggcgtactacaactattacagcagcggtacgtggggcatggcttcgacctaccacctctgcgtcgattcgtccgtgctggggatcgacggcacggtggatttcgtgctggagttcgtggagcgcaaactgggtgtgaagcccggggcgatttaattgtcaataccgtaaatttatgatacttgcagatcagataaaggagttggagcagcgccgcgaggccctggaacgatgcctgggcatcgaccagaaacgcatcgacctgcgcaacgaggaggaaaagacccaggaacccgatttctgggacactcccgacaaggcgcgcgagcagttgcgcaaggtcgccgccatcaaggcatgggtcgacgactacgatgtcgtggccaaggatgtcgaagacctggggctgatgcccgatttcgtgaaggaaggggtcatgagcgaggcggagttggacgaccattacgcgcagacgctcgagcgtatcgagacgctcgaaatgcgcaacatgctgcgccgcgaagaggacaagctgggggcgatcatggacatcaacgccggggccgggggcaccgaggcgctcgattgggcgtcgatgcttctgcgcatgtacacccgctggggcgaggcgcacggctacaaggtcaaggtgctcgactaccaggccggcgacgaggtgggtgtgaaatcctgtacgctggagttcgagggggagtatgcctacgggtacctcaagagcgaaaacggcgtgcaccgcatggtgcgcctttcgcctttcaatgccaataacaagcgccagacgactttcgcctcggtgttcgtgtcgcctgccgtggacgatacgatcgaggttacggtcaatccgtcggacatcgagtgggacacgttccgttcgagcggcgccggggggcagaatgtcaacaaggtcgagacggccgtgcgcctgcgctaccacggcaaggacgccgatacgggcgagccggtggagttcctgatcgagaatatggaaacccgttcgcagctgatgaaccgcgagaatgccatgcgcatcctccgttcgaagctctaccagcgggaactggataaacgcatggccacgcagcaggcgctcgaggcttcgaagaagaagatcgagtggggatcgcagatccgctcctatgtctttgacgaccggcgtgtgaaagaccatcgcacgggcgtgcagacctcggctgtcgaggcggtgatggacggcgacctggatgccttcatcaaggcctacctgatggaatacggcgccgaggcgtagctcctccgcagccggttccgacaaccggttcgcgtacggccggtattccccgcaggccgatccgcattgtatcgggtgcccggttcttattgcccagcccacttctgccgtgccgccggcccttatgtcccgccgcacccgctgccgggcggaggcagggcaggctgtcggaggattccctgccggggggcgatatccggcgggcaggaagcccgggcgttataaattgttatctttgccgtatgaagaaatttgtcatctccctgttgtccgttatcttcctttgcgctgcggccacggcgcaggtattggtcggtatgaccgacacgacggcttatttcccgcagctggaagggcggcgcgtggcggtgctggccaaccatacggccgtcgcgcggttcggcgacggtgcgccgggagttgcggcggacgctgcggttcggttgccgggggcggcgtccgacgggacgatacacctggtcgacctgctgcacgggcggggtttcgacgtgaccggcattttctcccccgagcacgggttccgcggtacggccgacgcgggcgagcatgtcgccagttcggtggatgccgcgactgggatcccgatccgctcgctctacgacgggaatacgaagcgcccttcggacgaagccatgcggtcgttcgacgtattggtggtcgacatgcaggacgttggtctgcggttctatacctactatatcacgatgctccgcatgatggacgcttgtgccgaatccggccgcagcgtcatcgtgctcgaccgtcccaaccccaacgggcactacgtcgacggccccgtgctggacatgaaatacaaatcgggcgtcggggcgttgccgatccccgtgctgcatggcctgacgatgggcgaaatcgcccggatggccgtcggcgaaggctgggccgcaagctgcgacctgcaagtcgtgcgttgccgcaattatacgcacgacaccccgtacgaattgcccgtcgccccgtcgcccaacctgtcgacgcaacgggccgtctacctctatccttcggtgtgcctcttcgaaggtacggtcgtgagcctcgggcgcggtacggataaaccgttcgaggtttacggacatcccgacatgaccggctgcctgttttcgtttacgccccgtccgaccgcgggagccaaacatccgccgctcgaaggcaggctctgccacggcgtcgatttgagccggatgccgctcggcgaagcccgggcggagggcctgaccctgaaatatgtgatcgaagcctgccgcaacctgggactgggcgataagttttttacgccgatgttcgaaaagctcatcggcgtggggtatgtccgtgaaatgatccttgccggagcttcggaggccgaaatccgtgcccgctgggcggacgacgtgcggcgcttccggaagctgcgcgggcgttacctgctttacgaataatctgacaaccgccccggaatcatccggggcggttgtcagatgaaagtgggatggccggtgcttgatttggcgtggaaatagtgacgcctgcttcgttgcagccgccccgccggagcgccgcctgccctcccctttatgggaaaaagggtgcaggtactctttcccccgtaggtcttgcaatgcctgtccggaaaattcccccccccatgcccaagctcgccgcctgccttgcaacacggacatccatgtggcgagggcggaaaccggcagacaaaatatttcggtttctatgctttccggtctttgtgattattacggaatttcccgcgaaaagtttttcaggggcgttgggtcggccgaataaaagcgtcccaaaaggacgctttttcgttaaacgacctccgtaatccggtcgtcctcagtgacgggccggatgacccggcacgggttgccgaaggcgatgaccccggccggaatgtcgcgcgttacgacgctgccggcgccgatgaccgtaccgtcacctatcgttaccccctgcatgaccacgcagttgccgccgatccagacgttgtcgctgatggtgataggaagtgagcgcatgacgcccgcgttgcgctggtcggtcaacagggcgtgcgtcacggtgtagatgcccacgttggggccgatgaatacgtggtcgccgatggtcacgggcgcttcgtcgaggattgtgaggttgaaattccccgtaaagtcgtccccgattgaaatctgcgaaccgaaatcgcagtggaacgggctgtggatgcagaatgtgccgcccgtgcggccgaacagttgccggatgatcgcattgcgttcctcctcgcggctcgggggcaggctgttgaaccggaagaccagttcttcgcagcgttgcagtgcctccctgatttgcggcttgcgggcatggagccataggcccgctttcatttttgcgagatcgtccataatcttctattttgagctgaaatattcgtaggccgccctggatgccgaggcggcgatagccgcattcgcggcgtcgttttcttccgattcggtgacgaataccgcgatgcagtagcggcgtccgtcgggcaggagcacatagccggcatcgttgtccgcgatgcggatgccttcggccgtgcggtcggatgagccggtcttgtgtccgatcacgatttcggctggcagcccggccttcagtttgtttgcgcccgtggtcgttccgcacaacaaccgttgcaggagagcgttgtactcccctttgagcagcctgccctgcaggaacaggtcgaacagtgtacagacggacgaagggcgtgccttgttgacccgctggttcccgatgccgcggtgcatctcctcctcgctggcggcgatgcggatgccgccgatccccagcgaacggacgtaggcctctacggcttcggggccgcctgcttcccgcagcagaatgtcgcaggcgatgttgtcgctctccgacaccatgtagcggagcaactgcccgagcgtcagcgtgccgccgcctgcgggcagcgaatcgcgcatcgggctgtatgtgccgggtaggagcaggtcgggcgtgatgctgatcggctgcgtgagcggtatgccttcgcgctgcatgcggtcgagtacggccagtgccacgggaaatttaaaaacgctcatcatcggtaacagggtgtcgttgcgcgcaattgtttccccgccgggcgtgcggacggcgaccccgacgaaggctttgtgccccgataggatttcgtccagccgggattcgaattgtcgtgtcgccgtatcgcaagacgctgtgagaaccgacaggcataggagcaggagttttttcataagctggcagaggataaaaaagcacaccttttcggggtgtgctttttttcggatttttccgtgttgcttatccttcgatgatagcctcgctcgggcaaacgccggcgcaggtaccgcagtcgatgcacttatcgggatcgatgacatagatatcgccggccgagatcgcttcggtcgggcactcgccgatgcaggtgccgcaggcaacgcaggaatcagtgattttgtaagccatttttgttgaaatttattgttaaaagttgtgttgtgtcagcaaatatagaaacttatttgataatatcaaaacccgtataggggatcagcgcctcgggaatccggatgccgtcgggggtctggaaattctccagcagggcggccacgatacgcggcagcgccagcgacgagccgttgagcgtatgtgccagctgtgttttcttgtcggcatcacggtagcggagcttcaggcggttggcctggaacgactcgaagttggaaaccgacgagacctccagccagcgtttctgcgcctcggagtagacctcgaaatcgtaggtcagcgccgaggtgaacgacatgtcgccgccgcacaggcgcagaatgcggtagggcagccccagcgacctgacgatagactccacgtgggccaccatgccgtcgagcgcttcgtacgacgcttcgggcaggctcagctgcacgatttcgaccttgtcgaactggtgcaggcggttcagtccgcgcacgtccttgccgtacgagccggcttcgcgacggaagcagggggtataggcggtcatcttcaccgggaagtccttttcgtcgaggatcacgtcgcggtagatgttcgtcacaggcacttcggccgtcgggatcatgtagaaattgtcggccgtggcgtggtacatctgcccttccttgtcgggcagctggcccgtgccgaagcccgaggcttcgttgaccatgatcggcggttccacttcgaggtagccggcccgggtgttgcagtcgaggaaatagttgatcagcgcacgctgcagacgggctcccttgcctttgtagacggggaatcctgcgcccgtgagcttgacgcccaggtcgaagtcgatgatgtcgtatttgcgcgccagttcccagtggggcagcgggttttcaggtagttgggtgtagctttcgaccagttttacgacgaggttgtcctcggcggtcttgccttcgggcacgatgtcggccgggaaattgggcagcgagacgatcgctgcctgcaactcctcctgcacgttgtgcgattcggcctgcaggcggttggatttttccttgaggtcggcgacgaagcgcttgcgctcctcggcttcgtcgcggcgtccctgtcccatcagcgccccgatctctttggcggctttgttctgcgctgccagcgtattgtccagttcggtctggatggccttgcggcggtcgtccagcgtttcgatcctggcgatgaccggtgcggcgtccactcccttcttggcgagcttgcggatcgcggcctgcttgtcatcgcgaatttgctttatcgtaagcatggtatcctgtgtttttgtgtgtattcgtgtttacaaattgcaaaattataaaaaacacgccaacttgcactcctgtcgctccgttttttgcctgtttcataaaaaaacggagtttcaccgcgtgcgggagcccggatgacatttttccggggtcacaagtccgcatttgtcgcggattttgttaattttgcaaaaaataatgcgttgaaatccgtcgaactactcgctcccgccaaagattttcagtcggccgtcgccgccgtggactacggtgccgatgccgtgtatatcggcggggcgaagttcggagcccgttatgcggcaggtaatagcgccggcgagatcgcccgtgtggtggaatatgcccatcgctacggagtgcgggtgcatgccacgctcaacacgctgatctacgacgacgagctggaggccgccgggcggcaggcccgcgaactgatcgcggccggggtcgatgcgctgatcgtgcaggacatggcgctgcggcgcatgaacctgccggtcgagttgcatgcttcgacgcagatgtgcaatatgacacctgcccaggcgcgtttcctgggcgagtgtgggttcgcccgggtgatcctcgaacgggcgctttcgctcggcgaaatacgggacatctgcgctgcgaccgcggccgaggtggaatgtttcgtccacggggcgatctgtgttggttacagcggccgctgttttctctcgcggtcggtgtccgaccgcagcggcaaccgcggggcgtgcagccagccgtgccgcctgacttacgacctgaccgacggccggggacgtacctatattgccgggaaacacctgttgtcggtgcgcgacctgaacctttcggcgcatatcggcgagttgctcgacgcgggcgtcacttcgttcaaaatcgaagggcggctcaaggatgtcggttatataaagaacattgtggcctactaccgtcgcgaagtcgacgctgcgctggccgtaaggccgcatctgcggcgggcttcagccggggagagcatcccggatttcacgcccgatacggtcaagagcttcacgcgcggggagtcggaatatttcttcgcgggcaagcggccgggcgtggcgtcgttcgatacgccgaaggcggtgggcgagtatgtgggccgtgtggtgcgggttgaaaagaacaggttccgcctcgatcggggcggtttgctcgccgcgggcgacggcatctgtttcctcaccgaccgggggttcgcaggcaccaatgtcaacgccgccgacggcgactgtgtgacgcccaaccgcatggaaggtattgtgcccgggacggaggtctatcgcaattacgaccaccgtttcaaccagctcctcgcccgcagccgtacgcgccgcgtgatccccgcctcggtgctggtcgaagcgacggcagggggtgtcaggttcagttataccgactgtgagggggtgacggcttcggccgcacgcagcgtcgccctggaaagggctaaaaatgccgcggccaataccgcggcattgcggacgcaggcggtgaagggcggcgatacggtttttgccgtgcgcggggccgaagtgcggggcggcgactggttcgtcccggtgtcgctggccgcggagctgcgccgcgaggggctcgatgcattgtcgaaggcccggtcggagcgcggcatcggacaccggatattgcccgaaggcagggcggaatatcctgcggaatgcctttcggcggaggaaaatgtcaccaaccgcctcgctgaggcgttttaccgcgaccacggggtcgggcggatcgaacgggggctggatctcgcggcttcgacggcggggcgccgcgtgatgcgttcggcctactgcatccgccgcgagatcggcgagtgcctgaaggagcatccccgcctgcggggcgaactgtggctcgaacgcggcggttcgcgctatcggctggagttcgactgcgaccggtgcgagatgagcctggtggactgtaccaagacgaaattatgaaacctaaacgataactccatgatgaaaaaaacttttttgatccttgcggcagcgctttcgggcgtgttggctgccggcgcccagaccgggcgtgaatggcaggatcctgccgtcaatgaaatcaaccgcctgccgatgcgctcgtcgttcgccgcgggcgagcgcctgtcgctcgacggcgtatggaaattccactgggtacgcaacgcttcggagcgtccgtccggcatcggggccgtcgactacgacgatgcggcgtggggcagcatgcccgtgccggggatgtgggagctgaacggttacggcgaccccgtctatgtgaatatcggctatgcctggcgcggcaatttcaggaacgatccgccctatgtgcccgatgccgagaaccatgtgggttcctaccggcgcacgttcgacattccggcatcgtggggcggcaaggacatccatctttcgatcggttccgctacgtcgaacgtctatgtctgggtcaacggacgtttcgtcggttacagcgaggacagcaagctggccgcgcagttcgacatcacgaagttcgtgaagccgggcgaaaacctcatcgccctgcagatgttccgctggtcggacggcacctacctcgaagaccaggacttctggcgcttcgcgggcattgcccgcggcgtggagctgaccgcccgcgacaaggcgcacctcgaggacgtgcgcatcacgcccgtgctggattcggagtataaggacgccacgctgcgcgtcgaggtggaaaccacgccccgcgtgaagtcggtcggcctgacgctgcgcgatgcggcgggcggtgtcgtggcggaacatcgattgcagcctgccggcggcaagggcgggtatgtcttcgaggtcgccgacccggccaaatggtcggccgagaccccgaacctctatacgttggagatcgccgtgtcggacggcaaggccgtgaccgagaccgtgacgcagcccgtgggttttcgctccgtggagatcaggaacgcacaactgctcgtgaacgggcagcccgtgctgatcaagggcgccgaccgccacgagatggatcccgtcggcggttatgtggtgagccgcgaccggatgatcgaggacatccgcatcatgaaagagatgaacatcaacgccgtacgtacgagccactatcccaacgacccgcagtggtacgagctgtgcgaccgctacggcatctatgtcgtggacgaggccaacgtcgagtcgcacggcatgggctacgacgaaaacacgctggccaaagtgccggcttatgcgcaggcgcacatggaacgcaaccggcgcatggtgctgcgcgacaagaaccatccttcggtcatcatctggtcgatgggcaacgaggcgggcatgggccccaacttcgaggcatgctaccgttggatcaaggagtacgacccttcgcgtccggtgcattacgaacgtgccgtgtacgaccgagacggggccttcaccgatattatctgccccatgtactggggctatgaacaatgcgagaaatatgctcgcaacaacccctccaaaccgctcattcagtgtgaatatgcccatgccatggggaattctctgggcggcctcgaccactattgggaactggtacgcaaatacccctcctaccagggcggtttcatctgggacttcgtcgaccagggacttgcccgctacgagcccgacggtcgcgtgtcgttcctctacggcggtgatttcaacgactatgatgcgacggacaactcgttcaactgcaacggtatcattgcccccgaccgcacgtggcacccccatgcctacgaggtgcagcgccagtaccagagcatctggactacgcccgtcgaccttgcgcagggcagggtcgaggtttataacgaaaatttcttcatcgggctggatgcctacgaaatggagtggcagctgcttgccgacggccgtgtggtgaaggccggccgcatcggcgacctcgatgtcgccccgcagcagcgccgtgcatatgagctgggattcactgcagccgatttctgcccgcaggcgaaggaaatcctggtgaacgtggcctataaactcaaagagaagcagccgctgctcgacatcggccatacggtggccaaacagcagttcgtcgtacgcgagtacgactgtaaggccggtttcggccttgcggcctcggcgcgtcccgtagaggtgacccgctgggaacgcggtgcgcgtgtcgaaggggatacgtggcaggtgttcttctcgcgcgacgggttcctggcggcatacacggtcgacggccgtgagctgatggccgagggcgccgaactgcgcccgcagttctggcgtgccccgaccgagaacgacctcggggcgaggctgcaccagcgtcaggccgtatggaagaaccccgaactgcggcttacgaagttcgacgctgcggtcgaggacggggtggccgtcgtggagaccctctatgaactgcccgccgtgaaagctacgctggcgctgacctaccgcatcaacggtgcgggcgaaatggaggtctccgagcggatgaccgccgacaagacggccgaggtgcccaacctgttccgcttcggtatgacgctcacgatgccggcgcgttacgaccgtgtggtttattacggccgcggtgcgcacgagaactatgccgaccgcctttcgtcggccgacctggggctttacgagcagcgtgtcgctgaccagtaccacgatgaatacgtgcgtccgcaggagtccggcaccaagggcggcctgcgctggtggacggtggccgacagcgcaggtacggggctgacgatccttgccgatgcgccgttctcggcctcggcgctgccatacgccacggcagacctcgatgtatcgaatttcccgccgcagcagcattccgggacgctcgtggcacgcgatgccacgttcgtgaacttcgacctgcggcaatcgggcctgggctgtatccacagctggggcgcattgcccgaagagcagttccgggtgccctacggcgattatacgttccgcttcatgctgaagccgacggtaaagtaaccataagcatgcaaggacagttgacaccctcgttcggggattacgaactgatcgacacgggggatttcgagaagctcgaacgcttcgggcagtacgtcgcccgccgtcccgaaccgcaggccatctggcggcgctcgctccccgagggggagtggcgccgcatggccgacgcggccttcctgcgcgatgtgcgcagcgacgaacgcggcgagtggcgcctgcgccccggcatgcccccgcgctggacggtggcctacgaatacaaggatatggcactccgtatgcgcttggggctcacctcgttcaagcatgtcggcattttccccgaacaggccgccaactggaatttcatctacgataattgccgggcgctggcttcgggcaggacgtttcctgcggatatttccggcgcggctgcggccgggagttccctgccggcacacgatgttgccgtgccgtcaggcgccggatcgggccgggacgggcactctgccaccggcccgggggggcgcgtcacgccgcgcgtgctgaacctctttgcctatacgggcggggcgagtctcgcggcatgcgccgcaggggcggatacgacgcatgtcgattcggtgaagcaggtggtcacctgggcgcgcgagaacatggagctgagcgggttggacggcatccggtggatcgtcgaggatgcgctgaaattcgtgcagcgcgaagtccgccgcggcaaccgttaccacggcatcatcctcgatcccccggcctacgggcggggtgccaacggcgagaaatggattctcgaggacaacatctgcgagatgctcgagtgctgtgcccggttgctggagccgcagggagcgttcctcgtgctgaacctctactcgatggggctttcgtccacgctggcccgtacggccgtgcggcaggcgttcggtgcaccgcgtacggagcagtacggcgaactatgttttaccgaccgggcgggcaagcagctgccgctcggtacgtactaccgttttacacgttaaaaacttggaaccatgagtattctgatcgtattgttcggcctgctgagcggctgcctgttgtccgtcctggtgggcatcatcggcagcagccggcgcatcggcttcgggctggcattcctcgtgagcctgatcttcacgccgctcgtggggcttatcatcaccctgctgaccgacccgttgccgtacggcggccagcgctggggctgcgtcggcacgttcgtggccatcctcggcctgttgttcctctgcgccttcctgatcctgttactggccggaggcgccgtcgtcgccatgttctgatttcccgtaacgcccctccagcaggaggatcatgttttcgagtttctcctcgtgctctccgaaaaaccagtcgtcgaaggccctggggatcaccccgatccagtttcgtaccgttttgtcggcgagcgttttctcgaatccttcgcggtaggatgaattccaatggagattctccatttgggagggtagcatggcctgcatgcgctggtcgtaatacagctccatgtagtcgtcgaacgccgcgagttccttatagcagtgcagcaggtcgatgagggtctgcttgtcggcgatatgcgaggcgatgcccgtcgtcttgagcatttccaacgcatcgctcgacaggcggtagggcttgcccatgccgccggtaatgtagcgcgaataggtttcgaccgtgtcggacgggaatcctgcgagcgaaaaatccgcttccagcaggcgccgtgccacccatttgtctttgctgtaagtgtacttgtaatcccggacgacctgcaggttgtcgtgcagttcggatgcgacgagttgcatggcctgccgtacctcccgctgtttggccgcttcggtgatccgggcggtcagccacagggtcagcagtacgccgcccgtgacgatcgagaactggcgcgcgtagtcgccgattttccactttttaattcgtttcttgaggggtttcttcatggctgcgagggtgtttcccttccgggatgctcagaatatgtagtatatcaggatgcccgccgcggccgagaggcagatcagcaggatggggttcacttttttgaccgaggcgacgaagacgccgccgaacagcgcccagctccagccgtcgatgaagttctgttcgtcgggcgctttgctgtgcgggaacatcagcagcagtgcggccgaggcgatcatgccgatcaccacgggccgcatccccttcatggcgccttcgacgatggggttttgcttcaggcggaggaagaagcgcgtgatgagcagcatcagcgtgagcgacggcaggcatacggcaaacgtcgccagcgccgcccccaggatgccgcaccacgcgttgccagcctgcgccccgaccgtatagccgacataggtggccgagttgatggcgatgggcccgggggtgatctgcgagatggctacgatgtcagcgaattcggcgttggtcatccaggcgtgctgcacgaccacttcgttctggatgagcgagagcatggcgtagccgcctccgaagccgaagaaccctattttcaggtagcttacgaacagttgccagaagatcatttgcctgcttttttagcgatgaataatgtccatgcgataccgatggccgccgctgcgatcaggatatagatcggcgaccagcccaggtaccatacggccagcgccgacgcggcgatcaccgtgaacatggcccagtgcatcccccgcgccagcgagatcaccggcacgacgatcagtgccaccacggccgggcgcatgcccttgaatgcggcgtccacgatagggttgtggcggatgtcggcaaacaggagcgcgatcgcgaggatgatgacgaacgacggcaggacgctgcccagcaatgccgccacggcgcctttcagcccccgcatcttgtagcctacgaacaccgaggtgttgatggcgatggggcccgggacggattgtgcgagggtcagcaggtcgaggaactccttgtgctcgatccagccgcgcttggcgatcagctcctgctcgatgagcggcagcatggcgtatcccccgccgaaggtgaaaagcccgatcttgaagaaggaggcgaaaatggtacgaagtcgttgcatgttttccgtgttctttacttaatccggcgtgtgcggcggccctgtcgcagggacggggttccgggggcggctatgctccccgccgttttattgtccggcgttggccaccgacgccatgaccgtggcgacgacggctgcggtttcggtgcgcaggcgctgcgtgccgagggtgatctcctcgaatccgttggcacgcgcgaaagcgatctctgcgtctgagaaatcgccttcggggccgatgaagaccagcgccgactcgcctttgcggagcgtcgcgggcaggtaggctttgcctgcgggcgacagcgccggggcacagtgggcgatgaatttccgcccctcgaacggcctggctgcggcctcgcggaacggcgtaagcgggtgcagctccgggcggtaggccttgagcgactgtttcatcgccgccgtgatgaccttccccgcgcgttcgggtttgaagacgcggcgttcgctgtgttccgtttcgagcgggacgatggcgctgacccctacctcggtggccttttcgaggaaccattcgaagcggtcggcgtttttggtcggcgccacggccatcaccagccggtaggggagcggttcccactgcgcctgtgtcgtggtgacgcgaaccgtacatcgtttcgggttgtcgtcggtgatctggcaacaaaataaattgcctcttccgtcagttatatggagggtatcgccgcgccccagacgcagcacgcggacacaatgtttcgactcctcttcgctcagcgtatagaggggcggcgtgatgtcgggggcgtaaaaaagttgcatacctgttataaattactaactttgcatcactatgcggacgcatcgaaggtgcttccgccgtcggcgattgcaaagttacacaaaataacacgatagatgaaacgtattgcaggattattcaccacacttttactgcttatgacacttgcgtcatgcgattcccggaaaacagccggggaaaacccgtttttcacccaatgggatacgccgcacggcgtgccgccgttcgacaagatcctgcccgagcatttcatgcccgccttcgaacgcggcatgtcgttgcacgaggccgaaatcgacgccatcacctcgaacaaggacgaggccacgttcgaaaatacgatccttgcctatgacaatgctgggcagatgctcgcgcaggccgaactggtgttcggcatgctgtgtgccgccgagaccaacgaccgcatgcaggccctccaggaacaggcgatgcccctgctggccgcgcacagggacaagatacgtctcgacgacaagctctttgcccgcgtgaaggaggtttacgaccggcgtgcggcgctggggctcgacaccgagcagatgcgtctgttgcagaagacctatgactccttcgtgcgcgccggggcgttgctcggccccgagcagaaggcccgcctgaaagagatcaacgggcagctgtcgctcacggccgtgaaattcgggaacaacatcctcgccgaaaacaacaatttcgtgctcgaactcaagtcggacgaactcgacgggctgccggcaggcatccgcgacgccgcccgcgagaaggccaggcagatgggcaagggcgacaagtgggtcttcacgctccacaagcccagcctgatcccgctgctgacctattccaccaggcgcgacctgcgcgagaagatctataaggcttatctgaaccgttgcaataacggcgacgaatacgacaacaagcagctcatcaacgatttcatccgcctgcgtacggagaaggctcacctgctgggctatccttcctacgccgcctatgtcgtggcggacgagatggccgggacgaccgatgccgtttacggcctgctcgaccagatctgggagccggcgctcgagcgcgccaagggcgagctgtccgagatggacacgctcttgcagaaggacatccccggtgccaccttcgaatcgtgggactggtggtattacgctgagaagctgcgcaagcagaactatgccctcgacgaggagatgctgcgtccctacttctcgctcgagaacgtgcagggcggcatcttctacctggccaaccgcctctacggcatcaccttccagccggtcgtcgtgccgttataccatcccgatgcagtcgcctatcaggtgctcgacgccgacggctcgcacctgggcgtgctctatttcgactatttcccccgcgacggcaagagccagggcgcctggtgcggcaactatgtcgagcagacctataaggacggcaagcgcgtggctcccgtggtgagcgtcgtctgcaacttcacgcgcccggtgggcaatacgcccgcgctgctgacgctcgacgagacggaaacgctcttccacgaattcggccatgcgctccatttcctgttccacgacgtgaaataccgcggcctttcggaggtcgaaggcgatttcgtcgaactgccttcgcaggtcatggagaactgggcgttcgaacccgagatgctgaaacattatgccgtgcattaccgcacgggcgaagtgatcccgaaatacctggtcgacaaactccgcaagagcgaactcttcaaccagggtttcgccaccacggaactgatcgccgcgtcgctttccgacatggatatccactcggtcaccgaatacgaaccgttcgacccgatggcattcgagcggcaggcgctcaacgagaaacgcggcctgatcccgcagatcgagccccgttaccgttacccctatttcagccatatcttcgacggcggctactcggcaggctactatttctatacctgggccgaggtgctcgacaaggatacgttcgaagccttccgcgagagcggcgacctgttcaacaagaagatcgccgccgatttccgcgccaagctgctttcgcgcggcggttcggaggacggcatgtcgctctaccgggcattccgcggcgccgaccccgacaagcgggcgatgttgcgcagccgcggactctgggacgaacccgagccggaacccgccgacgaaggcgaagcgctccttcagccggaaatacggcaggaatagcccccatccttaaaattaacccaatatttgcaataacatgaaaaaagcatttatcatcatgaccttttccgcgatggcggccgggtgtgccgacaattcgatccccaaggcgcagctgcccgaattagatacttcgaaccccttgcttgccgagtgggatacgccccaccagaccccgccgttctccgagatcgaactctcggactacgagcctgcgttcgacgcggccatcgcctgctcgcgtgccgagatcgacgcgatcgtcggcaacccctcgaagccgaccttcggcaataccatcgtggccctggagcgccacggtgcgctgctggatcgtatttcgggtattttcttcaacctgctcgaagcggacacgtccgacgaaatgcaggagatcgcactgcgcgtgcagcccaagctgaccgaactgtcgaacgacatctcgctcaaccccgagctcttcgcccgcgtgaaggccgtctacgggaaacccggccgcggcctctcgaaagaggacaagaagctgctcgaggatacctatcagagtttcgcacgcaacggggccgccctgtccgacgcggacaaggagctctaccgcaagtattcgtccgagttgtcggccgcgacgctccaattcggccagaacgccctggctgcgaccaatgccttctcgatcaacatcaccgacccgaaggtcgtggccgaactgccggacttcgtgaaggagggcatggcagccgatgccaaggcgcgcggtgaaaagggctggacggtgacgttgcaggcaccgagctatgtgcctttcctgacctattcgtcgaaccgtgcgctcaaggagaaactctggcgtgcctacaattcgcgcgcattgggcggcgagaacgacaatacgccggtcgtcaaacagattgccaacctgcgcctgaagatcgccaacctgctgggctataaatgctatgccgactacgtgctcgaacgccgcatggccgagaacaccccgacggtcatggccttcctcgacgagctgctctcccagaccaaggcctatgccgaccaggactataagaccgtcgccgactatgccgcttcgctcgggttcaaaggccagctcatgccgtgggactggggctattacaacgagaagtacaagcacgagaaatatgcgctcaacgacgagctggtgaaaccttatttcaaacttgaaaacgtccgcaagggcgtcttcatgctcgccaacaagctctacgggctgaatttcacgcccaacgacaagatcgaggtgtaccatcccgacgtgacggcctacgacgtgaccgacgagaacggccgtttcatggcggtactctacttggacttctttccccgcgaatcgaagcgttccggggcatggatgaccgagttccggggcacgaagatcgtcgacggcaaggagacccgtccgctggtgtcgctggtgatgaacttcaccaagcctaccgaaacggccccttcgctgctgaccttcgacgaggtggaaaccttcctccacgagttcggccactcgctccacggtatgctgggcgagggcaagtacgagtcgcagaccggaacgagcgtttaccgtgacttcgtggagctgccttcgcagatcatggagaactgggctaccgagaaggagttcctcgacctgtgggccgtgcattaccagacgggcgagccgatcccggccgaggtcgtcgaccgcatcgtcgctgcacagaactatttggcggcctattccaacgtgcgccagctttcgttcggcctgaccgatatggcatggcatacgatcaccgagcctttcgagggcgacgtcgagcagttcgaggtcgcatcgatggccccgacgcaggtgctgcccgtagttcccggaacggcgatggccccggcattcggacatatcttctcgggcggctatgccgcggggtattacggctacaagtgggccgaagtgctggaggcggacgccttctcgctcttcaaggaaaagggcatcttcaaccgcgaggtctccggctcgttccgtgagaatatcctttcgaagggcggtaccgagcatccgatggaactctacgtgcgcttccgcggccacaaacccgaaaccagggcgctgatcgagaaaatggggctcggcaaataaccgcattcccatacccgataaaaaagggaacctcccaacagggatgactgtttttgagataccgttctgtaaatcagaacggtatttttatcgaaaagaggaagggttacgaattggtgacggaagtcttacattctgttgcacccttatacaataaatccaagaactcacgacaaaggtagttaaaatattctacataagcaaattaacgaataaaaaagcattaaatactatttaagcatatccaactcggatatgcttttttgtgctatgagcgagtcgattatttagttgcctgttttaactaaattattgctatcgggatgtttcctatcattgcatcgtctaaccaacgatcattgcaatgaaaccattgaaaggtaacccgactctgcgtttattacgtctggtattgcgacgattcaatcgtctcgaactactgatccaaaacaattctcgacctttacccgatgacctgatcgacactccggctgtccgcatgcttacccggatgtccgaccgtaccctctcccgtcgtcggagcgacggcacgatcccttatgtcaagcacggcggcaaaatctattacagcagatcgcgcgttctcgaagccctccggaatgaaccccacaccacatcaactaataaagtaaagaagtcatgaaaaagatgattcttatcgagcgaagcaaattcgctctgctcgttcgcagccacatgaaagcctcgaacatgctcctcgtattgcagcatgtctgccgggagcgccgtatttctctttcgatgacgcaggaggaagtctgccagctcatccgactcgatccggatttcgtcgagaaatacaaacgtcgcggaaaactctgccccgtcgaggatcaggatggcaagcaatattataatgtactggatttcatcaatctgaaagacatgcaggagagtaagcgtattttctatcagacgatggaacaagcggtgccggatacggcgattacgattgatcgggaataacctctcaaattcaacgaggctgcctaacaaatgttagacagcctcgcttttttatattttcggccctttggccttcacgttcgtcgcgggtcgcacgagaagaatatgattgcggataaagtccgattcgggcggaggcacgacgtgctcccgttcttccggcggttcttcttggttcccggatgccgcagaaaggggctctgccttcgacggtctggcggtctcgtcctcaatctccgcgttttcgatcttcggctcattgcggttatctgctgttttcgcctgcatctcctgctgcttctgtgcgatgtcgagttgaatcttccgggtcagcgactctgcctcggccttgagccgcttcaactcctcctctttgggccatacggctgcgatctgttgctcgaaggtcggaatgtcgcgggtgaattgctttttctctttctcgtaggtcgccatcagtgacggtatcgtgtcgagcgcccggatgaagttcgtcgctgcgattttcggctccgcagccagatgcccgttgttgaacgtgtacttgatgccgtccaacccttcgaccatgaatttattgactgtaagcgccagcccgtctttctgcatccgctcggtgcggacgagaatgcggaaatcgaacagcgtgccgattttctggtaatcgtcgccggtatttaccgtgcggtcgatctccacgaggcgtttgccgtgagcgacaatatccgcggattccacgccgtcgatccgcaggggattggcccgcttgcctttggcgtccggcggcgccacctcgttgatatagtcccagtcgcgtttcagacgttcgagcatcgtatcccgtcgtccgatctccgccgtgtagcgttgcagttggctctgcgcctcatgccgggtgcgcatgaagatcgtctgctcgctctccagcgccgcgatccggccttcgagcttggctttttgcagcaggtcggtatttcccgacaccacggccatccactccgcgaagttcatccccgaatcctcgctgatggccccctcgtccagccgccgcgcacctaaccggttgcgcttgagctggtcgatgaactgctgcttgttgtgcagcagattcaacttataggcatcgagcgtgcgcagaacggcatagacataggctttgaccttattgccggcatactccttggcgactatgttgcctttccgtgcgccgcggccgttgcgctgttccagatccatcggccgccacggaatgtcgaggtggtgcatgcagacgattcgttgctgggcattgactcccgttccgagtttctgcgtcgagccgaagagcacccggattttcccttcgttcatggcgtcgaacatcgcctgccgcaccttgtcgctcgcggcttcctgtacgaagcggatctcctgcgccggaataccgtggtcttcgaccagtttgcgtttgatctccgaatagacgttccagatgccgggcttataggtcgagaggtcgcaaaagaccatctgcgtgcctttctgatctttgtatcgccggtagtattcagcgatgttggcggcactgcggctggccttgttgcccggtgaatccgcatacgcaggacttatcagccgcatgtcgagcgagagcttgttggagtacatcgtcaccaacagcatcagggctttgacctccccgtcgctcaggtcggcgcgtccgatatgttcgggatctcccgtcttggcgaagagcaccagcttgtccaaaaatgcctgctgatcgtcggtcataggtatctggcatagctcctcgtccagctcgggacggtcgattcccacgtctgcggctgtgcggtagtcggtaatctcgttgtagaacatggccagctccggaaccttgatgaaatagcggaaacgctctttggagatcacttcgttggtcaccgaaaactcgaactccgatgttttctgcgcgaataccgcggcccacgcatcgaagcagggaatgtcctgccgctccagctctttgggacgcagatacttgaacagcagatacagctccgtcagggagttggcaatggtcgttcccgaaaggaacgtcgcgccgagatcgcgccccgtgcgctgctgaatggtgcggatggcgtacagcaaattcatggccttcttactgccgtcggtatttcccagtcccgacacacggctgtggcgggtgttgaacatcagattcttgaagttgtgcgattcatcgacgaacagatggtctattcccatctgctgaaaatccaccgtatcgtccttttgcgcgtcgattgtctcctgcaactcgtggagcttggcatccagattctccttgcgtttctccagaccgcgcagaatccagccgtccacatgtccgccctgcttttcgtaggacgccagattttcatctatgtcgtccatctcctgccggagaatccgttgctgcacctcagccgactggggtatcttgccgaattgttcgtgcgtaaggatgatgcagtcccagttgttgttcttgatgtcgctgaagatccgcaggcggttctccggcgtgaagtcctccttgccgggatagagcagacgggcattgggataggccgtgcggaaggttcgggcgatctcgtggatgttggctttgataccgatgatcatcggcttgcgggccagtcccagacggtgcatctcatacgctgcgacgcacatgatgagcgtcttgcccgtaccgacctcgtggtcgcagataccgccgccgttctgcttgatcatccagatcgcatccttctggctgggatacaggtcttcgatacccagcccccgcaggtcgagccccggaaactgctggtggctgccgtcgtagcgtggacggacatagcagttgaatttgcggttgtagagatcggtcagccgctccttgaaatcgtcgggctgcgcatgcagccattcgacgaacgcctgccggatttcggtgatgagcgtgtcggccttctgccgggcctcgaagtcgggaatccggatggtcttgccgtgttcgtccttgccgccgtccttgttgatgttgggcagcgtgttgagcatggcatgatgcagcagatccataccgtcgtagacctcgaagtctcctttgacgacgtatttctgggagatcagagggctgtacccgtggttctcgatgccgaaggcatccatcttcgccgaatagcttaccgatacgggaacctgaaagaaatgctcgcagaagccttcgtaaatatcggtcggtatccatcgctcgccgaggttgaaatccagctcctcgaactcaatgcgtttgggtgcggcctcacgaagcagcgcgagcgaacggcggctggcatcgtcgtcggggttttccttgaggtaattttcgattcattcggctttggcgacgacattccctgccgcgagccgttcgcggatttcataccccttgaccatcggattgtagaaaatgcgatcgcccagctcgtcgatcagctcttgccgggaacgcgatgcgagcgactccatataggaaaactccacccgtccgaacttgttgagcgaggcggccagcgcttcggccgccgtatcgacgtgtttgatctcgttagggtcgaacgatacggggcgtcggaggatgtcggagagctgttttcggccttctacgaagcgttcgagccccagcacctcccgcccgccgggatcgttcaggatgaaggcggcattctccttcttgttcagatcgcccaacagagccgtgaagttctcgtaacatccgttgagtttgcgccgcaggcccttgtattcgatctcgttctgcatttcgagccggtagagcagctggtaggtatcccgcagcgggatatagcgttcggcccggtatcgggacaaggttcccagctcttcgggatggaacgtgcagccctgtcgtgtcaggccgcccagacgcccgacctgcccttcgaacagaaccaacgaccgctctttgtagtgcggaagcatcgtgccggtaaagggccgcggatctttattctccgaagccggtgcagcgattgctgccggggcatccgcagcctccgctgcctccgccggttgtgcgaacagattcccctgcgtgaagagatcggacatgccggtcgtatccgttctgcgcccggcccgccgctgtcccagcggacggcgggcgatcggaacggcggcagcgctgccgaaaagcgatgcggccggagccggtacttccggagtcggtgcaacggatgccagctccggtggcgccacggattgcggagccgcgacccgattttgcctccgggcggtcggcggaacggtttgcgcctgcgggatatggagcggacggagatattgtgtatatcgttcggtgtcgaggcgggctgcgaaatcatttgcgaggattccgcgcagccgctcggcgatccgttccgggcctccgtcgtagtgcagtacgagagcggattgtccatagagacttttttcatgcgaaaacgtcgtatggatcgcgtgcttgaaatcccggtggtagtcgttcaggtaaattccgttgccgatctcggacgaactgacgaagcgttgctcgtcgggggtaagctcccgcttttcgctccatttctgaaggacgatgagatcgctggccacttccgtgccggcatactccgtaaagaggttgttcggcagccgcacggccgaaaccagccgcgcatgctccatcagatagcggcggacgggttcgttgccgggagcgtccatgacgcccgctgaggtgacgaacgccagaataccgccttcgcggagcgtatccagacccctgatgaagaaatagttgtgaacggccttgagcgcttgccgtcgaaccgggtcgttgctcttccgaaaggcagtgtcgaaaatccgggtatctccgaagggaatattggacgttactacgtcgaaataatcgtcataggtcgcttcgatggtttggaaaccgtcgatgacgacctgctctcgttcccgggcctgtgcggagagcacttgtccggttagcaggtctttctcgaaagagaggatttcgacttcgctgtcggcggccttccggaacgacgaagggaaaatcccggccccggcgctggggtcgagcaatcgccggggaacgatgccggcaccccggagcgtctcggcgagcgcacgcacgatggccggcggtgtgtagaatgccgtcagcgtagaattgcgcatgctctgcacgaagtctttataccgctgttcactgtcggcataatggcgcagcagttcgtgcagttccctcacctgcgggaagagttcccggtctatctttcattgcgcgagatcgtcgtccgcagcggccggctgcaagacgcatttcaacgctccgaagccgctgtacgcagccagggcatctcgctgctgcgggctaagtaccgtcgatggagcgaaagcgatgcgcagggcggcgatgttcgcctccagatgtttccttttattgtatgccatgcagttcgatgtgggtttggatgagtccggtgagttctaaaaggagatttttataggacgggctgctttcgaagtcgtcggtcaggtcgtacatctcgaacgcctcttcgcagacgggaagcagtttcaggcagaaagcggtgcgctgccgggctgcgacctccgggaaccattccgacacgacctcgaagatcgcatcgtatttcgaaaaacgcaggtcttggtacagaacggcgttcgagagttccagggcctcgtaaacgctgttgccgttgcgaacggcacgttcataggtttgggccgcatggtcgctccgctcggcgataaagtgtttgtcggagagcagttcgggatggctttcgcgcaaataagcggtaagagttgccgcgaaatacggcaactctttctcttctacgtgtcgtttcataacggctaaccgattttcatgcctttgggttgtgcgccgggaagcgacggaagacgccggcggacgcgctggcgcggacgcgggttctcctcgcctagacgcgaacggtaattgcgggcgttgttgccgaacaggggccggcccgtgtcgctgtaacgaaggtcggtgctgatcgtcctgccgccgactttcatgccggggatgaagacgacctcgtggttggccagtttcgcctggatgtctgcacttaccttgactccgaaaaccgtatcgtggatgcgcagatgcggattattgtcgttgcggaacaccacgtctccgcggttggcgtccacgcgggcatggcccgagatgacccggccgtccttgaggtggatgtcttcgacgaagatctccttgccggagcgcagtgccttgatgtcgtcgccgatctctttgccgtagattcgggtggggagcgtcagcgcatcgaccggaagcgtcgtcaggcggttcgtagcctcatggacgctgacataacactcgcactcgcggcccgaggtaaaatcttttattttcttgatggaacccagatgtccgtcggtttcgaggcgctcgatttccttgtccgtgaagagctccttatacggcgatattttgtactgcggctcgtccagacgtgtaaagatacggagttggacattgcccgcatcgtcgcggatcggcgaaatcgtgccgagtcccagatcgacccagcggccgtccatcttatgtttgagcggcaccagcttgttgggaatacgtcccttgaggatgtcgcccatgctttgattctccagcaggatttctttgttcagacccaacgcctgaatctgatcccacggaagttcccgctcctcgaacttataacggtcagcgaacttggcgatacgcccctcgttgttgagttcgtagtcggagatctctttggccaaagagccgtcctgatctttgccttcgcggacttggatgatggagtcgagggctcggtcgagtttttcggtaccgatccgaaagaaacttcagcccaggtcggacgggcgtccgtattggttgcgaaggttctcgaaaaaagtgcccaaaaccgttcggctgtcgaacgaaagggctctgcgccggtcacccggagcagtgctcacggtgttgaactctcccgtctgctcgttcatctcgctgaccagacgcagatcgttcgtctttttgtcgaggacggccagcacgtccttcgatagcttttcctgttctcttgccataatgccaatattaaatgagtaaattgaatggtgaaaattcggcggcaagataaagccttttccagttcataataccaaatgcgcctcttctggcgggaagaggcgcgggttggcaaattttgtctatacttttagaccatctgacaaatgaagaatagcaggttctttgaattgtttatcaatatagattttgttttgtctttgttttcgtttaatacgattatatatattaggagataacattgcttttaatctcatgtgatcaatatctttataaacaattctatcccatcttgtatttagctttttgtcaataaaatattggagaaacattccatcattggtaatatctgaaagatgataacttaaacaatataaagttacgtctgaatatccaaatgtagatttcagtaatatattcattccaacagatgaaaatatttcttgattaatatgctttgattgaaatatctggcaaaaaatattccgagcttgtagaatcatgtctaaagttgatagacttcttaataatccagcattagcaggattttctattgcaggtaatatagtacatttatagaatgagtcaaaagtattaatcagattctctattgtccgtttttcaacatcattagagattaaatgtgctgcttgaacacatttggatacaatttgtaaatgcctatacattgttgatgtatctgttggcacacgagaggttagtattttttcgataaacacagatcttttaggggattttccattatagaaaacgataacattagcccaccaatcattatagatattatctactaattcttgttcatttgaatcatcatagaatatactggcaaaatattcttggaatgaaagattgttaaaacaaaatgtattggaggtttcattgtatataaaaaggcaattacgattttttagtttctctatgaacccttgaatatccgttaattcgtcataagagaatttgtcatatatctcttgaagaaatcctgataattgaggaatgtcaatttctctcatacctctaacatgcatatattgcccaataaaagctaaaatatgcttggtttcttcaaacttatattgtgcagacaacccctttgttgcatcccaacgatcaagataataatcactaaatttattataaagttctgttatatttgcaggtaattctttcaaatcaatagcatcttctttgtataaaatggccataagtgttaatgccataggtgtccgtgttaaagtattagataattgttggtcacgaatggcctcgacaaattgggatgctttatttttattatctggaattattttttttaccaacttgaacgcttgaccaatatcaaaaggaagcaattcaatatgctcatacccatcaaataaattatcatcaaatatatcaatatttcgacttgatataattgaatgagtattaagtttatgtgttaaatattgatttattttttcaataaaaactattctatcctcaaatccgcaactacgcgcctaatatgatacagaagcgaaaagaatctgcatcgttagtaaaaagggggcacagtgcatcgaatgtcaccataaagacatataaatgccccttaccccaccatgcgacttgaggcaatacgcaaaatcacgactataagttgtcggtgttatccaaagtcattctggaacacattggcataagcattgttgcatgaatagatattcagcacatacttccttgatgtcctgacccatttggctggcacagagatgaacttaaagacaaacgtcttgatgcggcttgttgctttgagtccgaacctcttcacgtcaagcctcgccatgatgaatttatagaagttgcgtatgagtgccataagcagaagaaacaccgtgttttctcccataaaggattttggaagcctgttccagccgaatccgttattcatatcatcgaagatgcgttccttccctccacggaggttatagaattcgacaatctctttctcggaagactcgtagtcatttgtaaggatgcagcggtaggtgtattctccttcccacaggtcgagttcgccgtctatccgcttctgtctttgaatcacaagacggtatgccttccctttccatttctcgatgagaatggaggccagctcaaactcaatgccgcccaattccactttcttccaacctctgagggcaaagatgtcattgtagagcgaactgcatcggttagcacggatatagaaggtcttgcagtgtttagcaatctcttccactatctcttcagaacacgagccgcaatcagctctgaaacggttgataataagcttgttttgttcaaacctttcaaagaacctcttcagcgtgtccttctggtggaaacggacatttgtgttgccgtcgctgttctcaatgccgacaatcaagttgccaataaccgccacgccagggcgataaccaaggaacttcttgtatgtaggcttcgcatcaaacttctcagcctctatgaactggtggtcgaagtcaacgtcatacccctcgccctctttcagctgccctgtggacaataggcaattgaggagcagtgtattcagcttgtctgccgtgttgaagtcgtaggtcttgccagtgtcggatgtgtaggaaatgttatcctgggtcagttcctttatggctctaagaatcgtgtcggcactgcatgtgcgaagtgtcggatgaagcgaaaggtggtacatcagatgagtggtgacatcctcgatgcatgagccgccacaaaaataaacgctcataagcgaacggatgatttcgctgtattgataaccatacagcctgcatctcataccgagggttgagtcgattacagatgagagtctggagtcaaattgctccattattgaaaatattcctccaaaaggagtgagtttctcggatttaattgctacctttgccatgtctgtcgggtttgatacatattttgatttgcaacactaagataggtgaaaaatctgacatggcaaattcctgagcaactttttgttgctcaggtacttaaaaagttatatttgtaatagtgttgcggaattaaggtctatcttttttagattttacctcatcaagaccatcaaaaagtaaaatatagcggtcaaaatattcatctttaatctctgtatttgccagacttctaaattgttccgcaatcaattgatcaatgttaaattgattcagcgataattctctaaatcgaaaccaaaaaactccaatgcgtttgtatatatttacagcattgacacctattctttttaataataaactttttcctgaagtcgcaattcccgtaacgatagtatttttatttgaattaataatggttatcgaatcatcaggctcttcttggtgtctaatagttgtatcttgatatttttctttttctgcttcatatcgagaaatagtcgtcttaacattaataaatatatcatttatttctgatatgtttaatccagaaaaaagctgtttagcattatctaaacttgacaaccgcttaataagtgcatttttataattcaatacaattatatcatcttgagaaacaccatcattagataaaaagaaatcccgaatatgagtgtctatttcttcgcataatttctgataattccatatttcaatattcgtccgaaaatggacaggcataacactacttaaaatagtctttgcttgtgctgatactgatccatttattactacaataactgtatttatgtagtgctcttcagcttttgcatctttatatgggacttcaaacgctaattttatttgacgcgttatttctccaccttcttcgaaaacctcttgccctgcatttttgttttttacaactaaggcaaaccatgtttcacgacctaacatagagtcataatgcttgaaaactaagtcttttcccatttctgaatttccatgtgtaatctcaacatttgaaaatcctttagtttgaaaaagcatttgaagagtaggaaatatatcagactcttttttgcttttctgtatagactcaagcttttctcgaactgttgtataaatagccatttgtaacctcatttagtttcgtgtaaaggtaataatttgtcataaatcttacaacatcgatttcgtaatttacctacagttgaatgggattattttgatagttccttctccaatttttcatccttctctatgcgcttcatttcggcctcgatgatgtcgagcgcatcctgcttgatgcggcggtaattctccttgattttctcctgcatgatgtcccgtccgtcggcgtcgaggaacgacgatatttcaggtatgggtttatactccgccatttcttttttcacggcgtcgttgtccacgacgatccgggcatggaaaatcttctgctcgatctcctctccgaagttgtcgctcacagccccgacgaatacgccctgcgagagcgtcgagattttcgacgcaggaataagactgtcgagctgggtgtttatcgacgtcgaggtatcgctgcggttgatgctcacggacagtcgtttctgcacgatctttccgaatcgttcggagagcgtccgggccgtttctcctacgacctgcccgctgaagatattgcccacggtattctgaatcacggcggcttccttgtctccgtagtcgcgctttagctggctgaaatcctgaaaacccagacacacggcgaccttgttggaacgcgccgttgcgatcaggttgtccagcccccggaaatagatcgtcggcagctcgtcgatcaccacgcaacttttgagttgtttcttacggtttatcagtttgacgatgcgcgaattatacaatccgagcgccgcaccgtatatgttctgcctgtcgggattgtttcccacacaaagaatcttcggttcctcggggttgttgatgtcgagtgtaaagtcatctcccgacatgacccagtagagttgcggggagatcatacgcgagaggggaatcttcgccgaggcgatctgccccatcagctgctctgcggctccgcctttccatgcatccacgaagggcgaaagatagttctccaactcctcgtgagccatcaatacggtgaacagatcttcgtagggtttgttcagcagctcgatggcatggggaaaggtacagcattttcctccgtcgtaaatcttcaggaaccagatgatcgccgcgagcagcacgatcggcgattcgacgaagaaatctccctgcttctgtatccacgaacggttgagattgagcatgatgacatagctggcctcgtatgcgtcggtgatgtcggacatgagattcggcgcgagcggattgcatcggtgcgaacggcgcgggtcgtcgaaatttatgacatagaatttcggcggcgtcgctccgtaagccttgagattcttgcgcaaatggttgtaagcgataaccgacaggtcgtcgaacttgaagtcgtagatgtagagcgcatatcccttttcgatggcctgcttgatgtagttgttgatgagggcataggattttcccgagccgggcgttcctaaaacgatactcgcccggaaaggattcacgacgttgatccatccgctgtgcctgcgtctccggaagacgaactcggtcgggaagttgaacgaatcgtcgtttttcagcaggcgtgtctcctgcatgaaactctcgttttcggcattgaacggatcatccgtcatacggtttttcagcagacggctgctccatagtccggccgccagcatgccgaggaatcccgccagcagcgtcgccgtataaagcgccgcccgcagggtcgtagtgacattcattccgagtagccagccgtttccgtagaatagcagtatgccgatgccgcctgccgcggcgatatgcttccacgatattttctcgtccttcacgccacggtttcccatgcacgacaatgcgagaaataccgtacagaagagcttggtgcagagcggcgatgagaacaaggcagccgtccgctggaaattttgcaggatgcggtctacgacagggagcgttcatcccgcctgcgtaaaccactcgtaacaaaaccagtagatgtgaatggcgagaaacagaaagctgatcgcccgcatgaaatccgcgactttggccaagccgcgcagatcgtcttcttcttgcatgatcgtaacgtatcgaggttgttaaattcttttccggattttccgccgccgcttcttcctgcgggggaagagccggtattcgggagctgtttcccactccttttcgggcgtatattccatgagttcgcccattacaccgggcatcgaaacgtaatgggtctcgatgtactcctcgaactcttcgaccgaagatagtcccggcaggggcggttcgaggggtggcaacggccgtaactcttccggcatgggtgtggacgactcttgctcccgaccgttgaaccacgcctcgaaagcgtcggccgcatactcctttccgagccgggagccgttgaacacctgatgtttcgtgcggtcgatgaaggtgacgccgtaaatccgcccggcgtcgttctcccggaaaactgcgtcgataccgttctcccgaagttcggccgtgaattccttgcggttgcggcctccgctccgggcgcggtcgatttcgcggcgtgtgcggtcgagcgttgcgggatgttgccgaagccgttgtttcgaggcgtcgaatttttcttccagcgccttccatccgaagaaatcgcccagccgggacgctttgaccgccgctcccgtgcgctgcccgtcgtcatcgagcacgtggtaaacgagcccccgatatggtctgcctcgcacgtcgcctcggatctcttcggctgcgacgccaaagcgttcgagcagcgtattgaactccgcgagggactggaatccgtactgctgtttgagcgtcatcacgacattgcgcagctgatgcttcagatcgctccgacggtaatcgacccggtgcaattcttccggttccgcttgcacgccgccgtcttcgggcacatgcagcccatgcttctgctccaaatcccggcatacgacgatggcgcgccgcagttcgttgttgtggtcgatcttccggccctgctcgtccaccctcaccgagacgacgtgcatgtgtcgccgtgcgatgtcttcgtgcagaaagacgacatagggctggcggccatatcccatgcgttccatgaactcggcggcaagttgcgtaagctgcgcttccgaaagccggtcttcgggcgaggggttgagcgagaaatgcacgaccggttttcggacacagggattgagcgccgtgtagtacccgaaagcttccgcacactcctcgatactgaacctgccgtcgctgcgttcgggtattccctgcatgtataatatccggccttcgccggcttcgaccttaatgcggttatactggagtacgccgtagacgttggccccggagtttactttcggcaccattgcagcaactccttcgtaagttcgatgaccgccttcacgagttgttccaaccgctgcgtttcgagcgtcagacggtagagataggccaacgctttcttatcgccgaaggtcatgtgtatggctttgacgcactggttgtagttcaccccgacagcccggaactgggcgtaaaaccccgtcagccggacatagaaatcgtaggtgttcttgtctcggacgacgaccgtaaagggtcatccgaagatgcggtggcagatgaaatcggctttattcttcatcccggactgttcgtacatgcgcaggaaacgctcattctgctcgcttgtcaggcgaacgtaatagcggtgtatgcgcgggtcgtcgagggctttgcggcccgcggcggaggtcggtttatcggcagcatccatagagcatcggtgttttgaggttacgactcgggagtaaccgtccgccacgccgaaggtcgcggcggcactttcggcggctcggaatattccgagcggctgaaagtaccccttgctatatgcgggcgcatatagaaatccggccaggggccggatgaaggtgcgcgccttcggcgtcgcagcgggattactcctttcggaggcaaaggtagagcgttttattttatgttgtatcagatatatacctgccaacggacgccgatacgcgcctttgggcgccacccgttttcggagccgtcgaacgggggcgttttctcattttctttgtgtgcggatcagtacttacgaatctacctgcccgcgtagtctcttactcccgtacatccgtcattgcgcggctatgcggatacggatgtagatgtctgcatagatgccgtggtttgtatgtaacagcttacatccgtatctgccgacaaaagtatgtgaatccgcaaaggcgtatgaatcgccgaagatacgtgaatacgcaagtacgtatccgcgtatcggaacaagttaaatattaatcgcttaattattctcgtatggaacagaacccgttatgcatcgctttcgcctcccagaaaggtggcgtcggcaaatcgaccctcacggtgctggccgcctcgtggctgcactacctgcacggcatccgcgtcgcggtggtggactgcgactacccgcaacactccatcctcaaactttcgaaccgcgacaaggccgtcgtgcaatcttcggcgatctacggtagactcctcgtttcgctcgccgagaacaaaggggtgaagccttatcgtattctctgctgcaaaccttccgaagcgatgctcgaatggcggaaatgggccgccgtcgccgaagaacgatacgatgtcgtgctgttcgaccttccgggaacggtgggcaatgaaggcgtcctctccacgatcgtcgagttggactacctctttattccgatgaaggccgaccgcattgtactggaaagcacgctcaatttcgcctctgttctcaacgaccgcctgatcaagacgggacgggcgcatcttcgggagctgttcctgttctggaacttggtggatcgccgcgagcggacgccgctctatgaacagtacgagaaagtcctcgatcagttggggctgcggcatctgcgcacgcatattcccgtgcggagcaacttcaacaaggatattcaggaagcgggcggcccggtgtaccggtgtacgctgctgccgcccgaccgggctttcgtcgccgagtgcggtttcgaccgcctgatgacggagatctgcgccgttctgaaacttccgagccatgagtagcaggaaggctcccgcccaacaggagatcgacgaagagtacctgcgcagcctgatggcggccccggagccggcggcttcttcgtcggataccgaagtgtcggaacaggcggaaaccccggcttcggagccgcgcgtcaggcgttcggatgcggaagactatgcgtcgcggtttctgaagaatactccttccgaagcgcggcaatgcgtctatatcgaccggcggttgcaccgcaagatcacgaccctcgtgggcgttgcgggcaaccggcgttttacggtcgggaacttcatcgacaacgtattggaacagcacttcgagcggcaccggacggaaatacggtcgctctgctccaaaggactcaataaaattctataaggatgacacccgttatgaaaatcacggaagccctcgtcgtgctgttcctcgtgctgttctgctacctgtttctggataagttcctcttccggggcgagttgggcgagatttgcttcgggccgacgtgccgggcgctggcgcgttggcatcgacggcaagccgaccgtctcgacccgccacgccgccgcaggcgtcggacggcagccgttacccctaaagacgatgcgctggtcgtcacccgggactacggcgccggtcagcggacgccagcacgcgccgcgtcacgccactcccggcgcaaggggaacaattcagacaagagcgaccatacatttgtaccggcaagcgacagcgataaggaacatcgcgctgtgcaagcgaccgttcaggggtggatacataaggaacctacggcgctcaccgcggaggaagagaacaccctgatgcgcgaagctgcgaccgaagaggtgatggacataggatgcgaaacgacggccccgcctgccgggacgcagagtttctctccgcaacagttggattgcatcctcgccttgtgcaaggggcaggccgtgcctgaagagcagcggcaaaccctggccggagtgctgcgtgacatccgccatacggaagtgcagcgtacactcatggacgccatctccggcgccagcccgatcatcgcccgttatctggacgatgccgagaaggaagcggcgcagcgtatggctgccgctccgaaatagattgttcaacttaaaaaatgcgaagctatgaaagctcccggatactacgattcaggctgacggcaggatgagcagcacgcatgaatcacgggcccagcgcccggagagaaaatctgaagtcgaattaaaaaacacaatcatccatgaaaagaaaactcattttcagttcggcatgaatcgccgtatgactgctcgccacggtgcagcacgccgcagcgcagcaaggcaacggcatggccggcattcaggaggctacgcagatggtcacgtcgtatttcgacccggcgaccaagctgatctacgccatcggcgccgtcatcggtctgatcggtggtgtccgggtctatcagaagttcagttcgggcgatccggatacgtcgaaaaccgctgcgagctggttcggagcctgtatcttcctgatcgtcgccgccacgattctgcgttcgtttttcctttagacgatggtcgaatatccgatcaataaaggcgtgggccgccaggtggagttcaaggggctgcgggcgcagtacctcttcctcttcgccggcggcctgctcgccgttttcattctcgtagtcgtactttatatgggcggggtcgatcaggtggcatgccttgtcgcgggcgtggggctgggcggcgcactcgtggcgctgaccttccgtctgaaccgcaagtacggggcttacggactgatgaagctcctcgccgcacggcggcatccgcgacgtatcgtctcccgaaaaagtgtggcaagaattctaaaccgacattaagaccatgaataacaccctgaaaaccgaaaccctcgaacggaaatttccgatctgaaaggtcgaacacgattgtatcctctctaaagacgccaacatcacggtggcgttcgaggttacgcttccggagctattcaccgtctcctcgcaggaatatgaagcgctgcacggcgtatggctcaaagcggtgaaggtgcttccggactataccgtggtgcacaagcaggatattttcgttcaggaacagtatcgtcctgacatcgggaaagacgatttgagtttcttgagccggtcgttcgagcggcatttcaacgaacgaccttttctgcatcatacctgctacctgttcattacgaagacaacccgtgcgcaaagccgccgtcagagcgattgcagtgtgctgtgccggggtacgctcgtcccgaaagagttgcaggacaaagatacgacgacgcgctttctggaagctgtggagcagttcgccagcatcgtccgcgagagcggtcatatccggctgcggcgtctcggagcggacgagattgccgggactcccgaatcttcgggaatcctcgaacgttatctcacgctgtcaccgtccgggaagaccccgttgcaggacatgcgtctcgatcccgaccggatgtggatcggcgacaaggcgttgtgtctgcatacgctttccgatctggacgacctccccggcagtgttcgtacggatgaccgctacgaacgcctctcgacggagcattccgattgtcggctttcattcgccgctcccgtaggattgctgctctcatgcaatcacatctacaatcaatatctgtttttggataacagcgacgagaacctcaggcagttcgaacgtacggcccgcaacatgcagtcgctcgcgcagtacagccgttcgaaccagatcaacaaggaatggatcgacgattacctcaatgaggcgcactctttctctctgacctcgatacgcgcccatttcaatgtcatggcatggggcgaagggagcgaagagctgaagcagatccgtaacgatgtcggggcgcagctggcgcttatggggtgcacgccgcgtcataatactgtggatgttccgacgcttttctgggcggcgatccccggcaacgaaggggattttcccgccgaagaaagtttctatacgtttctcgaacagggcttgtgtctgtttaacgaagagacgaactatcgctcatctttgtcgcctttcggcattaagatggcggatcgggtgagcggtatccccattcacctcgatatctccgactacccgatgaaaaaaggatggataagcaaccggaaccgtgtggtcatcgggccttcagggggaggcaaaagttttatcctcaatcatatatgcaggcaatattatgaacagggcgcacatatcgtgattgtcgatacgggaaactcctatcaaggattgtgctcgcttatccggcagaaaaccaaaggtcgggatgggatatatttcacctatcaggaggatgcccccgttgccttcaaccccttctttgtcgaagacggagtgtacgacgtcgagaagcgcgaatcgctcaaggcgctgttgctgactttgtggaagcgcgaatccgaggaaccgacacgtgcggaagaggtggccttgtcgaatgccgtgaacctatacctctcgcaactcaagaccggcactgcggtcacaccttcgttcaacaccttctacgagttcgtcgcaacggattaccgccgtctgttggaaaaaaagcgcgtccgggaaaaggatttcgatattgaaaattttctgaacgttctcgaaccctactatcgtggcggggagtacgactacctcttgaactctgacaagcagttggacttgttggataagcgattcatcgtcttcgaactggataatatcagcgaaaacaaagtcctttatcctgtcattacactgattatcatggagaccttccttacaaagatgcggcggctgaagggtattcgcaaagttttactgctcgaagaagcatggaaagctatcgccaaggcgggcatggcgggatttatcaagtatttgtgtgcgcccgtgcaggctgcttagtaaatatcccactggcaagggattaggtaagtgttctttgaaaaacctatcatcacccgacttatccgaaagggaaaccggacggggagtgtagcatgtcgggaacgccgtaagtcagtcagttaccagactgctactgaacggcaagatgaaacgatggatatgaggatgaaaaccgaattgtttgaacgatagtccaagttgctctacttgaaggctatgacgtaaggtagctataaatcgtcatactgcggtactgctccggtgtacaagtacggacgtaagcaagaacttgccgcagagcaaccatgataaatggtaaaggacggaaatcgcatccgacaatccatcatgccaatagttactaagcaagtaaacggggattacctaacccggaacgccgtaaggctatgaggtgcagacctctgaatatccggtacggtaacggagcctccgtagtagtccgaacaggttaacggcctgtacatggcgaagggaggcagctaattttctttaatacaatttaatggataatgtgagagacattatgagaagtccggaaagagtattaaacaatctgaacgaacacagtaaggattcgagctacaagttcgaacgcctttaccggattctgttcaacgaagagttgttctatgttgcctaccaaaagatagcatcgaacggaggcagcacgaccaaaggttccgacggtcgtagtatcgacgagatgagccttgcccggatcgaaacgctgatagcctcgttgaaagacgaaagttatcagccccacccgtcgcgaagggtgcatatcccgaagaaaaatgggaaaacgcgccctctgggaataccggcttttgaagataagttggtgcaggaggtagtccgcatgattctggaagccatttacgagggacattttgagaccacctcgcacggttttcggcccaaacggagttgccacactgcattacttcatattcaaaagacgttcagcggggcgaaatggtttatcgagggcgacatcaaagggttcttcgacaacatcgaccatgatgtacttgtcggaatcctgcgggagcgcatttcggatgaccgttttatccgtctgatacggaaattcctgaaagcgggatacgtcgaggattggacgtttcacaacacttacagcggaacgccgcaaggaggtatcgtcagcccgattctggcgaatatatacctcgataaattggacaagtatgtgaaagagtatatccgacacttcgacaagggaaccaaacgcaggccgggcaaagagagcaacgatttggccaatgaacgaaaacggactgtgcggaaactgaaaaagataaaagacgggactgaaaaggcggctttggtcgcaagactcaaagccatcgaacaggaacgtgcagcatttccaaacggagatgaaatggacggaagttaccgaaggctcaaatacatccgttacgccgacgattttattctgggcgtaatcggcagcaaagaggatgcactgcggataaaggaagatatcaaatcattcctatccgaaaacctcgccctcgaactgtccgaagaaaagacgctgataacccatacgggtaaatcggcgaaatttctcggatatgagattacggtaacacggaacaatcatcaacgacgggatgtgcaaggacgtctgcgacgcacctacggcaagcgtgtccggctgaatgtcagcatggcaacgctgcgggacaaacttctggaatacggagctatggaaatcaagctccgcaacgggaaagaggtttggaaatccaaatgccgttcaggattgatattcaacgacgaccttgaaatcctcgaccgatacaatcgggaaacagtgggattttgcaactattacctgatcgccaacaactgcgtcgtactgcacaacttcagatatatcatggagtacagcatgtataaaacatttgcgggcaaatacaggagcacggtacggaaaatcaacaagaaataccgtcgcaacaaactgttcaccgtaaagtacgagcagaaaggggtgatcaagtcccgaaccttttacaagacgagtttcaaacgccggacaacggcgttcaacggaagctgcgacatcgaaccgtactctatcgcagacgtgagccgaaccaatttgacggacaggctcaaagcggaaaaatgcgaattgtgcggggcaacgggcaagctgattatgcaccatgtccgcaacctcaaagacctgaaggggaaagagagttgggaacggctcatgtcggctcgaaaacgcaagaccattgcgttgtgtccgagttgccacaggctgcggcatctgggaaaagtttagactgagaaaaattagtggagagccggatacgccgagaggtgtaagtccggttcgggggcgagttcttggaaacctgccgtagaaatacggtaaggcgccgggtacttagcctacataaaacctgccgcaagtatttcggcgagtgtatgtgcgtaacgcaggagttggacgacctgctgtcgtcgcccgtcctcaaggagagcgtcatcgccaactgcgactgccgcatccttttggacatgcgtaagtatgctaacaagttcgacgagattcaggagttgttgggattgagtgataaggaacgcaatcaggtgttgtcgatcaatcgggccaatgaccccaagcgccgctacaaagaggtgtggatcggactcggaggcgtacactctgctgtctatgctaccgaaacgagtcttgaggaatacctctgctataccaccgaagagactgaaaaactggagttgcaacgtctcacggagaagctcggcggcaatatcgagctggccatacgccagttggccgagcaaaaacgcaatgaagatcattaacctaaaaaccgaaaatcatgttcatatccaaaaaagaactcgccgcgcgagacgaacggctgcgccgggcgcaggaagagatcgagtcgctgaaacagaccatccgggagttgcaatccgaggttgccgacgaccgtatctgcggctgctgaaagaacgaatacggagagcggatcacgatccgcaaaacggctccgggatatgccgcgacgcttttctgcggcgagcgtcccgtgcgggacatggtcattctcaaacgcgatgacagtctgtgactccatgtcttgtacgggcaaaccggcggatgcgtcgttcatcacacgaccaacgatattctgcatatcggatgtttcggacttttcgtccgcgacgaccggccgcagcgtatagggacggaagtaatccttcaggctccggtgcgatgggacggcgaataggcttcggcctgctggcagcgatgctgctggcaggccatccgcttcgggcgcagtgggtcgtgagcgacccctcgaatctggcgcagggtatcgtgaattccaccaagcaggtcgtcgaagcgtcccggaacggaagtacgctgcttcagagttttcagcagacggtaaagatttacgagcagtcgaaaaaatattacgacgcgctgcggtcggtgcataacctcgtcaaaagcgcccgtcgtgtgcagcagacgatgctgctcgtgggcgacatctccgatatatacatctcgaacttccggtcgatgctcgacgatacgaactactcggccgaggaactcacggcaatggccgcaggctatacgaagctgctgtcggcgagtgccgacctgctgaacgacctgaagcagatcatcactccgtcggggctttcgatgaccgacaaggagcggctggatattatcgacaggatctattacgagatgctcgaataccgcaatcttacggaatactatacgcgcaagaatatctccgtgtcgttcctgcgcagccgccagcgcggggattcggagcgtgtgcgggccttgtacggcggccataacgacagatattggtaacctatgacgatgccgttagccgtagagtggacgaacctgcatcagattctccgctcgttgtacgccgatatgttgccgttgtgcagcgatatgatgggcattgccaaaggactcgccggattgggcgccttgtttttcatcgcataccgggtctggaaatccctcgccgccgcggagccgatcgaggtattcccgctgctgcggccttttgtgctggggctgtgcatcatggctttcccgaccctcgtgctggggcctttgaacggcctattgtcgcccatcagcaaggccacatcgcatttggtcgatcgacaggcgttcgatctggaaaaataccagacacagaaggatgaattgcagcgtcaggcgatgctccgcgatccggaaaaagcctatcttatcagtaatgaagagttcgacaaacggcttgacgaattgggctggaagcctaaagacctcatggcgattgccgggatgtatgccgagcgagccgggtatcaattcggtcagaaagtccgtgaggcattccggacgtttctggaaacgctcttccaggcggcatcgctgaccatcgacaccgtgcggacgtttttcttgattgtcctggcgttgctggggcccgtggccttcgccttctccgtgtacgacggctttcacaatacgctggcgtcttggttggcacgctatatctgcatctatttgtggctgcccgtcagcgacctgttcggtgcgatcctttcgcgcatccagattctgatgctccagcaggacatcgaacgactgcaagacccgacgttcatacccgacggaagcaatacggtctattgcatttttatgattatcggaatcgtcggatatttctgcgtgccgaccgttgcgtcgtgggtcattcaggccggaggtgccggaagttacggcgataaagtcgcaggcgcaggacgtgccgtggcgatgggcgctgccggagtcgccggagcggcggtcggaaatgtcggaggccgtataaaaggggctttgaagaaacgataaaacgtaataaaatatggaattcaaaacattgaagaatatagaatcgtcctttcgccacctgcggctcttcagcatgctctttctgggagcctgcacgctgatctcggtggcggcagtgtggacatcctaccgcttcgcggaagcccagcggcagaagatctacgtactcgatcagggcaagtcgctgatattggccctctcgcaggatatggcccagaaccgtcccgtcgaagcccgcgaacacgtgcggcgcttccacgagctcttcttcaccctctctcccgaccgcgaggccatcgaaggcaatgtccgcagggcgctgtaccttgcggacggaagcgccatcgcctattaccagagcctcgcagagaagggatatttcaaccgcatcatcgcctcgaacgtatcgcagaatgtcgtcgtggacagtatccgctgcgatttcgactgctatccctatgccgtggagaccttcgcacggcagaagatcgtccgtgaaagcaacgtcacggagcggacgctcgtcacgacatgccgcctgcgaaatgccgtacgctcggacaacaacccgcagggattcctgatcgaagatctgcgtattctcgaaaacaaagacctcggaagttatgagcgctaaagatttacagacgcgggccgaagcgtggctgaaggcccgcatgaaacgtcttacgccgcgccagcggctcgggctggttactgtgctgctgctcgtctatgcggcggtcgccctgatgattctgttcggtggaatgcggagtcgggagacgtcgattcccgccgtcgaacacctccggcagccactactgccggaaaggagcctgttacctctaaacacgagtgaagatgacacgcaggagcgataacggagcagttgaaaagctgtcgcaacttctcacatcgcagcatctccggcaacttaagttcgtaggtgtcgtgacggtgatgacactgctgtgcggcattttcctatggtacctgttcgccccgaaaccggctccgcagcaggcgggaacgggcggatacaatgttacgattccggaagcgacggtaaagccggcggaaacggacaaacgcaaggtctacgaacaggagcagtacgagcagcagcggcgcgagaaactacaatcgttgggtgatgttatggacgaccgcttgcctgtgaccggggaaatggcggatgctacagctccggcagcaccgacggcgatcgacgaatcggatgctgcctaccggaggatatcgggtgaaatggcggctttctacaccccggccccttcttgcggcaataccgaggtcgaagcactgaaagagcaggtcgcggccctgcaatcccagctcgacgccgagcggcagcagcccgatccgctggagctggccgaggagcagtacaagctcgcacggaagtatctcggcggcggaacggccgcggacgaagaggccgggccgacgaagcagcgaagggattcgcgtctgtccgtcatgcagcccgttcgggagggagaggtcgaagcctcgacactcgatccgcgggcggatttcaccgtcgaacgtaacttgggatttctcacggcagcaggtgatgtcgcgcatgccgacattccgactgtcagggcttgtgtcgctcagacgcaaatcatacgtgccggaagcaccgtgcaactgcggctgctggaagccgtgcgtatcgacgatacggtgatcccccgcaacaccccgttatacggtcttacgacgatctccgggatgcggctgcaagtcatagtgtcgtccgtcgaatacggcgggcggatcttcgccgtcgaagccgcggcttacgacctcgacggacaaccggggctgaatgtcccgaactcccgcgagcggacagccctcaaagaggcgctggcgtccgtaggacagaccgccgggacgagcgtaaacgtcacccgttcggccgggcagcaggtgttgtccgagctggcgcgcggaggattgcaggcttcgtcgcagtatgtcgccgggaagctccgcgaggtgaagataaccctcaaagccaaccatcagctattattgatttcaaaacagcagtaaaatgaaaagagaccttatttatctgcccctgatcgtctccgcaatctgggcagcacacgctacggcgaaagccatgcaggacgggccgcaacagatcgaaccccgaaagatcgaagcgggattcaccaagactgtacacatcctcttcccgtcgcctgtcacgtatatcgacatcggctcgatggacatcatcgccggcaaggccgatggagccgagaacgtcgtgcgcgtgaaagccgccgtgcggaatttcgcagcagaaacaaacctgacggtcatcaccgaagacggcggatttttcactttcgatgtctattatgccgagaatccggttgtctcgaccctcaatcttacagtgcaggaaccgcaaccagaaagtatgaagaaaccggccgccgtgggctatccgcagccgacggccccagcatccgaaagccgggtgctgctgcgcgaggtagggcgcgagaaacctgcgaccataaaacgcatgttgagcgacatataccgccaaaaccgtacggacgtgaaggacattcgcacgaagaagtacggcatcggagtcgaggtgctgggaatttacgtgttcaatgacgtgatatacattcactcctgtatctcgaatgacacgaatatctcattcgaggtagatgcacgacatttcattgtagcggatcgcaaattcgccaagcgcacggcacaacagcagtcgacgctcgaaatcctgcgtgtatgcaacgatccggcagtcgtgaggggacaccagcgtcagcggacggtattcgcgctgcccaaactgacgatctccgacgacaaggtgcttttgctggaaatcatcgagaagaacggagcccggcatcagacggtggaaataccagccaaagagttgttagaagcaaaactgctgtaacgggaaaaataagattcgatgttcgcacactttctaacggctctttgcctgacaatgggaatattgtcggtactggtcgccatcggactatgttggttgatcctctttccggagtatccgaaacacagatattgatccggggttgaacccaattaaaagtgcccggtaaaaccgggcacttttaatattttacaacttacaattctctggtgtggcaggcaggtcattccacgacttgtccgccatagtgcaatgtgcatatttcacgatgtatctgccggcatagcagctcgataacccgttcggaaagatcgtgccgcaccgtgtgcatgaagcggcggttctcgatgcggctgaacaggcttgtgccgtcttcggcgacggcgcagcagatttgctcctcgcggaagcggtcgtaatcggtgaaatattccacatcgggagcgatacgtatataagatttcataggttcgtcagatgatgttttgacacaattcggggtggcggtatggcgggagccgcgggcgtccgcccgttcgcgtctgcggcagtcatgccgcagacggaaaccgggacttatttatggtgtcgcaaggtcgttgaatcgcagttcgatagttgtcagcaacaatcccggcggacaggaataagtgccccttatgtccgattcttcggagaagatatgcacggtataacggtgttcgcctcgttgccgggaaatccggatactccaagtatggccgtttcggcgtgcgaaaaaaatgtgattccccgcacctgcctggatcagatcaaaaacggcgattccatgccggcgaagatcgtcgataaattctttcagcatgattctattcggttttatggggacggcctgcgggccgtccccgatcagaatttaggcggctttctttgtcgttttcttggtgctcttacccgttttgccctctttcttggcggctttggtcttggctttctcctgtgcctcggcaacggcaatacgctcgtcgagacggtcgttgcgcttcgtgtattcctcgtcgaactgcgctttcacaacctcgtatttctctttgtggtgcaaggctgcaaattccatcagcagttgcttccccgttttgtcgaaaccgatgtcggatgtaagactttttaccaagaaatcgcgggtgatgagatcgcgttgttcgtcggtcagcgcattgacgacagcgattttctgttcggatgtcaaataatacgcttcgggaaatcccacggcggcgaggtgctcgcgccgcaggcttccgagcatgatgtaatagagaatgttgtcttccagctgggtaaacggcgtcggagcgatctcctcgtcgcggacgatctgccggacggcttcgacggttttttcgtgtgcgagttccgtgttgcggattttcttctcctcaaggcgggcaatcagttccccggtcgattccctgcctttggcggcttggttcacatagaccagccgggcgtcgtcacgcgaggtcttgacgaagatacggatcgccccggcgtcgtgcttggccagcaggtcggcggtcttttcctcggcagcctttttctgctgttcatagatttgcattgccgcggtataatcggcatcggcggcataatccgccggacatggttccgcgggtatagcgggcatttcctgcacctgcccgtattcgaacgccttgcattcgaccccgttttcggtcatatgctctacggccttatcatggtcgtcgcatccgtaacggtctttgcaaaggatgaatttcgggttttgcgcaagcagttctccgctttttcgctcgatgaattcgcggtttttggcctcgagacattcccgattcgtacaccgtccgcttcccgtggcgaacatatcgtaggtatttgcgttgtacttgcatgcggcacacgccgttcggtcgaagcgataccgggccagatcgttcgtataatgggcgtccaccatccgcttgaactcctttacggagtatttccgccacccctcctcgtctttgaggcggtctttgcaaatcgtcttttgcaagtctttcccgtaccgtgccagctccatggcgaggcccagcgtaatggagttttcgcgcaggagtttttttacgtcggggatcagttcgttgagtttcatccggtagtagatatactgctcgcttttgccgaagcgtgcggccacggcggcggcatccccgccgagggtctgcatggcggctttgtaggcttcggcctcgtcgagcggcggcatctcctcgcgctggatgttctccgagagcgcgaggtcgaagatcgcccgttcgtccgcgggggcggtatcgacgatggcttcgatttcggtctggccgagcagttgcacggcacggtagcggcgttcgccgcagacaatgctgtagccgttctgttctgcggctcgcacccggatgggctgaataaggccgtgtgtagcaatggaggcggccagttccgcgagggcgttttcatcgtaactccgccgcggattgtgggggttggggcggattttgtcaatggagagcaaaacggtcgatttcgtgttttgagcggcggttgcggtcgtggtgttggtttcgttcgttttcatggtgtgatgattttaagattattttgaaaggtatttgatcagttgcttgtggcggtcgtacggtattttgaacagcaggtaggtaatgcctatgccgttacgggatgcgttgtggaggagttgccgcagatcggggtcttcctcggccgtgacgccgaacacctccggcatgtatttttccggcaaccgggtgcgcatcatgtagtcgaaatccgccgtgcgctgtatgatttcttcgtatgatttcataataaagtcgttaagaatgagaggattgaatcgccggacatggcatgcgcgttgtcccaattccgccattgctgtccatccttgttttgtaacgagaggttgaaaagagggtctttccctttcgaccacttgccggaataaatccggatgctgaaagtgcgtacatggccgctgaaatcgaaaaaggcggtgtatttttctttgccgttgatctccagcaggagcgcggcgatagctgttatctgttcgttcatggtttcgggtgttgtggggcgggcggatgcccgccccggattgaatgttatttgagataggcggccaatgcgctgcgcacctcttgttctcggcgtttggagaaaatccacccggcgcaccgggtgccgtcgtgcgtaaggtaggcgcggaacagcccgttcagatcgcggagcgtatcgcgcaggggtttcgtatcgccgaatacggcgatcgacttcgcggagtattccacgatctcgacacgtgcgtcggccacggtttcggggacggtggtctgcacgggtgcagggttctcgatgcatacattgtcggaatttccggccacgacggcgaaacgcttgataatgccctctttgtcgcggcacgattccttgctgacctgccagcccgaatagcggtgtgtaccgaggtaataaccgtgccccatgctgtacttttcacggtgttcgtactcggcattacgctcggtcaggtgtgccgtgccctcgaagcgggccgcggccttgcgcatttcggggaacagatcgcgcgtgtgggtcgagaatccgaggatcaccgtgcgcacgatacgcgagccgaaatagtccgtataggggtcgcattcgctttcatgctgttcgccgatgatgacggccacggcatcgtcgggaacgatctgccgcagacgctccgcgccgatggtacgtaaccgttccgcgtcttccgccgctgcacgtcgggcggtttcctgctcggctttgagggcgtcggcacgagtgcggagcgccgcgacttcggcggcatccataaattcagggtactcgtcgtcgtaatagtgcccgataccgaatttgtctcgcaaggggcgaatcagatcggcagtgtgctcctcggcggtttcggggtcgatcaatcggtaattgtaaccggattgtgtgtgtgcgattccggccacgaccatgcgctgacgcatgttgtaagggccgtcgaagatgacgatttggttctcccgaacgctctgtgcgtcggtgtcgtaactctttcctgcgaataacaatgtgacttttcccatagttgtaaggtgttgaatgttagtaaaacagccgcagaagaaaccgcacgaggacgaccacaggggaaaggacgagacgcacgatgtcccgacaccgccgcaagaaccataacgagaggcagaagccccaaaaaccgcccgcaccgagataaacgcccgcgagaaattcgaatgccgcaaacgcgccgaaaagcacagccgcgaaacccgccgcagacctccaaaacccgcagatgccggtgggagcggtgccgctccgtttcaaaatttcccgtatgtctttgtgctgtttcatacctacgaccttttttttatgccgtatgggccgcgtttgccttgcttccgtttctgtgggctatatttcagaggggcggaatgcgcacaagatttcaggacaaaaaaatcagccgcaacttctttgctgcggctgatttttttgtctgaacccggagggccccgatcttgggagctttccgaccccctgtcttaccttcgcccacggaaatgggagcaaggcaaacaagacccataacgtgctaaacggggagaaggtagtgcggaaacggcacaaagacatacgaggaattttcaactcggatataaaaaagcagatatatctgaaacatatctgcttatttgcctttggcaagattgtatcatattgtcggcagccaacgattgcaagctactacctgttgtagcaaaggcatttaccagtagtcgcgctcaaacttttttggtaattcgtgcatgattttgatatgttcgtagagaacgcttgctaatccgggaaagtcgtactgtggatttattttgtacgtattcagcgctgcgtgcatattattattgaatatatataataaatcggaattaaccgagtcaggaagttgcattttatagaattgcagtaagatattaatattactccgctctaaccctatataatattcgaaatattcgaaccaatctttaggctggtaccgtggattattgataataagcggagccgcagagtgtaatttcaatcttttgcatgcttctataaatacatctctggggactatatcattgtattttgtggtacatttagccttactcaatatatcattggtaataaagaaggcatcatgtgcaaaacgtttcagaatctcttgtattggttgttttaatattctctttcgattggtttggggaagataaacgttgattaaatagaaaatagcggatgctattattgatgcgaagattgtgtatgtaatttcggcatatatgtctgctttcggaaaaatagtatctatctcaatccagactaatttgtaaagcaaaatccatattaggcatattaagctgattgtaaacagtatgacatctccccattttagaaaaaactttgaattattccgtgacataatatacatgaagccttttaaacaagaccattttacttgtctttttttgaagatttaaacccgatcggtcggcgtggttggcgaatatcggggattttaaccgaaagagcggcaatagcctcgtagatgttatccagctccttgcgcatgtcttccgaaaggtcgttcaccgcttcggcgttgtcctcgtccgcccgttccaacagggtcagtttcgcacggatttcggacagctcggccgtcatagtcgaggttgtcataatgtagttgcgcatggcgacgaaagcatccataatccgaatactgacttgtatggctgtcgggctgcgtagcacggcagaaagcatggagaccccttgttcggtaaaagcataaggacgttttcgtgtgccgccccaacttgatgttccattttggaatatcaaaaattcctgttctgtcagttgaaacatgaaccgttccggaaaacgttcgatatttcgctttacagctttattcaggttgccggtcgtaacgccgtaaagctcggccaaatcccggtcgagcatcacgcgctggccgcggatttcgtagattttgctttggatcgtagcgagttcttccatcggttcggggaggtcgggagcgttttatttcttgatttgataaccatagaaggcgatttgttcgcggcaaattttctccacgatgtcgcgcaggcgttcgactttcggcacgagggcctcgatgtcggtcttcgtgatctcgaaatcgggattgtaacgcgattcgatgtaggagcgttgcaacaggtcgaacaagcgttcctcttcgggcgtgttgcgtgggaacgcccggcacaattcgatcgtatatgccttgcagcttcggagcagctcgtccagatcgtgattcttcgggctatacagaatatgcaccaacgacaccgtgcgcaataagttttctgccgattgatggagataaaatgaagcctgtttataatcgccacgatttgcagcgtgtccaacgtcaataagaaaacttaaagctcgtccaaacttgtcgtcaaaatatttctgtgcccgttccctgatctccgcaaaatcgagtttgcgccgccgcgccagtttgtactgccccgaatcgtaaagcaggatgccgtcgcgtttgatctccgtttcgaaatagtgcgccttggtcagcgcatgattgaactcgtcgattccgtagttgatgaattgggggtgcgtatgaaacggtcggtttttattctcaaaaaagcggtctttgatcttcgcgtagagcgaatactgaatcgcgccgatctccttgcgggtcagaacgagcaggtcgtaatcgctcatgtagtaggtcggcgtgccgaactcgatgcgctggtcgtaatcgacgtacttgttttttgcgtaactgccgaacagaatgaccatgcccacatccttaatgtgggtacggatcaaatcgacaagttgttgcaaatcctgtcgtttgttttcgggtaaaaagccgatgcttcgtttcatatccacaaaattatgaaaaaaatcggcaaatattttggcacgagctgtcatttgcaagataattatgctatatttgcatcattactgcaaatagcctgcgagtttccgacggaggcggcaagagccgcttaaaagaaacggaacggactatgaaacggtatttcgataactcggcatagccgacggacataatcataaagggtaaacaactctttataccatacgcaaacgtggaaacctctttcgggagggtttgaaactggtataatggttgtcagtcccggttatgtcctgcttgttatttgcaagcagggcttgactggggcgcaggacagcttccggtttcgggttttccacgacctgcgtatggggctgacaccgcgccccctttttgttttctgtgggtacatcatccactaacccgaaaccgtcatgcgccgccattcgccgaatacattacatcatacggattgcacccgccgagcgaccgccggcagacggaatcggtatgcgtgggcggcacatattatatacggaacggccgccggcaatataattcccgcaacaactgtggctcctaaatctggtaacggcagcccggttcctgtttccgggataaatttttcttaccggatcgaccataaaaaaataacggatgcggctgctattcagttgaattcttcaaaaaacagtgtgaagttgcgtcactatcacgtcgaatatcaccgcatccgttttattatacgcctcctcgctccgttatcgactgctacgaggaggggcaatattataaaattcagtcggaatagtagttgttttcagcaaaatacatcaatgcaatatgatttttgtatttttgcagagtcgacactacggacaatgccggtacctgatacggatttacatcaccgttttttccgaacaagaacgtcgcctaacgtcaccggcattgtccttttttattttcgatatgtagagttctggtggaaatcgttgtattacgccgaactttatcagcaaattatagtatcagggcagaggactatttccaatcatcaataccctttaatcattcggaatcaggacgaaaggaatattatgaaaacatgaatatttctgctctttttatcgaaaacatcccgatttcttgtaggaaaaagggacggcccccgatcagttcacggtgtttcacgaaattcaaccgcgatcgcaatcacaatcacgattcggccgtccctttcttttttctacggtttgctgagcaggttcgggaatagcagcattaccactggcaggtagtcgcccaaatcttcgcgtagcagatgcaggcatcgctggatttcgcgtgtgaccttgcgtaccgatatgccatagcgctcggcaatctgctgataggtttgatcctcgaaacgattggcaatgaaaatctgcgccgatagttcgggcatttcggccaaacgccgccggaatatttcctcgacatccttatgaaaaagcaccttcgagagatcgcaatcctcaagtagtccgaggcttgtgcggatgttgcgcatgccacgcagatacatctgatgctgtatttgaaggtgggtttgacgctcgcgcaatgcatcaatacacttgtgacgcacaataccgagaatataagccggaaactcatcttgtgacaactgaatttcccgtcttttttcccaaagaagcaggaagctatccgtaacaagatcctcggctaacgtcttgtcacgcaacagggcataggcaatcacgatgaaccgtgatttatattcggagtacagtcgatcgaactcatgcgtatctaatatcgcctgtgtcattgagtatagcggattcgtagttttttgggaattcaaagataagttatattctgaaaaaataaaatagattcgatatttttatacaaatgaatgtatttcaataatttacattaatcaatattttatataatttcataaaaatatttatttgcaaaaaaaggggtaaacatacccacgctcattcgatatattattaaagaccaaaaaaacaaccgatccgatccggggagatcgaacaagaattttgacaattatggacgagaaattattattcaaatattttcggggcgaaactacgtcgaaagaagaagatgcgatactggcatgggtcgaggagaccccagccaaccgtaaggagttcaagaccgctttcatgattttctccggtttggcggtgtatgccgccaagccgaatgctatgccgacagtcgcgccgcagcgccgccgaatctggaggcaagtcgtccgttatagtctgcgttcggcagctgccgtcatactgatgatcggagccgcgtatacgggtaaaacgctttatcggaatgcgttgtcgcagcagaatatgtcgattgtcgttcctgccggacagcagatgtctctcacgcttccggacaattcacaggtacagctcaattcgggtactcgactggaatatccggtcgtcttcggcaagacccgcagcgtgaaactctccggcgaggcgttgttcgatgttgcaccggacaggaagcatccgttcattgtccagaccttcgcgtcggatatccgggtactcggaacgaaattcaacgtgctggccgatgccgagcgtggtgaatttaccaccacgctgatagagggacaagtacaggtgacaaaccgcgccaattctaatgagcgaatcaccatgtatccgtacgatgtcgtctcactctctaacgggcgcctgtataaagaacgtgccgaagattttgcagaactctgctggacggaagggttggttcatctgaagaggatgccattcgacgagttgatggccaagttcgagcgagcattcaatgtcgaaatacgcatcgaatgcgagcggatgccgcagattaacgtgatgagcggagaagtccgcatttcggacggtgtagattatgcgctccagattttacagcaggtatctaccggctttagttatactcgtgatgaaaaaacgaacgtgattgtaattaaataataatgtgattgtaattgaatttcgtgcaagcactcatgttgcactaaaaactctaaaatctatgaggaaatgaccgcgtgacttaatacactaaagcgttgactataataaagaaaggtctgcgaaatcgcctattcgcagacccgcgataatagtcagcaaaaaaactaatcgagtaaactattatctaaaattacaaaagtatggaaaaaacagtattccacaaaatcagaagactgtttcgatttactttacttgtttgcctgagcctcggcgtattatcagccaaggcacagactgcccgcgtgacgctcaaagttcaagacgcatcgctcggacaggtcatggatgagatcaagaaccagaccagatatcttttcatcaatcaggatgtcaaggatctcaataaccacaaagtaagtctgaatgtttcggataaagctattgtcgaggtgttagatcagatttttacccctttcaatatcggttatcgcatcgaaaaaacaagcattattattttcaaccgaccgaaatccacatccagttcagttctgatcggaggtaaggtcagcgatgtcggcggcgcaccgattatcggcgccacggtgctggtcaaaggtacgacgaatggtgtttcaaccgatgccgacggtcgttttacgctaacgatcgcttcacctgccactgcacagctcgaaataagctacttgggctacgaacctcaaactttagctgtcggcaaccgcacctcttttgagattacactggcggaatcggcttcggaaatcgaatcggtagtcgttactgccttaggtatcaaacgtgaagagaaggcgctgagttataatgtacaacaagttgaagctgaagacatcacgactgtcaaggacgccaacttcatgaactcgctgacaggtaaagtcgctggcgttacgatcaatgcttcgtcgtcaggtgtcggcggtgcatcgaaagtcgtgctgcgcggtaataaatccatttcgcagtcgtcgaatgccctctatgtgatcgacggtattccgatgtataacttcggcggtggtggcggtacggaattcgattcgaagggtgctaccgaagccatcgcggacatcaatcccgaggatatcgaatccatctcggtgctgacaggtgcagcagccgcggctctttacggctcgaatgctgccaacggtgctgtgatgatcaccacgaaaaagggacaggctggagctttgaaagtgacgctttcgagcaatacggagtttctgaacccgttcgttcagccggagttccagaaccgctatggcacgggactaaacggtcttcagtccgggtcggccatttacagctggggcgagaaattggcacctgcggcgcgtctgggatatacgccggatgattttttcgagacaggacacgtctacaccaacgccgtgacggtatcgggcggtacggacaagaaccagacttacttttcggcagcctcggtcaattcggacggtatcattcccaataatgaatacgaccgttacaatttcacatttcgtaatacgtcctatttcctgaaagacaagctgcgtctggatgcttcggccagctatatttaccagcaggatcagaacatgaccaatcagggtgtctattccaacccgctggttcctgcttatctttttccccgcgggacgaacttcgactcctatcgtattttcgagcgttacaatcccgcctctaaacttatggaacagttttggtcggacgaccttgaaggcggtgacctgcgtatgcaaaatccttattggattgcctaccgcaacctacgcaataccgataagaagcgttacatgctgtcgttctcggcctcctatgacattcttccgtggttgaacgttgctggccgtgtgcgcatcgacaatgcgaactcgctctatacgcagaaactttatgcttcgtcgaatacgacgattaccgacggcggtaagaacggtcactataccgaacagcgcgaatacgatacgcagacttatgctgacattatggtgaacatcaacaagaccttcggagacgattggtcgctgcaagccaacgtcggcgcttcgatcaacaacgtcaaaatcgaccaattgtcgtaccgcggcccgattcaggaaaacggattgccgaacgtgttcaatgttttcgacctcgacgattcgaagaagcgcgccgaaaaatacggctggcaggaacagacgcagtcgatattcgcctcggtggaagtgggttggaaacagatgctctacctgaccctcacgggccgtaacgactgggcttcgcaattggccaactccccgcaatcgtcgttcttttacccgtcggtgggtctttcgtgggtgccgacctcactttgggatatgggcaatgcgctgacctatctgaagattcgcggttcgatcgcttcggtaggtatgccttttccgcgtcacctgacggttccgacctacgagtacgacgcaacgaataaagtttggacagccaagacgcactatccgatcggcgatctttatcccgaacgcacccgcacttatgagttgggcctcgacgcgcgtctgtggaagcacttcagcttgtcggcttcgtggtattgggccgatacctacaaccagacgttcgacccgcagatttctgtatcatcgggttattcgacgatctatctccagacgggccacgtccgcaatacgggtgtcgaagcgtcgctcggctatcagaaccaatggcgcgatttcggttggtctacgaactttaccttctcgtggaacaagaacgagatcgtggaactggttcacaactatgtgcatcccgagaccggcgaactcatcaccaaagagcgactggagatcaaggggctgggtaaggccaaatatatccttaaaccgggcggaacactgggtgacctctataccaattccgatttggtctataacgacgacgggtatatcgaagtggacaagaacggcaacgtagccgtcaaggacgactatatggatgacatttatctcggttcggtatttcctaaatacaacctcgcatggcgtaatgatttcaactataagggtatcaatctcggcgtactgttcacggcccgcatcggcggtatctgttattcggctacgcaagccaatatggatttgtacggcgtgtcggaggcctcggccgcagcccgcgatgccggtggcgtgatgattaacggccgtgacatgatcgacgcacagaaatggtatcaagtaatcggttcgcaatcgggattaccgcagtattatacttattccgccacgaatgtccgcttacaggagctctcgctgggttacacgctcccttcgaaatggttccgcgacaagatgcgtatgaccgtttcgttcgtaggccgtaacctgtggatgatctactgcaaggccccgttcgaccccgaagccgtagcttcgacaggcatgaactatcagggtatcgactactttatgatgccttcgatgcgtaatctgggcttcaatgtgaaattccaattctaaagaacagcaaaaccatgaaaaagacaaacaacaaaatgcagctactgctgctttcggtggtgctgctcggtacgactgcctgtacgggcgatttcgcggacatcaatcgtaatccgaatgaagtgaccgacgaacagttgcaggctaacaactataagatcggtacgaacctcaagacccttcagggcctggtcgttccgacggaagagcaccggttccaattcgtcgagagcatcgtcggatgcccttacgctggctacaacggtaagaccgtcgatacctggcaggcgacattcgaaaactacaatccctcggctgactggcggaaagttccgttcgtggatatgatctccgatacctatccggcctatcgtgcgattatcaacggtacggaggacgtagtggcgcaggcattggccaaattgttccgcattgccatcatgcagcgcgtcacggatagctacggcccgattccctatacgcaggtcatggccagtaagaccgaatcgctggaggtagcctacgatacacaggaagaggtctacacggcgatgtttacagaattagacgacgtgatcgcttcgcttcaggacaacctttcactaccctcggatgccttcggccgttacgacggtgtttattcgggtaatatctcgcagtggctcaaattcgccaattcgctcaagttacgtatggccatgcgtctaacggaggttaaacccgatctggcgaagtcgaaagctgccgaagccattgccgccggggtcatcacgaccaacgcagacaatgccatgatgcacacctcggacaaccgaacgacgctcatttacaacgactggggcgaccatcgtattggtgccgacatcatcaattacatgaacggctacaacgatccgcgccgcgagaagatgtttacgactgtaacccttgtggagaacggacaagaaatacagggatatgcgggtattcgcattggtatcaacgtgacgagtaaggcgcaggccgtgtcgtcctactcgaacatgcgcgttacgggtacggatccctatctgtggatgaacgccgctgaagcgacgttcctacgtgccgaatacgaactgcgctggggctcggccgaaactgccggaacactctatgagcaggctgtcacgctctcgttcgaggagcgtggtgccgataacgtgaagggctatctttccgatgcgacaagtactccggcagcctacaaagatccgttgaacaagcactccatggcttctccgcagagcacgatcaccgtggcatggaacgccgcggcggatttcgaaaccaacctcgaacggatcattacccagaaatggattgccattttcccgctgggaaccgaggcgtggacagaacaccgccgtacgggttatccccgtctgctgccagccgtggtggataacagcggtggcgccgtgaacgtggcgctgggcgcacgccgtctgccttatccggtcgaagagtacaccgagaacccgacgaacctgcaagccgccgtttccgcactgaacggtgagtcggtaaacggagcgggcgatacgcagggaacccgagtatggtgggatcgcaaaaacttaaattagtatggatatgaaacgaaataaattgatcgggcttctctccttatgcctgctggccgcgacgttcgcttcgtgcgaagattggaacgaaacggaagccgtcaaacaaaaagtcgaacgcccggaggatcaaaatccagaattgtgggcggaatatacggcggcgttgcgcgactacaagcagtcggaacattttatcgtctacgcccgtctgttcaactctccccaaccgggtaccagtgaaaaggatttcatgcgttgcctgcccgactcgctcgatatcgtgtcgctgaccaatgccgacaacttctcgaagtacgatgcggaagatatgccggctatgcgtgagaaaggtacgaaagtgctctatcaggtcgattatgcaggccgcagcggggaactgaccgatgaaacaaaactcggcgcttacctcgataaagttatcgccgcggtcaagaagaatggactggacggttactcgtttacgggtatccccaatgcgggcgacgcagcgaccgcaacggcggctacacttatcgtcgaacgactttccgcggcaaagaccgaaggacaactgctcgttttcgaaggtaatccgcttttcttgacggaggacgctttgtcgaaggtcgattatgtcgtgctcgacaccgaggctacggagaatgtgaccgacctgaagatgcaggtactcaacgctacggggtatgccggcgttccggctacgaagttgctgctggccgctgccgcaggcgctcctctctatgacgagaatgtcgaggaacatgccgctatcacggaaatggccgagcgggttgtatcgctcgggccgctggccggactgggaacctacgacatttataatgactattatgatctggacatgaactataaacttgttcgcaatgccatccagacgttgaacccctcaaaatagtgagcaatgagaagaattaataaatacttatggctgatcgcttcggccgctttctgctcctgtcagtcctatgatgccgacgaccacaagttcggtaatgtggtctacctcgacgtggcggaaacgactgacgtgcagacggcaacgatcaaaaacacgctcgatgaactcgatcggacattctccgcaacgctggcttatccgtccggtggcgacgtcacggtctccattgcagtcgatccatcgctcgtcgctacctacaacgcccgtcacaacacctcgtggccgatgctcgatgcgaaatactattcgctttccgacgagcgggtaaccatcccggccggcaagaccgcttcggatgccgtgacgctccatctgcaggagttgctgggcgagggcgaagaccagacaggtgcgctgaccctcgatgctacctatctgctgcccgtgacgatcacgaatgcgtccgttccgacgctggacagttcttcgaccgtctggtatgttatcaaacggtcgtcgaacatcactacggcagcgcagcttaccgacaactggatcaatttcccgacactcgacaaggatacggagcaggcgatggccctcaacaacttgacggccgtgacctacgaggcgttgatctatatcgacaagttcgccacctcggctctgaactcggccggtgtcgccaaccccgtcagcatctccaccatcatgggtgtcgaggactacctgcttctgcgtatcggcgacacgaatttcgagcgccagcagctgcagttcgacggttcgggcagcggttcggccttcggcaagttcccgggtcgtgatgccggcaagatcctgaacgaaggcgtatggtaccatatcgcatgcacttatgaccaggcgacgcgcacggtacggattttcgtcaatggcgagttgcagagcgagggcaaggatatggggcttgcgtcgatgagcgacgacacgcgcatcaatctggccatgcgtgctttctacgatcgttacctcaataatccgacgccggagaacgaagaaaaatacggcggttgggccgatgcccgccagttcttcatcagctattcctacgacgcctaccgcccgctgaacggcaaaatcgccgaggcccgtgtctggtcggtagcccgcacgcaagagcagatccgggagaacatgtacgaaatcgccgatcccgaaagcgacccgacgctcgtcggttattggaagttcaacgagggagccggcaatacgatcaaggactattcgcgctaccataacgacggagaagccgagtacgatctggtatggcccgacggtgtggagattccgaaaattaacgaaacggaggagtaaactatgaaaacaaggataaataatgtaaagaagggagtagtgacgcttcttttcgcggcggtcatcgcgggccttacggcctgcgagaccgatcccgtgaaatcgcagcgcggagaacttcccgacaaagatttgttggagaatacctatgtcaaaatccgcagcatcaaatccccgactgaatttgccgttgtcaatctgtcggagggaacaacagtaacagaagatcgaatttactgccggctgacccgcccggcagagagagcgatgactatcacggctgccgtggacgaatcgctggtcgaagcctgtaacgaggagtacggtacggatttactcccgttcccggcagggaatgttaccattgccggtaacggtacgattgccgtagcggcgggagagcgtatctccgacaaaattcaggtatcgttcaagtcggacggactggctgccggaacatacctgctgccgattgcgatctcatcgaatgatgcggctcttacggacggaggcaaggcggtctattacggcgtgaaagtccgtgggattgatataggcgactacgaactggatacggattacctgaacgtattctatctgaacacgaccgaataccagccgctgttggccgacatttggatattgcagaaaaccgaagccatgccgccgttcaatacgctctgggagcggacttacggcaatatcgtcaatctgcgcatcgtgcagataggttacgaggccgatacggagcgtgccttgttggtgcttaactctgacatacgctatgtgctggaacatgcggacaagtatatccgtccgttgcaggacaaggggcgcaaggtctgtctttcgctggagggaaatggctcgggactcggattctgcaacctgaccgacagccagatcgccgacttcacggcgcaggtgaaagcctgtctggagctgtatgatctggatggcgtgaatttcttcgaccgcaatgccggttacggccaggtggaaggaatgccggagatgaacacgacttcctatcccaagctgataaaggccatgcgcgaagccatgcccgacaaactgctgacgctggccgattacgaagagccgaccgaatatttctgggacaccgaggcgacgggcggcatcgaggtcggacagtacctcgattatgcatggtcgggatatatgtcggagagcgaggatatccagttgctcgacccgtgggaagtaatcgacctcacaccgggcgatgcggccgatttgggcatgatgctcccgacgacgaaccatccgcgccggccgatcgccggggtaccgtctgagaatttcggatacttcgctgtgccgtggtatccggcggcaagcgatttcctgatgacggcacaaggttttatgaatgtggccatctgggatatgatgggctatgcgccgaacaatacgatcgtatgggccgatcttatctccaatcaacaaaatgcatatgaatcgtcttggaacatggttccgggtatgttatgggccgtattcggcgagggagctatggatggaacgtatatatataatgtcctcgtaaattacggatccggctatttgaaatacggagatctggcgaaagactggtaaaaacgataaaatacggatttgcatcgtgcaatcacaaattacaatcaccattttaaaattattaactatgaaaaagactttatttattacgactctgctcctttccgcgggtgcaatgtttacatcctgcaacaaagacgtggaaaatcccgacatgcaggcacaaccggaagaaacggctcagataacgcgggcctacggcgataaaacaccgctgatcgaggtgtattacgagatcaacgacaccaatccgctcaacgcgttgtcgtatgagatgaacggcaagaaattcatcgatctcgtacagcttttcgcttcgaatatccagaaagacgcgaatggtgatccctgcattttcttcaacgacaagctggctccggtgatggctgcgaaggcgacctatatcgagccgttgcagaatgccggaatcaaggtgattctgaacgttctgggcgaccacaaagggatcggcatctcgaacctgacggatgaccagatcgagaagttcgccgctattctcacctacatcgtgaaggaatacggcctggacggaatcggattcgacgatgaatatgccgactattcgactcctattgatcccacttcggccagcaaactcgttctcaaactgcgtgagaaattcaatgctgaattccccggcgaacgcaaaatcatccagatgttcgaatggaattatgcgtctaacatttccgcagcggcaggtgcggagatcgatttggccgaccacggagcgttcgggcataatgttttccaggcttccagcgcattcgccggcgtaacgaacgaccgctggtgcccgcaggctatccagatgggacaatcgtacaatgcaattttcctgaatcagatcaagaaccgctcctcgcaggctgccagcggcaactacggcggtattatgatgtttaacgtccgtaaggcatcgaatgtcaatccgctgcctgtattccagaagatcgcagaaggtgcatttggcgcaactgtaacttataccggtacggagtattctcaggattggacattcaaccctgcgggatacacgattacttatgcagatattcagtagcactcactcgatgtaaatccgtataggatagacgttaggcgacgtcatctggcccgtgcatcgaccgaaaggcgatgtacgggtttttctttaagttaaatggaaaataaatggattttgcaaaggatgtaacgatagcgcgatttaaacactcgattactaaagagtaaattcaaagttattcatactgcttttatcatttttcggtctattatttcgtcattagtaacggtcatatgcattgatgacataggtaagtgacaatctctattatgtctgtatctaaaaaatattttaatcgcatatgattaagaatattgcaatgtgaccctatagatacggaatcctgtcttatgaaaacgcttattcatacccgtatatacgcgttgttaactcaaaatgaatcgaatccgtcggaattagcccatgcatacgaagagtttatcgagacgatgaccgagatggttgctaatttcgataaccgggatgatattttgagaatactgtattacagccgggttgaattcgacgtattgtcccatccatcgtttaatcgatattcgaacaatgttttaaggacgacgttcatctataaaatcatgtatattctggattgcgaaatcaatatcgtcagcaatagtacgaaatatagctcgaaccaagactattcgttccctttatcctatcaggacggcgagttgctgtggacagggacgcagcaagagttgctggagcttgccgttgcccttcataaaaacgggattatcatgtacggcaaccgcaaggcgcgtttcatcgagatcgtccgtgccttgtcttctacattccatatcacgatcaacgatgtctatgtcaagaaaaccaggatgcttgaccgcagcacggcggtcacaccttttctggataaattgaaaaaagcctatgagcaagtcgtcgaaagacacctgcgatagagagagcggagacctgtcaagggcgagaaaatcagaaagtttttctccgtttgcaaaatttcaacaggttatttttcagttgattatattttcatactttacaaaaaactttttgatttttcccgagaggcatccggaaaagtgtacttttcagtgattttgtattatacatttgcagcagaaagcgacgcatagtgcatcgctgcattcaaaatccaaataacatgaaaaacatccttttagccgttgcagtcttcgctgccacattcgtttcctgtaacaaggagaccgaagtcgtaccttcccccaattctttcaccgatggggcacgtatcgcacttacgcttaccgatgatgccgccgacacccgctccttcttcgattcgacagcctcggccgaggcatgagagtcttcgttgtcgtcactgtcgattttcgtcttcgataatgccgacaacttcgttattcgccgggatttaacatccagcgagctggccgcgaaatcggcgacattctccctacctaaatctcttgccagcaccccctgttcattctacgccatagcgaactacgacgcctcgtcggccaagacccggacggcccttacggcccttgtggagaagtcggccgccgactataacggcacctttgccgaggtgtccaccgcagccaaacgttcgggcggcttcgtgatgtcgggcatgaaatcgcagaccgtcggggccgtgaactccacgaccaatgtcggcatcacgctcaaacgcactgtcgctaaagtagccctccagacgaccatcgccccgtcgttcgccgacaaatatgccggaacgcttaccatcaactcggtaaaactctccaaagccgcctcgcagtcactcgttgtggccggaacgccgacacccggggccatgaccttcagccacacgcagacgcccgcctctgcttcgggaaaatacaatgcgctgttctactgtttcgagaatggagctttgcccgcgggcagccgcgttctgctggaaattaacgccacatacgattcggacggcagcacttcgactacggatgaccgctcggaggtgacctattcggtcgagttgacgggtaaagccgcgggcgagattctccgaaatggttactaccgtatcgcggccaatatcacgggtcttgtaggtcaggattgcgccgtatcggtcaccgtcgccgattgggagacgcccgtcacgcagaacgtcgaactgggggcatagccctcttgttttggcagctcccgtccctcgcgggcgggagcttttttcaatccctttttcagatttttccgactatgaaaaaatatctgttgatactcgctgccatcctgttgctgtggagttgtatcgccgaggacaggacagaatgtacaaatccccgcggtgtcttcgtcagcctgacggtacggcccgaaaggatgtcctccgtaacccgctctgcggatgaaacggccatccgcgacctgaacctctacctttacgacgataacggcaatgttgtcctgcaccgttaccagacctctgcgacgctgcgtttcgaatgcctgccgggcgactatcggatgtgcattgccgccaatctgggccgcgatctgggcgacaatccgctgtgggaggatttcaccgttacacacgccgacaagtacgatgtattgcctatggcctatgagggcgatataacgataattccctcggcagacgggatgctgacgctgcctgccgtcgaagtacaacgctgcgtgtcgaaaatctcctatcacattaccgttactccggccgttgccgacatcgaactgcgctccgtgcaactgttctcggtaccgcgttttgtatccgtgttcgatatggcggccgcaccgtcggatgatcccgacgactatacggattgtccggaggtggaactttccggacagcaggctgcgggcgactgctatctgttacccaatatgcagggcatggtggcggccattaccgaccaacggcagaagaacccggaaaatgcccctgcgaatgcctcgtatctgctgatccgcgccgtgcgcgggtcgaaaatattagcttattatatttacctcggaggaaacaacacctcggatttcaatgtccgggccaacacgcattacaggctcaatatctcgatcttgggcgacagcgaggtcgatacccgcattagcagctatgccgtcaatgtgcatgacacctacgaagaaaactcggtcggcggatattgcacctacaatccgtttcagatgcttgccgtggagatcgacgggagtcccgcacccctgacgcttcggggacgtatcggtgtcgcgcaaggcaacgccggagcgttctgtctgaacggctctcccgtaggggaaggccgcgaccttatgcttccggaacagcccggccccaatatcttcggcgtgaactacgctccgggaatctatacgacagtcaattcgcaggtggtctataccgtcacggtcgaggatgatgcgggatttgcacagtcgttcgacatcggacaccgcttcgccaaccgtctcgacgtatatattcaccccgcgacggctgaaaacggaaacggtacggtaaccgtcgccggagcgttgtatgacgctgaaccgtctttcctgacgcacgaccgggtcgtcttgtgccatgaaaagggatgcacgctgacagccgtacccgaagccggataccgcttcgagggatggtattcggcagccgactacaagacacggctttcgacctcggcttcgtatgcctacattccgacctcgcccgaagccgcgatcttcccgaaattcacggccaatacccggccgctcgacgacgggggcacggccaactgctatatcgcgccggaattgaatacctcctattcgttcgacgctacgacgatgggcaacggccgtgcaacgacgaatatcgtcccgaagagacttgcgggagccgaggcgaaagtcctttgggaaacgggcacgatccgaggcgcgatcgttgaaagcgcgaaactgaccggcgacggacgtatcgtcttccgaaccggcatgacctatggcaacgccgtgatcggacttctcgacagccgcggggtatgcatatggtcgtggcacatttggtcggtggattacgagatcgaggccacggcccagacctacgcttcgggagccgtctttatggatcgcaacctcggggccctggctacgaactgcacgcaggccgctgccaaaggactctattaccagtggggccgcaaagatccgtttccgtatccggcgctggccacggacgcctacacgcaggctccgaccgtctatgctccgggattcgagtatgctgaaagcaatccccgaacctctggggccgagtcgccttacgacgtgatgaccctcgaatgggccacagcgcatccaacgacctatatggacggggtattttacgaggattgggaagagtggacgtcggtcgccgactggctctacgaccaccacccgaacctctggggcaacgtcacgaccgggaagaacaatatcagccgcaccagccataaatccatttacgatccatgccctccggggtggaaagtgcccggtgccgaggattttgcgggaatagagcggataggcgtatcggcaccttattacgttacaatccgctgtaacagcacgcagacggcgaaaatacccttgggcggaacgttctacgaaggacgttacgaccggaacggatcgctcggaaggctctacacgaacgctccgtattatcttcattggggagactcgaccggcgtgttccatgacgtagcctgcacctcgatcgtattcgatacaagcaactacccgccattcgtcaacacgacggatttttaccgctatgccgccaatccggtgcgctgcatccgggaataaaaccgaattaactttcaacaatgaggaaacaacgaatcatactgttcctgctgctgtcggcggccttgtgggggctgccccgcagggcttcggcgcagatcttcgccgtaagggccaatgcccttgcggcatgtacagcgacgctgaacgtcggcgccgaagcggccctgacggacaactggtcgctggagatgtccggctattggaatccggtgcaaaccgcatccctttcgatgaacttccacgccgtgcagctcggctcccgctactggttctacgaatccttcgtgggacactttctcggacagcacctcacctatgtcggttacgacctcggaagccggacaaaacgctataagggtcatgcctatggcctcggtgtcagctacggatatgcgtggatgctctcgaaacgctggaatatcgccgtagaggcaggagtcgggctttaccgcacaaaggacacacgccgcgacccgaccgtctctgactgggaggatgaatacatctaccgttaccgtcgctggacgctggcgccgacaaaactggaagtctcattctcttatatcttttagccatgaagatatacaataagatattgcaggcgggtctgctgtcggcagcgctcggaagcctgttcggctgctcggtggccgggcggctggagcgacatcggacgacagcctcgctctcgcagcttacccgtgccgaacggcagcagcggcaacaggactgccgcccgcaggttgtaaaacttcagcgcgacagcaacaggttctatctcgccccggtcgatacgcttgctgacggcgagcgcgtgatggcgcttcagatcgagcaggtgacggtcgtggcgaaggctcgcaccattcccgaacgcaatggtcgtgtcgtactggatttcatcgtgacgctgcccaagcagctgttaggcaagagccgcagtgtcgtcattacccctgttctgcataaacccgacgaatccgtgccactcgaagatctggtgatccgcggcggacgcttctcgctgctgcaagaacgcgactactggcagtacgagacctatgtcgaacgattccgccccgacaccgtggggcgtgaggcggccttcaaccgtttcgtgaagtttccctatccggaagacgcccggctcgattcgctggtcgaggcaagtactaccgttacgtattactattcccaagcggttaagaccgatgagacctcgaagaagatgctggtaacgcttcagggacaggtcttggccgtggacgacagcgcctatcgtctgccgtcatccgatacgttgagctatgtcgtatcctcgatgctctccttcgtcgataccttgccgcgttaccgcatcaaagttatcgacaagttcgtaaccgtcgaggatcgcaactacattcagttctttgtgggcgatacccgcgtagtcgatacgctgggcgacaaccgacggcagctggacaagatcaccggcctgatgcggcaaatcgtcgaacagaaggagttttacgtcgataccatcacgctgacagcagcatcgtctccggagggagcctacgccttcaacgaacgtctttcgcaaggaagggccgcggcgctcaaacgttacctcgtccgccgatacggcagaagcatcgacacgatgctcaccgtgcgttgggtggccgaagactgggcggaactgacgacgcgcattcgaacagaccgggagatcggaaaccgtgacgctattctggagctgatcgtcgaggaaaagaatcccgaccggcgggaacaaatcatccggcagcggtttccggaagagtatgcctatatccgttcggtgatctacccgcagctgcgagctgtgaatttccgctacagcctgcgtcgcaaggggatggtcaaggacacgatccacaccacggaactcgatacggcctatgcccgcggcgtggagctgttgcagaaacgcaaatacgccaaagccttgtacattctcaacgactacaacgaccgtaataccgtcgtggcgcatctgtcgctggatcataacgagcgggcattggagctgttggccgcgatgcccaaggatgccgtgacggagtatctgcgggccatcgcctgctcgcggctgggacgcaaggccgagggccgggagcatttcctcgaagcatgccgcttggacgggcgtatggagtatcggggcaatctcgatccggagattgctgaactcttaaaacaatagtcatgcggatcggactggtggatgtggacgggcacaacttcccgaaccttgcgctgatgaaactttcggcatggcacaagtgccggggcgatacggtggagttcgccgatcccgcggtgaggcgttatgacaaggtctatatgtcgaaggtctttaccttttctcgggattgcaccgaccgttacgattgcgaggtcgtgcgtgccgggacgggttacagggactatgcgacgattcttcccgaagagatcgaacatatatgcccggattactcgctttatggggtcaaggaagcctatgggtttctgacgcgcggatgcgtgaaccgctgttcgtggtgcgtcgtgccccataaggaaggtgaagtccgggcacacgctgacatcgaagagtttctcgacgggcataagcatgctgtactgctcgacaacaatgtcttggcttcggagtggggacttatgcagatcgagaagatcgtccgcatgggcatccgggtagatttcaaccaaggactcgatgcccggcgtatcgcccgcacaccggagatcgctgcgctgcttgcacgggtcaaatggatacgttttctacgcatggcctacgatagccgtgccatgcaggatgacgttcataaagccatagaactcctccgtaagcacggcgttccggcccggaagctcttcttctatgtgctgataagggatgactccgaagatgcgctcggacgtatccgggagctgaaagcgttggggtgtcagcctttcgcgcagccgtaccgggatttcgaacacgaggggaaaccctcgcgggagcaatggcggctggcctactggtgcaaccgcaagccgctgttctactccgtggattatgaggaataccgaaaaaaacgaacttaacgattgaacttatgaacagactgaaaatcaaatatgccgtcgcgtacggctttcttgcagcaacggcggtcgcgcttatcgcatcgctatttgcaggctgccatgtctatgaacatgaagaggtggaaattatccgctgcccggtgatcgaagccgatacgatcgacattcccggctgggataaggaaatcacaacccccgaattttaaccgctgtcacgatgaaaaaactgttgatttggctcccgggcatgctttcgatgctcgcagcctgcaccgaagcggtagagataccggctcgggcgcccgaaaaacaatcgcccgtcagggtcgaactgcatctgacgaccgagcagcaggccgccacccgcgcaatggacgaaaattgcattcgggatgtaaatttatacctgtacggagatacagaatatcatttttatttcccctccgtttcctcgccgctggtgttcaacgtccttcccggcaattatcagagctatgcgattgcgaacgccgggcaggatctgggggataaaaatgcgttcgaaatccagttttacgaaacggcagtggacgtgatggagtcttcggacgctatcccgatgacggatcggggaacattggccgtcgatggcgctggccggtgtaccccctcatcgcttcgcgtaacgcgcagtgcggcgaagatcgcctataccatcgaggtcgccgacgccgtcgcaccgtcgctcagtcttcgctcggtgcagttctgcaatctgccgcggacgatacgtcccttcgattcgggcagtatttcttcgacggtcgaggcgaactactatgacggcgaggcgatgcctgtcggcaatgaacggagaaccgcgggtacagcgtatcttttcgagaacttgcagggctcggtagacacgatcaccgaccagaaggacaagtgccctgaaaatgctccgtcctgtgccacctacctgcggattctcgcggaacggagcacggacaaagcccttgtcgaatacatcgtttatccgggtgaaaataacacgtcggatttcaatgtccgccgaaacacgtggcataatctggagcttgttatcatgggcgaaaatgagatcgacaaccgggttctcgtctacgacggcctgtattacggaacggcgaactgccatatctgcaccggcgatcaggttacgttcgatgttaccccgtatcgcacgtcccgcagccgcaattacgcctatctgggaatcgaggcgggcgatgaatacgctccggcatccgccgggctgctgtggcaggacaacaagatcattacaggattcacgcttgcggacaaccgtcttacggtgcacacgaacggtcagcggggcaatgcgctcgtcgcggtgtacgatgccggcgggacgattctctggagctggcatatatggtgcctgcccaacgatcggccgcaggacgaccgatatacgaaccgggcgggcgaacagttccttgtcatggatcggaatctgggagccatcggtacggatttgaaaacccgctacggactggtctacacatgggggcgcaaagatccctttacgtcgaacgaggtctacaacgccgcaggacgtaaggatcggttcataaaccattggccgacaatctacacctcgaacggatccgaagccaaaacatacgatctgacctatatgacccggcacccgacgacgtatgtctatacggggtggtacgccaaactttatacctattacgacaatgccctttggggcgatcccgcgcctgtggacacttacggttgggcgagtgcgaaaagcgtgcatgacccctgccccgaagggtaccggctgccgagccgttatacatggacggctttcgagaattacgtttttcccggagaaccttatgtggtcggagcgttcgacaacggctattggttccagcgcttcaggggagatacgaaggggacgttttatcccgtaccggtcgggaacgacgatttttggctggatcgtgacggcgttgctgtcatgttgaccggggcggtatccgaaccgacatccgctacgccgtatccgaccgtctatttcaaattcgagatcaacagcgggtggacgaatttcgaaggcggaaaaggtaaagggctggtgcgttgtgtcagggaatagacattatttccgattctgtcttgtaaaatcctctgaaatttaccgttcatgtcccgaatcgcagattttttagaccgcctcatgaggcgcaagattccggcgagtgttttcgttacgatgaacccgcagatgcaggccgtgcgtatcgccgtccgagaaaacggacgtcagtctttcgaagattatatacgcgaacaggttgccgcctgctcccgttcatcggtcgttcccgaccacacgctgctgcatctgacctttcccgacagcaaagcgattccgtcgcgccgaagtacgacgaacgagtatttttacgggaagctggctccggcttttatccggcaggatatacaccccgaaccggccgtttcgctccgggatgcggctttcgcactctcgaaaggtctttcgcccctctctccggcagggcggcgggaacagctgatgcgcgatcccgaataccggagatttacgatgcattgtgcccgtacggcgcccgacgatgcaccgctctatcgggctgtaacctcttcgctgggaacttatctcttcagcgatacgcccaagggccggcgggccatgtactgctatatgcaatacatgacggatcgtttcttcggaatgcggactgatgcagatacgctgaaaatctatgaattgaaacatttgccgccccgaattgccgcgatggcggacaagtgtatcgacaaattcgtgaaaagcgacctgaaaagcgagtatccgggactggagagatcccgatacagttttaccgaggagaagtggattccgacatcggtactttcggaaggcgtatgttcggcagcatattccatatcgccgtgctacgaggacttcgagaggttcgttgccgggaaccggacacaggtatcgtcaggcaatcacgatctcgcaacgctgttgtatatcgcggaaaacgggtacgccgcatctgtggccgacgacgggttgcatcgtttcagacatcgggagttcttctccgaggtggcgtcgaaactccgggattgcgaccgggcgcgtatgggaaaccggcaatcgacgcacgacttcgggtacggtgccttgcagcagcaggcccgtgaaatcgcagcgggtattcttcgcacggaatacaacattcagaacgggagattcctgacggaatacaaagagtcatcgccggatgcaaaacagcatgtttccctgcccggaacgggcaccgtaaccaaaaggcgggaaacggaacgcaggctgcggcattcccgtcctgtcagcggcaaacgtgccgcaataaaaatataacggatatgcgggaagaccggatacgaagtatttacctgacgctcgactgaacgctgcatgccgtacgtttcgctgtcggaacgaacggcgaagagggtttcaggcatcacatctccgaagagttgaaaaagacgatacccggacgggcgctcgaaaacctgttctatctgcaatacgatctgcctccggaagcatccttccatgcgacgacggaagaagcgaagcggcccgatgaactatacatgcggaaattattgccggaattgactcgtctgaagttacagccccgtcatgtcgtggcgaatgacgaggtgtattatgcggcgatgaaaggcgtaatgctctttacaccggaagccgaaaagctgatgctgacggaggattacttttcggcacgacggcaaatccggctgtgtgcaccggatttgaaacgacggaatgaaacacgacggtatccgatgccggtgcttaaattatactaaatactaattcataaaacattcgacttatggaagtaaccatgatggaaaacgacgcctatttggaactgagaaggcgtctgtgcggcctgtcggttgccgtaacggaattgtatcgtaaggtagctccgcccacacgggagaaatgactcagcacgccggaagtatgcgaggcactgcatatctcgcagcgggctttgcagaattatcgcgatcggggaatcatcccgtattccacgataggttccaaattctattaccgggagaccgacatcgaacgcgtcatccgcgaagctctgatccgcagatagtatgtcggacattattacgaagcgatccgaagagttcaaggaactgacggattggatggtgcaaaccacgcgcgagatcgaaacggccataaaacatctgcgaccgacgatcggtcaggagcattatctgaccggagatgagatttgcagacgcttccatgtgtgcaaacggacgttgcagaccttgcgggatacgaaagcgattccctatacgacgctcggcgggaaaatcctctatcccgaatccggtatcttcgaggtgctgaagaaaaactaccgcgacttccggccctggaataagtaaacgaacggcgaccagactgatctggtcgccgttcgtttagggttaagcctctttggaaagcagccgggtcgtaggctgtgtgagttcatacagattgccgatgcgctgcgtaagaagacgtacgtcttccttcatcttgttggcggttaatttggcgtagatctgagtcgtcgtaatctgcttatgtccgagcatctccgaaacggtctcgatgggtacgcctttctccagcgtgaccgtcgttccgaacgtatgccgaccgatgtgcgtcgataggtttttggtaatgccgcatttttgggcaatacgttttatcgttgtacacatacttttccgatctttcacgggaaagacccgcgtttcgtcgattttacccggatatcctctatatcgttcgataagctcttgcgcaatgggcagcaacatgatgtgataaggcgtaccggtcttctgacggcgattatagatatattgttctcccgtcggagttgttacgatatgatcgtaagtcagattcttcagatctatataagccagtccggtgaaacaacagaaaataaacatatcccgcacggcccgctgccgatgataacgcaattctatattcataagccgttgtatttcttcgtcggacaggaacatgcggggcttataatccggagcacatttgaacgccagaaagggatgacggtctatacagccttgctcaacggctacatataaaacacatttcaacgtctgggtgcgtttgaaagccgttgtcttgccgcaatgtccgtctgagagcatccatgcgtaatatctttcgatgaacgtaacatccaactccttcaaagtcacatcttccagttttttcagaaccagataccgcaccaggcaacggcgttcttccatcagcctatcgtaagtacgttgcgctctgtcacgtccgattctcgcttttatagaatcggcatggtagtcgaaagctgcgataagcgttttatatcggtcgccgaaaccatggtaagcattcttgaccttattggccgtgacatacgcatcacggtcgcagatcgactgataatgtttggtgatttgagccttgatgttttcaagcatctggtgaatttcgcgcgaaagcgtatttcgttgcgatttcagataattggttttctcatcccatagcgccgggtcgatattcaacttgcaactgaaaccggcttgcgtgccattgaccgtgatgcggcccatgaccggaactttcccgtctttcgagattttatcctttttcagataaaacagaactttgaacgtacttttcataactcaacaatttttaatgtgacaaaggtatcggttgttgagttctcaagaattacgtatatttgcgcaagaaattgtaattcagtcgcatatatgctattgtaaagcaattcgacggggttacgatttggtaacgaaactcccgtcgaattctactttttcaggctcttctgcctgaaattcgtgcaaaagacagattttatatatcttgattatctgcgttttacactttttacctccccgttcttaaaaaacactcatcctttccaggaggttcccttttttacggtgcatttcttttgccctgaaatgttccttgtgatgaatattttactaaatttgcggttgggattgagaattttattacgctaatacacttgcactatgcctctggaaaaactaaatgcggcactgatcggtgctatacaaaatagtaccccggaatataccaatgcggcggccattctgacggacaagctcaatatcggccgcgaggcggcttaccgccggctgcgcggcgaagtgcctttcaccttcggggaggcgggcgtactttcggcgcagatgaatttttcgctcgaccgcacggtcggggccttggatttcgggaatgtgcttttccggctgagtttcagtgattaccatacggcgctcgaagattacacgggggttatcgaccaggatacccttttctaccgtgaggtttcctccgacgtcgatgccgaacaggccatcgccggaaattcgtttccgcggatgctttacatgcgttatccgaaactgaccaatttcaaacttttcaaatggctctaccagcaggggctcatcgactgttcgggggctaaattcgaggatatgaaagtgccggaggtgcttttgcagagctaccgcgacctggtgcacgaagcgcagctgatgcctgccacgaccctgatattcgacggcagttgtaccaaacgctgggtcaacgccatctgcgcattccgcaacatgcatctgattagggacgaaagcgtcgaagtgctgaaagccgagttgttgcaaatgctcgacgacctggaagagatttgtgtttccgggcagttccgcagcgggcggcctgtgtcggtctttatttcggatatggatatcgaggcgacttactgctacctttcggcacggcattaccgggcgagttgcctcgaggcgttctcgatcaactcgctgcgcagctccgatccggacatgttcgagcacaccaaacgctgggtgctggccctgagccggtttgcgacattgatatcgtgcagcggggagttgcagcggattcatttcttcaagcggcagcgagctgtcgtggcagaattggaaagggagggcttagaaccctcccccgaagtcttccaggaataaacggaaccttgcgtctagttccttggtgtctatcctgtgcttcaaatcctgacggattttccacttgcgtcacttttgcgggtgtagcccgccccttgcacaatcccacttgaattcttcatatctcctgtgcaatacaaaagtagggtaaggcttcgggtaaaacaagacggaaaacgggtgtgcgtgcagattgattgtctgtttttgatgcctggttttgagtacggctcggattttgaaattaaaatttcaggtgtgggtgataatgctgatatccgacggaagcgtggtttgtttgtttcgcattgcgaaacaggctgttcgggggggggaggagcgtggaggaagaatgaaaaaagcgaggagacttcctcgctttttcagttgagctacctggattcgaaccaagaataacaggaccagaatctgttgtgttaccattacaccatagctcaatgacgttttggtgatgcaaaagtagaactttatttttcaattgcaaagaaaattcacaaaaaaaattagtacatttgttttaatcattttccgaccgaatgaacttgtaaataaaaacaacctaaaatcagagaattatgggaattaaattccgccttatcgtcatgaacttcctccagtatgccatctggggttcgtggctcatctcgctgggcgcctaccttggcggtggcctcgacttcacagggctgcaaatcggaagtttctttgccacgatgggcgttgcgtcgttgttcatgcccgcagtgatgggtatcattgccgaccggtggatcccggcgcagaagctgctcggcatctgccatctggtgagcggcgggttcctgattgccgcggcttcgcaaacggcctatgggcctttatacagttgtatgctgctgagcgtgatgttctacatgccgaccatcgccctgtcgaattcggtggcatacaatgccctcgacctggcaaggctcgataccgtgaaacattttcccccgatccgcgtgtggggtaccgtaggtttcatcgccgcgatgtggttcgtcgacctgacgcatatcggcggcgtgcagatcaagctgaccgagtggcagctctatgtttcggcggtgctgtcgttcctgctggctgtctactcgttctcgctgcccggctgccccgtcgaccgcaatgtcaaggccaggtcgtgggtcgataccttggggctgcgtgcgttcacgctcttcaaggagaagcgcatggccattttcttcgttttctcgatgttgctcggcgccgcgttgcagataaccaacgccttcggggactcctatatacagagcttcggctcgatgccccagtatgccgattcggcgatcgtgaaacactcggtgatcctgctttcgctgtcgcagatgtccgagacgttatgcatcctgctgatcccgttcttcctgcggcgcttcgggatcaagaaagtgatgctcatctcgatgctggcatgggtgctccgcttcgggttcttcggcgtcggcaacccgggctcgggtgctgcgttcctcatcctttcgatggtcgtctacggcgtggcattcgattttttcaatatctcgggttcgctgttcgtcgagaaggagaccagccgcgagatccgctcctcggcacagggcgttttcatgattatgaccaacggcttcggtgcgttcttcggttcgtatgccgccggtgccgtcgtcgatgcatggggctggcccgattcgtggtatatcttcgccggctatgccctcgtggtggccgtggtcttcgcgttcgtgttcaaatacaagcacaaccccgaagagatggtctcggtgaaccattaatataagtatggttccggcggcgcggggaaacctctcgccgccggaatttttttacccgggtgccgggctacgggcggagcattttgacgtgcgggatacctgcttcgaaataggtgtccgagaccggtgcgaacccgagggtggcgtaaaatccggccaggtgctcctgtgccgagatgcggatgggctgcgggccccatgtccgggcaatatagcgcagcgcttcggacatcaggctgcggcacagcccgcggcggcggtatgcagcatcgaccagcacgcggccgaccgaggcttcggcgtaggcgatccccgccgggatgatccgcaggaaggccactacgcggccgccgtcctccatccacatgaatacgctctgcgggtcaatggcgtcggcatcgggttccgtgatgtgctgttcgaggaagaagacggcctcgcgtgcctgcacgatacggtggtattcccgggtggagagttcgctgaaatgttttgtgaggacaggatacatggcggtttgtaattgatgacaaaggtacttaaaatttcggaagatatggatacgatccgtgtggatggttcgagctgcatccgttgcggccgctgtgtgaaggtgtgcccttcgcagattttcgtacaggagaaggcgggcggccccgtggcgctctcgaaacccgagaactgcatcgtctgcgggcactgcgtcgcggcctgcccgacggggtctgtggcacatgcggaattcccgcccgccaaggtgcatccggtcgactatgcggccatgcccacacctgctcaggtcgaactgctgatggctgcgcggcgttcgaaccgggcgctctcgcagcgccccgtgccgcaggagatgctcgatcggatcgttgcggccgccgacctcgctccgacggccaccaacgcccggcagttgggctatacgctcgtgaccgaccctgtgctgctgcgccgtatgagcgaatatacgctcggcgtgttcggcaaactcgcggatcgcctttcccacccgctcgtgcgcccgtggctgagccgtttgttgcccgacgtctaccgctatgtccccgttttccggaaaatgcgccgcgaatatgccgggggcaacgaccgcatcctgaggggtgcgacggccgtgttgctgatccatgcgccgaaggagagccgtttcggcaccgaagatgccaacctcgcctaccagaacgcttcgctgatggccgaagcgctcggggtgagccagatatatatgggcttcgtgctgaccgccgtgcggcaggataagaaaaaggggctctgcaaaatgctggggctcgccggccgccgtatctgtgccgtcatggcgctcgggatgccgcagttccgctacccgaattatatcgaccgcacgccttcccctttggaacggagataggcttgcggggcttcccggagctgtgcccgggatatttcagttgcttttttcgagtttttttgcggttcgcgtcatctgtccgctccacccggttgtcgccgggatacaaggagaagtggcctctgctgtgcaggggccgcttctcctttgcggctcggtgtcagttgcccgaaaggccccactcccccggggagtagctgcttttcggagcgttcggcacgttgacgaagaattcgaacccgcatttggcttcgatctccgtcacgggtaccgcacaaccgtccggtgtctgggtcttgtctgtggtttgttcataccagaatccgatgcattgcagttcgtcggccgcaagggtggttacggattgtccggtggtgccctgcttggtgcgcagcaataccttgtaataatgcgtcggtacggggcatgggttaccgccgttgtcggtcgtcgtaccctctgtcccatcgaaataacatcccgttaccacatagagcgtatcgtcgcacatccatccgcggactctggtttccagggtgccccatgcaccgctgttgaatgtagcgagctggggcgtcatattcgaatagtaggaaatctgcttgttcgccaggttgctcactttccggtcggcgttggggacttggtgtcccttgttgtaaggtgctcccacgccgcccaccatctgctcggtctttcccagcgacaggtcggccgagtaggccctttctttcgaagcgttcggggccgtgtaataggcgtgcagcggatatgccgcccacagggccgcctttttcgccttgtcataacccattgcgaaattgcgcgggtaggaaccgttacccgtcgccgccacgtcggtgatgtagtggcatatctcggtcaccgaagtgttcgctgcgggcagttccgcccacgattttcccaatgccgctgttcctgttcccggggtagggtctggggaaggatcgcctccttccccgcccggagttcaattcgccggttgccaggttatgtcgcctatcgtcgttctgttctgattattttgttttatggtaatagtggcgtcataaccttgacagtcgattgtcggtatttcgaatgcgcttttactgtttcccggaatagtgatacttgctaccgtggcaccattggctgttatggtgactgttgccgaacccttgcttgaggtcaacgcattgaatttaagggctgtaatgcctcctgggatcgttacggatattgagccgtttttaccgatggctgcatatttgtcgtttattaccacgactccggcattggcaagcgccgttttgtctgtgttggcctgattaggattaccacagccactataactccattgcggggttccagtggttactccgttgaatgtgccgctggaaccataactggtagtgctgggcacggtgtaattttcgaaagtctcggtttcccacattacagcccccggttttgtctgggtgacgcttacggtttgcgcttcggcgccttcatacgataatgtgatggtgccggaacgttcctcgccctgatttgcgtctattgtgaaagaaacgccgtcgacgttgtaaacgaatgaattgagccaggaaacgtctgacgatgcgacgaccgacaccccgtttgtgggattttcaaccgtgtagttgatggttttgatagtgctttccgcaggaacggataaggtcgtttccgatgtgattttcagtaccggcggcagagtgatgtcatggccgggaacgatctgtatgctttcgataattattctttcttttgcggcggagggctcgatcctgattttcgttttcgaattttgtgcgtcgaatttcagcaggtaggttttgaactcctcggtcaggtctgcggtcgtgattgccgcggattctccggcggttactttgattccggaagtatctttcggccagactttggccgaaatcagtactgagaacggtgcggagagatccagttcgctggtgacgatatacccggagttgtcgctcgaactcatgcgtaggccatgcggggagttgtattgataaacataggagttcgccgcggaatacaggtcgtttccgtttttgtctttgcgggacaggatatttgctgcggatccgttccctgtcaggtcactgaaatcgtcggtaaacggcaggctcagaccggttgccgcggctgtgatgtgttcgtctgaaagattgacattcaaagtggtgatctttcctgtttccagattgatttcattggataggacaatctcttttttgatgacaaacccttctgtcgctgcttcgacgaccagtttcgatcccgcagccaacaatcgcggatacacgcttaaataggtgccgctgacaccgttgataacgtattccgtatttgtcgtataggtcgccgttacggtgttggagccgttataatagggtgcatacatcgtgtagttcaagaggtctacaacaacccggcctgccagtgtgttgtcgccatcggtcgtaatggacagtgacgatacgtgctggttggccaatttggtgtctgtagactggtctttgagtacgactttgacaatggcactcaaccgcctgaattccagattggcgacttgctgtccctcggaatcgagtgtaagcggtttgctgaccaggatgtcggctttgccgtcgaacgagttggctgtcggggtttggtttgccggcagatcgacctttgcgcccgtattatcgcctactttgtcgattccgttggccgtgaatggataataagcgtaaatcgttgatgaaatgttcgcgttaccggaaaaagtcgttgttgcggcgcgctccgtcgcatcgttcgtgaaggggtagttggacttcgtcccgtcggtactgatgccgatctgatcgccgacagaccaataaggggtcaatccgtcgatctcggtgcggacttccggtttgagctcagggttcccggccgtaaaagtcatcttgacgagtttgccggaagaggtgtcgatgccgttgtcttccttttggcaggctgtggctgttacagcggtgagagctgcaaacagtgtgattttagagagacttttcatagggctgcggtattagagttcgtgttcgcttcccgatccgatacctcctgcaccgccgccgctgccccaatcgtcataggcgtcgggtggtgtgggcgatgttgcaaaccccttttcagtcacgatgtcgatcgtctcaattacgggcggaagataggtcggatttcccccccccttgctggtggacagaatgtaattcataaggctaaattttttggttaaaaacactctcgtaccaaatatagcaaaatataatctcttcccgtttaaaaaactgtgaaattccgctttccggtcaaaatatatacacaaacgtctgttcgtttgccgattttgcccgtttgggatactgcaaccggtaccgacgacgggaaacggcgtccgtgccgcattgtgcagcggcaatgcggatcgtccgggatggaagagggcgggggataagccggggtggggatttagtacatattgtcgtacatcgactggctcttgtcgtatttgaggtctgagagtgatgccgcctttacgccgatgttgaagctccaactgcggtggaacccgaagggtatccacgagaacgacatctgccagcagtgcaggtcgcgcgagatggagatcgacgaggtggtgagtttgttcgccttgatgtcgtaaccgccctggaaggtgatgccggtcttgggcgttatggtaaggctgccgttgaagctgacggtctgcgtgacgttcttcttgtaacctttgggcgggtagttgcctgtcgatatgttgtagttgatggcatagttgaacccgaagttccacggcagcgagaaatcgtagtacatctgcgacatgtattgccgccgcagtacgggatccatgttgccgtaggggtcgtagtaggggttcatgtattcgggcggaatgctcgtaatgtcgttgatggccgattgcgagcggtcgtcgcgcgatttgaacgtataaccgaacgaccagcccgtcgagacgatacgccccgggaagaagagcttgttgtagcgcttgccgtcgggtgtcagccggtaggggtcgagcgtcatcgagaggttgatgccgaaattctggaagagcgtcgtacggaacgagatcgggatggtcgagagcctcatcgagtcggccaggaaattgtacgacccgctgatgcgcagctcgtcgatcagcttgatcttcttcacgcccgaggtgtcgcgtttcgacagcaccttcatttcgaggttctgcgacaacgagaagttcatcgacatcgaccgtccggaactgggtacgccgtatgcgttgaccgaatagggcgaataggtggtgaagcgtcccgtcgagtcggtctgccgggtttggtagtagccgtatttcgggtcgccgaagtccggcgtgtaggagaatccgatcgagggggtgagcgtgtggcggatggcctgtatcttgcggtctttgcgctttttggtgaagtcgtacatgccgtatacggtcgttgatgccgagacgttgaagttgtagttgtagaggcggtaaaacccgtattgcgtcggcagcgtgtcgaccttgttcgtgacggggttccagtcgaattcgacttttttgaagtaccacttttcgttgtatgtcgccgacggcgagatgttgatgtagttgaacaggttgaacgacgccgagacgggaatgttatgctcgatgccgttcttcatgttgtcgaacgtctccttcgagaagatcttgtcctcggtcgtggtcaccgagttggtcatcttgcccgtatactgcatcgagatcttttcgtaccaccgctccttgcccatgcgttccttgcgtttgaaggggtagaaacgcgagacgttgaagaccacggtcggcagcgttaccgagaggctcttgttctgcgagttctgcgagatggacatgttcgccgagagcgagaagggtgtgcccgcccagttcttcgagtaggcgatcgacgagttggtctgcgtcgagaggatgtcgttgaggttggtcgccgaatatttgctgtaaccgctcgtggcgaagttcaccgatgccgagaaggtcgacccggggttggccttgggatcctgggagtgcgtccactggatgcggaagttgctctgcttgatatagtccggttcgcctttttcgcccgtcttgatgttcgagtactgcatgttgaaactgccgctgtacttgtaacgtttgatgtagcgtgatgcggccgatgcctcccacgaaccgagcgtgtagaacccgccgcgcacggccacgtcggcgtagtcgcccagcgtgaaatagtaacccatgtcgcgcaggaagaaccccttggtgtattcctcgccataggtgggcatcagcagacccgattttggccccatgttgatcgggaagaaaccctcggggatgccgaggaagtagatcggcacgtcctccatgacgaggtaagccggccccgtgacgactttcttgccggggatgaccttggctttggtcatcgccaggtagaagtgtgggtggtcggtctcgtcgcaggtcgtgtatttgccgttttcgatgttgactgtgttgtcgggcatcttcttcacgctcccgccgaccagccagccgtcgccctgctgcgttgccacgcccttgatcttggcctttttcgaggtgaggttgtaggtgatcgtatccatcgtgtacgaagcgtcgccctcggagaattcgggcttggtgacgatcggtttgccttcgagcgaatcgggcttgccgtatgcatagaccatcttgttgtccatgttgatctgcatgtagtcggccttaaggttgctgttctgataggtgatgtcgccttcgttgtagatatagaccatcttgttgcgcacgtcgtagaccagcgaatccttgttcttgcccgagatcgggtcgtcgaggaacgcccccggtttctggggctttttctctttcaccgtgtcgcgggcgatggtgtccgctccgcggccttcgagcgagtcgcctttctgcgtgatgagcgaatcgagctgtgcgccgaagagcgaatcgcgctgctcctgcggcagggcttcgaatgcggcgcggcgacgtgcctgttcccgggcagcgcgtgcctgctcgcggcggtcgcggcggctttgggtcgcaacttccggcacttcggccgcggcttcggaatggatccggagggaatcggacaggcgttggcggaggctgtcttcggctgccgaggcaagcattccccggggtacggacgagccgaacaccaactgggcgaagaggaggagtgccgccgccgaaaacagatattttaccctgattctatccaaaatcccaataatttttcgtacctttgccgacatgtcggcaaaaacgcctggatcggggcctcgatgcactcccgccgggttttttaggcgcgacaaagataggtaaaaaattacagaaagctcacatttggctccattaaatatgcgcacacgactgttcctgttattcgcgtttgcggccgttaccgttctaatgaacggtgccacggccgggaatattgcgcacggggtcgaagttgtggtcgtcgatgccggacacggcgggaaattccccggggcgcactacggcaatgtctacgagaaagacctcacgctgaaggtggcgctcaaactcgggaagctcatcgaggaggggatgccgggtgtgaaggtggtctatacccgcaagacggacaaggcgctgggcaccgatctggcaaccgacctccaggcgcgtgccgacatcgccaacaaggccggcggcgacctcttcgtttcgatccacgtcaatgctgcgaaatcctcggcggcacggggtgtcgagacgctcatcatgggtgaaagccccaaggagcagcgttacaatgagaacgccctgttcgagaacaaccgcgaagacctgatcgacatgtcggacgagcggacggcggccatcgtgcgggcctatatccagaacctgcaattcacctacggcgagtacagcatggcgctggcgcgctgtattcagaataattacctgaaggccgggcgccattcgcggggcatcaagccccagctgctgcgcgtgctctatgccaccgacatgccgggcgtgctgaccgagatcggtttcatgtccaacgcccaggagatggcctatatgaaatcggaaaaggggcaggacgagatcgcccgctcgatttacgaaggcgtgagggattattcggcctatgtgctcgaaacgcgccgcgccgaagaggaggccgcagcagccccgaagcccggtaaagagcccgaaacgcaggtcgtcatcgggaaggagcccgtgcgccctgcgaagcaggacaaggcatccgatgcgcctgccgcgaaggccgccaccccggaaaaaggggagccggagaaggctgcgggcaagtccggggcgcagaaaccggccaaggccggggatgcccccaaacaagccgcccggccgctgcgttataccgtgcaggtgctggctagcgcgcagaccgtgccgacctcgtccgcacgtttcaaatcctaccgcaacaaagtgaaacagtataccgccgaggggcggttccgttataaatattgcgtcggcgagtacgatacccgtgccgccgcccagaaacggctggccgaagtgcgcaaggttttccccgacgccttcgtcgtgagctgccggggtacgcaaattgtgaaataaaaacaagcgaaatatgaaaagggaagttaagatcggaatattcgccgtggcgatgatcggcgttgcctgggccggaatccggtttctgaaaggtttcgacattttcagccggaacgtcgagtattatgccgcctacgaccagatcaacggcatgcagaacgcgtcgccgatcatgatgaagggtgtgaagatcggctccgtgacacggctttcgttcgaccccgcgcgcagcgacaaggtcgtgttgcagttcaccatcaagcgccagtaccgcattccgaccgattccgaggccaagatcttcagcaacggactgatgggcgccaaggcgatcgaaatcacctacggcacggccgacacctacctccagaagggcgatacgctgcgttcgagccgcgaccgcgacctgatggacatggccggctccgagctggatttcttcaagcagaaggtttcgcagctcaccaccgacctttcgcgcacgctcgaaaacctgaacggcctgatggaaaccaatgcggacaacatcgccgggacgctcggcaacctgaactccgtgacgggcgacatggccgagatactctcggcggagaaaaacagcctgaagagcgcactggacaacctttcgaaattctccgacatgctcggcgagaatgccgggcgcgtggacagcatcatcggcgacgtggatcgtttcacctcgcagctcaccgaggaacagtttgcccgcaagctttcgcaggccgtggagcacctcgacggtctcgtggcacgcatcgcgcagggcgaaggcacgatcggcaagctcatcagcgaccccgaactgtacgattcgctcgaaaaggccagcgacaacctcgcggcgctgctggccgatgtcaaacaataccccggccgttacgtccacctctcgctcttcgggcgcaaccccgaaaagatgaaggagcgtgccgacaggaaggccgccaaggctgctgccaaggctgagcgcgattcgctcaagcggctgcagtagcccatcaacccgacatagaaatgatttatcctgcaaacttcgagcagaagatcggcttcgaccggcttcgggaacaggttgcagcgctttgcaccatgcgtgccgcccgcgggaagctcgccgaagagactttctcggcctcggcgcgcgagatcgggcggaggctggaacttgccgaccagatgcgcctgctgctcgacatggagcacgattttcccggcggggaatatcccgacgtcgaccatgtcgttgccaaactgcgtgtcgaagggacgttcctcgacgtgggggaggtggtgaccctgcaccgggcgctgagcctcgttggcagcgtcgttgcgttcatcctcgcccgcgaagggcaatatccggcgctgtatgcccgcagccgcggcgtcgaggcattccccgggatcgtgcagcggatcgacgccatcgtcgatcgtttcggcaatatccgggacaatgcttcgccggccctgctggagatccggcgtgccatccgcgaacgcgaagggcaggccgccaagcggttgcaggcggtgctcgccgccgccaagggggccggtatcgtcgatgccgacgcccagatctcgatccgcgaagggaaggccgtgatcccggtcgccgcggccaacaaacgcaagctgcagggcttcatccacgacgaatcggccacggggcgtacgttctacgtcgaaccggtcgaggtcgtggagatcaacaacgagctgcgcgaactggaatatgccgagcggcgcgagatcgtccgcatcctctcggagttcaccgattcggtgcgccccgatgccgggctgatcgccgcgtcgggcgactacctggccgagatcgacatgctgcgtgccaagggacgctgggcatcgcagaacggctgcgtgaaaccgatcatttcggacgacgaccggctggtgctgaagaatgcccgccacccgctcctgcagcaaaccctgcgggcgcaggggcgcgaggtcgtaccgctcgacatgcagctcgaccgccgcaagcatatccttgtcatttcggggcccaatgcaggtggcaagtcggtctgcctcaagaccaccggcctcgtgcagtacatgttccagtgcgggttccccgttccggcatcggaggtgtcggaactgcccgtgttccgttcgatcttcatcgacatcggcgacgagcagtcgatcgacgacgacctgtcgacctactcgtcgcacctgctcaacatgaagaacatgctcgcgggggcttcgtcgtcgacgctggtgctgatcgacgagttcgggtcgggtaccgagccggtcatcggcggcgccatcgccgaggccatcctcgaacgcctgctgaccaaagggtgctacggcgtcatcacgacccactatgccaatatcaaatactatgcgtcgaataccgagggcatcgccaacggtgccatgatgttcgacgtgcagaatatccgcccgctgttccgcctcgaaacgggcaagccgggcagttcgttcgccgtggagatcgcccgcaagatcgggctcccggaggatattatccgcgcggcgggcgagaaggccggcagcgaccatatcaacatcgagaagcagctgcgcgagatcgcccgcgacaagcattactgggaacagaagcgcgaccgcatccgccagaccgaccgtaaggtcgaggagctggagcagacctatgccgggcagctgtcgaagatcagggccgagcggcaggagatactcaaaaaggccaagctggaggcgcagcagttgatcgccgatgccaaccggcagatcgagaatacgatcaggacgatccgcgaggcgcaggccgaaaaggagctgacgcgccttgcgcgccgcgaactggacgatttccgcgacgcggtgacgaagaccgatacggcggacaaggatgccgaggtcgcccgcgagatcgaacgtatcgaacgccgccgtcagcggcgtgaagaacgcaaggcgcagcggggcgaggcgcaggcggcgggggctgcccctgccgaagctccgaaaccgcgcgaggtggaggccgggtcgaaagtccgcatggccggacaggatatggtcggcgtggtgcagtcggtcaaggggcgcaaggcgcaggtcgccttcggccagatactgactacggtcgaccggaagatgctgaccgtggtttcgaacagcgagttccgcgaggcgacacgcccgcagacggcgcggacggtggtgtcggccggcatttcggcccgcaagctcagcttcaaagaccatatcgacgtgcggggcatgcgtgccgccgaggcgctggacgccgtgcaggatttcatcgacgacgccctgatggtgggcgtggggtcggtgtcgatcctccacggcaagggcacgggggctctcaaggaggagatacgccgctacctgcgcacggtgcccgaggtcgaaagcgcccgcgacgagcatgccgaccggggcggggcgggaattacgatcgtgacatttgacctttcgtgaggacggctgcctccggcgcttccgctcgcggcagccgcatactccgcgtatgttcctgccccgtcggtttcgtgaagccccggatgccatccgcccggcgaaaaacggataagatacaggatgaactacaaactctcggaaatagccgccgttgtcggcgggaaatttacaggctgcgatgccgaagtgcggtcggttgtcacagacagccgttcgctgtcgtgcgaactgggctgctgcccgatgttcgtggccatgcgcggtgccaatcacgactcgcacgactttgtcgctcagatgttggcgcgtggtgtgcgtgcgttcctcgtcgaacgggatgtcgagtgccccgccggttgcggcttcgtgcgtgtggacaacgccatcgacgccctgcaacgccttgcggcgcactaccgtgcgcaattcaggggtacggtcgtcggcatcaccggttcgaacggcaagaccgtcatcaaggagtggatcgccgaagaactgcccgcggggatgaaatattaccgttcgccgaaaagctacaattcgcagctgggcgtgcccctctcggtgctgatgctcgaaggcgacgaggagctggcggtcttcgaggcgggcatttcgaagcccggagagatggagcggctggagcgcatcatccgtcccgacgtggttgtttttacctcgatcggcgacgcgcatcaggagaatttcctcaatctcgagcagaagtgcgacgagaagatggtgctggcccgcaatgcttcgaaaatcgtctaccacagctattacgaaccactgggtggcatggtcgcggcgcgtttcgccgaccgcaaacccttcgatgccgcggcattccccgaggtgcccgaatcggtcatcggcaacgccgcgtcgcgccgcaatgcccagatcgtcgaggcgttctgcgccgcgatgcactatcccgcgccgtcgttcgcctcggcgcctacgttgcccatgcgcctcgaggtaaaggagggcatcaacgattcgatcctgattaacgacgcttataatctcgacctcaattcgctggcgctggcgctcgattacctgcacggcgtggcgctgaaccgccgccgtacgctcgtcctgtcggacatctcgcagagcgggctttccgacggcgagctctacggccgtgtcgcggagatggtcgcacgtgccggcgtcgacttcctgattggcatcggcccgcgcctgaaacgccatgccgggctgttcggctgcgacaaggagttttacgcctcgaccgacgagtgcatcgcgcgcatcgaccgcagggccgtggccgggcgtgccatcctgctgaaaggcgcccgcgatttccgcttcgagaaactggcgcacgccctcgcgcgccgcagccatacgacggtgctggaggtcgacctcgacgccatgacgcgcaacctcaatttcttccgttcgaagctcagcttcggtacgaagctcgtggcgatggtcaaggccggttcgtacggtgccggcgatttcgaagtcgcgcagctcttgcagcaccagggcgtcgattacctggccgtggcgttcgccgacgagggggtgctgttgcgcgagcggggcatttcgatgcccgtcgtggtgctcaacgccgatgccgacagtttcgaccagatgatcgccaaccgcctcgaacccgagatatacagccttcattcgctccgagcctttgccggggccgtgcttcatgcgggcgagagccgttatccgatccatatcaagctcgacacggggatgcatcggttgggcttcatggacgacgaagtcggggcgctgtgcagggcgctggcggaaaccccgcaggtcaaggtcgcctcggtcttctcgcacctcaattgtgccgacatgcccgaagaggatgcctatacccgggcgcagatcgccctgttcgaccgcatgagcgcccgcgtagccgcctcgctgccctacccggttatccgccatacggccaattcggccgccatcgaacgcttccccgaggcgcagttcgacatgtgccgccttgggctggggctttacggcttcggctaccggcataacgggatgctgcgtcccgtctcgaccctccgcacgcgtatcgtgcaggtcaagcacctgcccgcaggcgaggccgtagggtatggacgggccggaaaactcacgcgcgaaactacgacggcgacgatccccgtcggatatgccgacgggctcgaccgccacctgggctgcggccgctggtcggtgctggtggccgggagtcccgcccccatcgtcggacgcatctgcatggacagctgcatggtcgacattacggggattcccggcgtgaaggaaggcgacgaagtcgtggtcttctcgcccgagccgggcaacgacctggaaacgatggcccgcgtgctcgatacgatcccctatgagatcatgacctcggtttcggggcgcgtaaaacggatttacctcaaagaataacgttatgaaatgctatgattgcggcggtgaaatcacttccggaaccgaaaagtgtccctcctgcggttgccccgccgggcgcgatgaggccgccgagtgcctcggggcgcggctgctgacggcacagctcgaatccgaatctgccctcgaccagttgggcaaggcccgcagcgccatgttcgccgcggcattgctggccctcgccagcggcgtggtcgaactggtcaacgcccagggaaacggggtgaggctggtggtcggaatcgtgatgctcgtgctggcgggcggctatgtggctatcggctgcaatgtccgcaaatccccgctggtgctttcggttgcggggctggtcgtgagcgcattcttcctgagcggtgttttcggggtggtgatcgccggtgtcatggcgctgagcgtctggtttgctgtgctgtatacgaaggccgccggccgggaacgggaactccgggccaaactcgaaaaactgaaataagatgtacggaacgctctatctgatcccgtgtccgatttcggacgagacggcaccgtgggacgtgctgcccgcggcgaaccgtgccgtgatggattcgctcgactatttcatcgtcgagaacacccgttcggcgcggcgcttcctgtcgaaggccggcatcgcgcggccgatcgacacgctggagttccgcgagctgaacgaacataccgtcgccgggcgtgaggtcgaagagctggtgaaaccgctcgttgagggccgctcggcgggggttgtctcggaagcgggcgtgccgggcgtcgccgatcccggggcactggtcgtcgaggcgtgccaccgccacggtatccgcgtggtgccgcttgtcgggccgtcgtccgtcatcctggccgtcatggcctcggggctcaacgggcagtcgttcgccttcaacggctacctgcccgtcaagccgcccgaacgggtgcaggcgatccgccgcttcgaacgccgtgcgcagtccgaacgccagtcgcagctcttcatcgaggcgccttaccgcaatgtgaagctgatggaacagctcctgcaaacccttgcccccgagacgcgcctgacgctggcgatggacattaccgctcccggcgaatatatccgtacgctcgccgtgcgcgagtggcggtcggtgcggctgccggaaatgaacaggcacccggcgatttttatcatcgggtaggcatggcccggcggttggtatacaatttgttcgaatataagacggaaaatctgaaaaacacgagatatgaaaaaggaaaaaacttataatgaggctgttgacggtgacgaaggattcgttcccggtgaaggttacccttcgtgcgacggcgaaccctgtgccaatgtgtcagacgactcgcaggacgggactgacacaatggcagacgctgccgaaggcggcgacaaggccggagcgggatcggatctgacggcggcgctggccgagtggcaggataaattcatccgcctgcaggccgaattcgataattaccgcaagcgtacgctcaaggagaagatggacttggtgcagaccgggggccgtgacgtgctgctggcgatgctccccgtgcgcgacgacgtgcagcgtgccgtcgatgccatgcagaagagcgacgacatcgaggcgctgcgtgccggcgtgacgcttatttcacagaaatttaccgatacgctccgtcagaaaggggtcaccgagatcgacgtcaagggcagggagttcgacgccgacctctgcgaggcggtggctaaattcgctgccggagaggaaatgcagggtaaggtcgtcgacattgtccagacgggttatatgctgggcgataaggtgctgcgtttcgcaaaagttgttgtaggagaataatgccatggcagaaaagagggattactacgaagtgctgggcgtccagaaaaacgctaacgctgacgaaataaagaaggcttaccgcaaggcggccatccagtaccaccccgataaaaacccgggtgacaaggaggccgaagagaaattcaaggaggcggccgaggcatacgatgtgctgtcgaaccccgacaaacgtgcccgttacgatcagttcggccatgccgggatgagcggcgccgcgggtggcggggcaggcggcttcggcggcttcagcggcggcggtttctcgatggaggatatcttctcgcagttcggcgatattttcggcggacatttcggtggcgggttccgctcgtcgtcgtcatcgggcggcgggcggcgcgtgaaccggggatcggatatccgcatcaaggtcaggctgaccctcgcagagatcgccaacggcgtcaccaagaaactcaagataaacaagaccatcgcctgcgataagtgcggcggtacgggggccaaggacagcaactcctactcgacctgttcgacctgcaacggtacgggttatgtgacgcgtgtggagaacaccttcttcggccgtatgcagacgcagggcgtctgccccacgtgcggcggtacgggcaaagtcatcaccgcaccctgcgacaagtgcaagggcgagggaaccctccgcggtcaggaggtcgtggagatccgaatcccggccggcgtgggcgagggtatggtgctcaccgtcacgggcaagggcaatgccgcccgtcacggaggcgtcaacggcgacctgcaggtcatgatcgaagaggagtccaatcccgagctggtgcgtgacggcaacgacctgatccacaacctcaatatcaccgttacgacagccctgctgggcggtacggtcgaggtgccgacggtcgatggccgtgccaagatcaagatcgccccgggaacgcatgccggcaaggtgctgcgcctgggcggcaaggggttgcccgacgtcaacggctatggccgcggcgacgaactggtcgtggtcgacatcacgatcccctcgaagctcagtgccgaggagaagcggctggtcgaacaactggcgcagcagcccggtttccagcatgccgaatcggtcaagaaccagaatatcttcgagcggatgaagagtttcttccggtaggggaagcagcggtttgcctatgcggcgggatgtcgggggactttgcggtcacggcattccgccgccgttcgcagcgcctcttccgctgcggtgcacggaggtttgcgggcgtattccccgccgggcttttcccggagcgcggctattgtcggcctgtctgaggagtgcttccccttccgcaccgcttgctccccccccctctctccctgctgcggggcatcggacgtctggcgccgcatcctcggcaggactttacgggcgccgcaggcggaaaaaagggttttgcaggcaataaaattgccggagaattcgtatctttaccaaaaataattaggaggacacgccatgttaggtttcaccccgttcaagagacacgccaacaagttcaactacataccgcgctactacgatcccgaaaaggaggcgcgcgagcagcgccgtgccgaacttcgcggcgaaagggccgaagacggggatcgtgagtaccgtcccggacaatatatccgtacgcagcgcgatgcccgtgccgcccgccgttccaaggaggatgacaaggggcgtatgcgcatctggaagatggccggtgccgcagttatcgtcctgctgttcatctacatcctttatcctaagctcgccgatgtgttcctgcgcgcccgtacggcgccggcacagaccgaatccgctgccaccgaatccgctccgcgcaacggactcgaccagacgggtatttccgacgtagagtggcaggagcagcctatcacggtggttcccaacgattaccaggaataaatggcagataagatcagattattacccgaagtcgtcgccaaccagattgctgcgggcgaggtcgtcaaccgtcccgcatcggtggtcaaggagatgatggagaacgccatcgacgccggcgcccgtaccgtgaaggtcaacttccgtgacgggggcaaggatttgatccagatcgtcgacgacggctcgggcatgtcgcccatcgacgcgcgtatggccttcgaccgccatgccaccagcaagataacttccgtcgaagacatctacgctctcgatacgttcgggttccgcggcgaggcgctcgcttcgatcgccgccgtggcgcaggtcgaactgcgcacgcggcaggagggcgacgaggtgggtacccagaccgaaatcaacggcggccagttcgccgggcagactcccgtgatgtgtcccgtgggggcgcagttcttcgtgcgcaaccttttttacaacgtgcccgcccgccgccgtttcctcgacaagagtacgacttcggccgcacagatcaaggccgaattccagcgtgttgcgctgtgcaacccccatatcgccttcgaactttacgccaacgacgctccggtctatacgctctgtgccacgtcgctggcgggacgtatcgttgacgtggtgggacgccatatcaagcagaacctgctggaggtcgatgccgacacctcgatcgcccgcatcgggggctatatcggccgtccggctgccgccaagcggcgcaacggcgagcagtacctcttcgtcaacggacgttatttcaagagttcgtacctcacgagcgccatcatgaaggcctatgagaaactgatccccgagagcagttcgccttcctatttcctctacctgacgatcgacccttcgcgtatcgacgtcaatgtccacccgcagaagaccgaagtcaaattcgccgacgaggaggccgtctggcagatcatcaacgccgccgtgcgcgagacgctcgccaagacgggggctgtgccgctgatggatttcgaccgtgacggcatcgtcgagatcccggcattgagcaaaggggccgtttacagcgagccccgcgccatgtccaacggcgactacaatccgttccgcgaggagtatatcgaccctacggcacccgatcccaatgtcgatttcacgggcttcgacgtcccgtacgacgatcgcggacagacgctttccgacacagcggggacgggcttcgccccgcgcgccgctgcgggaggcggcatgtcggggtgcagtgcgtccgggggcagcctgcccggcgggctgcgcagtgccggcggcggatttacccttccgcaaaccccgccggcgggggaggacttcaccatcccttcctcggcggccgacgggttcgaggatttcgtttcggggagcagtttcgaggtggagtccggcgccgggttcgggacgagtgccctggagttcatcccttccggggctacggccgggcagcagcggctggcggtcgaggggcgtccggaatttaccgatcccctgccgttgggcggcgggtacctcgccgcactgctgggcgggaggttcgtcgtggtggacgtgcggcgtgcccgtgagcgcattctttacgaggattacctgaagatgctcggaaacggggcttccgtgagccagcaactgctctttcccgagcggctggtgttgtcgggcgacgaatatgcgctgctcgaggagaacgccgtggaattcgcgtcgctgggtttcgacatcgactttgcgggggaggggacgatcgaggtgaagggcacgccggccgatatgccggccgatgccgtcgaccagatggtctacgacctgctgcaagccttttcgacgcccgtgtcgctcgcggatcagcgccgcgagaagatcgccgccgtcatggcgcgcggcggggcgaaaggcattccccgcaatatgtcgcgcgacgaagccgccgtactgctcgcccagctcgccgctacgggcaatttcagtttctcgccctcgggcaaagccataattgcagaaataacccccgaagatatccgcaccaaactgggataatccggtggaaaaatgtacttttgtaaaaattttacgcaatgaacagctattttcagacacccccggtggtgaaaaacctgataatcatcaatgccctggtctacatggctacggccctgatccaaccggcacataacgccatcatggagtattgcgccctgtggctgggagcgccgttgttccacacctaccagttcgtcacctatatgttcgtgcatgccaatttcgagcatatcttcttcaatatgttcgccttgtggatgttcgggcgtacgttggaatacgaattggggtcgaagcgtttcctgacctattacatggtttgcggcatcggtgcggcgctgatccagtatttcacggcgctggcgttcggcgagctgcccatgtcgctggtcggtgcttcgggcgcggtgatggggctgctgctcgccttcggcgtcatgcaccccaatgcggtcatcatgctgctgatcccgccgatcccgatgaaggccaaatggttcgtcatcatctacggcgtcatcgaacttttcctcggctggcgtggcgtaggcaatgtggcgcatttcgcccacgtgggcggtatgctttggggtttcctgctgctccactggtggaagcagcgcggcataatccgcttctgagccgatgtccggcgaattctataagaacgattacggcagccggcgcggggagaaaccgcaccgcggcctgctcatgtggctgctcgacctggtgatgacgctcctgaccgtcgttgtcggggccacgatggccgtcacctatttcgtcccttatgtgaaccccgccggggtctggttctttcccctgctggggcttgccgccccggcgatctacgtcgctacggtcatcctggcgctctactgggtcatccgctggcggttgctccgcgccggaacgatgctggcgctggtcgtcatcggccttttcaaagtttcgctcttctataagcccgaattccgccgcagctacggcgaggagagctatgaccgccgggctttcaaggtcatgacctataacgtgcgcagtttcttcggcgaaagcggagccagcaatgtcgatgacatcgtgcgcctgatcggcgaatacgatcccgatatcgtctgcatgcaggagttcaatgcccgcctggccgagaaatccgacgatttcgccctgttggacgagaaatacgaaagcgcggccttcggccgcacgcaggctcccgattcgctgtatggggcatcgcttttcatcctgagcaaataccgtatcctgcgctcgggcatcgtcctgacccccaatacgtcggtctgggccgacctgctgatcggtgacgatacggtgcgcgtgttcaacaaccacctgcgttcgacggcgatcaaggcggccgacaacgaatatatcaccaaccgcgatttcatctccgacacggcacgcgaagtcaagatccgcagcatcgtgagccgcctgcgcgagaacagcatcctgcgtgccgcacaggtcgacagcattgccgatgtcatcgccgacgcgcgtgcgcggtgcatcgtctgcggcgatttcaacgatacgccgatgtcctatgtttaccgcacgatggccggggggctgaacgacgctttcagcaagagcggttcgggctattcgcatactttccgcggcttcttcaatacgctgcgtatcgactatgtcctctgctccgacagtttcgacccggtttcctacgaggtgccgcaggtcgaatattcggatcacctgcccgtcgtggtgcgtctccaaaagaatctactgaataactaatccgataaactatgattttcgactctttgaagaacagcgcgctctattatccggtgagcccgcgtctggaaaaagccttcggcttcatcgcttcgaccgactgggaaacgatggagccggggagccatgaactcgacggcaaggacatctatgtcaacgtaatggaacctgagctgaaaaaaccggcggatgccaaactcgaaatacacgacgcctatatcgacatccaggtgctgatccgcggtgagcaggagaccttcgggtggagcgagcgtgccgacctgcgcaagccgctgggcgaattcgatgccgggaaggatatccgtttcttcgacgatgagccgcagaccttctatacgctgcgcccggggcagttcacgatcttcttccccgaggacggccatgcgccgatgatcggcgagggcaatgtacgcaagatcattgtgaaggttcgcaagtaacggcgggccggattacggatgcgcgagaggcggttccgcagggaaccgcctctcgttttgccgttatgctgcgtcgggttttcggggtgcgagccgcatcgcggggtaggtgtagcaggcggtgcaggcgacaaggacaatccccggagcttctgcttcggggattgtgtcgttatgtgccgtaagagtattattttccgatgccgtagtagcgcagcccggcgttgagcacctcttccttgtcgaagatgttgcggccgtcgaccaggatgttgtcgcgcatgagcgtgagcaattgcggccagtcgggcatccggaactgtttccactccgtgacgagcgcgatggcatcggcgccctttgcagcttcgtacatcgaacctgcgtaatgcacccctttgtcgccgatcctgcggcgggcttcctccatcgccacggggtcgtagacccgaaccgtggcgcccgccttacgcaacaggtcgatcaccaccagtgccggcgcttcgcgcatgtcgtccgtttcgggcttgaacgcgaggccccatatcgcgatggttttcccgcgcaggtcgcccagcgcccgttgcagtttgccgaacaggatggatttctgcccttcgttgacccgttccaccgcctcgatgacctgcatcgtataaccgtgttcctgggccgtacgggccagggctttcacgtccttggggaagcacgagccgccgtagccgcagccggggtagaggaacttgctgccgatgcgggcatcggatccgatgcccttgcgcaccatttcgacgttcgcccctaccaggtcgcagaggttggcaatctcgttcatgaacgagatgcgggtcgccagcatggcgttggccgcgtatttggtcatttccgccgaggggatgtccatgaacagcacccggaaattgttgatcaggaacggacggtacaggcgggtcatcagcttgcgcgcccgttcgctctcgacgcctacgaccacgcggtcgggcgacatgaaatccttgatggccgcgccttccttcaggaattcggggttcgaggccacgtcgaacggtatcttgcagccgcgtttgtctatctcttcccggatcacggccttgaccttctgcgccgtaccgacgggtacggtgcttttggtgacgagcaccgtatacttcttgatgttgcggccgaacgcacgggcgacttcgagcacgtatttcaggtctgccgaaccgtcctcgtcgggcggtgtgccgacggccgagaagactacttccaccttgtccaggcagtccgtcaactcggtcgtgaagtgcaggcgcccctcctcgacattgcgtttgacgagttcttcgagccccggctcgtaaatcgggatgaggccgttgttcagggcgtcgatctttttcctgtcgacgtcgacgcacgtaatatcgagtcccatttctgcgaaacaggcacccgatacgaggccgacataacccgtacccacgactgcgattttcatcatattatgtccaagtttttggttggtttagcggtgcatgcacccggcgatccgcgctgcgagcgcgtggcatgcctcgtgccatgccggcgagaaaccctgcttcatttccacgggttcgcagatcgcctcccacttcatcttctgtgcgaattcgcccaggcagcgtacggcggcactcgcccagcagaaggagccgaaccagccgaagttgcgctgcgggacgcagcgtgccgcgatcaggtcgagcaggcgtgccacgggcgggtagagcccgccgttataggtcgggccgcccacgatgagcgtgtcgtaacggaacacgtcgcgcaggacgaccgattcatcggcgtaggacatgttgtggacgacgatcgggcccacgccttcggcggccagttcgcgcgctatgcgctcggccatctgctccgtattgccgtacatcgagccataggcgatcaccacgccaggttcgccttcgtagcggctcagacggtcgtagacgtcgatcacctgcgggatctcgcgctgccatacggggccgtgggtcgagcaaatggtcgtggggctcagtccccgtaccttcgcgagcgccttttgcacaggcacgccgtatttgccgacgatgcaggcgtagtagcggcgcatttcgtcccagtagcgcgacgggtctacctgcgagtcggtgatgccgccgtcgatggcgccgaacgtgccgaaggcatcgcccgagaagagcgtgccggcctcggcacaccatgtcaccatcgtttcgggccagtgtaccatcggcgccatgtagaacgagagcgttttcgagccgagcgatatgctgtcgccctccttgacttcgagcgtcccggtgtcgatgccgtagaatccctggagcatctgcagcgtcttggcgttgcccacgatttggatgtcggggtagagcatgcgcagtgcgcgcacggacgacgagtggtcgggttccatgtggttgatgaccaggtagtcgatcttgcggtcgccgatggcctcgcggatgttctctgtcagacggctgccgaagccctcttcgaccgtatctatcagtgcgaccttctcgtcggcgaccagataggcattgtatgaaaccccctgcgggagcgaccagagaccttcgaaacgggtggttgtgcgatcgttgaccccgacgtaatggatgccgggcaaaatttcggtgatattcatggtgcgtggcgtatttgtttcaaagatagtgaaaaatgtgccaaagtggagcggcgcgtgccttcctgcttgccggatttttctctatcgtcggatattaaaaatttgcgtaaagataaccgttttttcggatatgcgtgaaatctgtttccgaaaaaaaagcgattcccgcatgatgcggtggctgggcagctggttttccggcctgcggggtgcctgtggcgttgaccgggggcttgccgtttgcgcatggcgaacccgcactgcggcatcggggacaggcgtaaaaaaaagccttcggcaagtgccgaaggctttggaaatattacaagccggggcttagagcaaccggaagaaatccgagcgtacgccctgcatgctcaccgcgtcgttctttaccgactccggaatcgtcgcacgagtgtatacgcacacgtcgccggtgtcggccgtgctggtcagcgtgatggtgttggacgattcgtctgccgtgaccgtgtacgagcttccccagggagtgttgtcgctgtaatttcccgaaagtacatcgccgttgagcaagtagctgcccgtgtatttctggtaccttacggattcgaccttctggtagatggtgaacgaccctccgtcgaatgcgatgtaggcgtcgaacacctgcggagcctggcctgtccatgaggtcaggcgccattctccgacgagttgcttggccaacggcgtgttgttatctttcttgtcgtcgtcgcaccctgcgaacaggctcatgccgagtatggcaaagagaatatagatagtctttctcatgatctttttgctgttatcgtaattcgtattataaccaacctccgttcccggcctgtacgccgcgggcgatgatggcgaactccttggtgatcgtcatgccgcccatcacggtacctgtaccgaccttgtcgccgccgccgattgccgtaaccgtaatcttcgctacgccggacttggtgcacttgatcttcagtttgccgtaggccatcgtgggcaaggtttcgatccccaatttggccatgtcggctgcggacatcgaaacaccggtgtaggtgaggttcgttgcgctgccaccgaagaactgcgtcaggggaacgagttcttcagcccctacgccgaccttgaggcacggcgtgccttcgatctgcatcagcagttgataagcgtctactgcgcccgtacccaactgcttgcggtagttttcgaggtacatcgtgccgttcgactccttggtgccgtcgagataccgttccatgtcgttcaccgaggtgaggagcatgctgatgaattcgttgcgggtgtagtgcttgccttttgccacggcataggagaggccgagtgcggcgacgcccgatacatgcgggcaggccatcgaggttccctgcatgtagccgtaatccgaaccctcgttcacttccgaaggcatcgtcgacagtaccgtcgcggtcatgttgcttgcgatgtaagcgtcgccgcccggtgccgagatgttacagccggggccgtagttggtatagctggccggcaggaagtcgggcgagaacgaggttaccgaaatataatcgcggaacgccccggggtaaccggcacggtcgagtgcgtcgttgccggccgagaagacaacgattcctccgtcgatggcatcgcaattcgacgtggcgatgaaataggcgagagcgtcgtgttcggccttggcgctcgaggcatactggtcgtcggaggtgtagccaccgcccttgatacccatcgagcactggatgatcgaagcaccgttgtcggccgcgtatttgaatgcccttgccatgacggccgtcgtgcccgaacctgctgcggtgccggacagggcctggcacgacatgatccgtacaccgtcgttgttgcccgagccgcccgctactccgcagacaccgatgccgttgttgttgaccgccgctaccgtgcctgcggtatgcgtcccgtgaccggagtcgccgtcgccctttgcgtcgaccacatcccaggagatggggccgttcgtaacgaaattgtacccgtaataatcatccacgtaaccgttgccgtcgtcatcgacgcccgtggttccggtcatctccctggtgttgacccacatgttcgcagccaggtcggggtgcgtatatttcacgccttcgtcgactacggctacgatgatcttgggatctccggccgtgagtttccatgcctcttccacgttgatgtccgcaccttcgcgcgcggtctgtgccacggccttgtcgcctttgttgatatagtgccactggcgcttcaattccgggtcgttgaacggccatacgatcgaacgtgtgtctgccgacatggcgggcgcatccgaacggagcggggtggccttgccgtcccacattttttcgagcttcgtgttgaactggatgttcgccacttcggctacggccgacagtttctgtgcggcgagatccaggtcgacttcggtgtcgaactgcaattcgtaccacttgtgcaggccggctgcgcgcgtgcgctcctcgttgcgtgtgtctaccgggaacaggcggttcagggagctgacgttcagctccgaaagtatttcatccacggagacgatacccgcgcgggtagcgaccgaccgtgtcttggcggcggcttcggcggcctgttcgaggctgccgatggctgcgtcgtcgaaatagacgagcaggctgcccgcttcggcgtcgatcgaggtgttgacgatcttatgcgatgtggcgggtatctgcgaaccgccgtcggttgcgtcggtcatagggtctgacgtacaactcgcaagcagaagcgccgcaatgagtagtaattttttatcaatcataatccgagttattttttgagggtctcccctccccggaggaaggggagaccgctcttgatcactaattgggtgaacgactgaaattatttagccatttttttcaggggcattttctccatgcctccgctttgcagagtgtttgcccggggtgcaaaaccttcggagaacgaactcatcgcgggagttgcgatccgaacggacacctcaccttcgagcgggttcgcgccgcggttgacgggcttgccgaacagttcgtcgatcagggcatgggcacgttcgcggccgcgcagttcgacgtagttcgaggggttgatggaaatttctttcgagagggtcagcatcttatccgaagcaaccttgcgcggtgcggctgctcccgtgttgctaccggtcgccggcaccatcagcggggacgtatagctttcccagttgccgatcgagttcgtatagttggcatccgtgtatgccttgactaatatggtgtcgaaattatactgatccgaccagtcggggccacaaaccaaggcgagatacccgtcttccgtgacacctccgaccatcatgccgtcgattgtgtctgcacccttgctcttctctttgtccaaaatgtaatacttgaggtagagcgtcgccccctgatagggaatcgtgcccatgggctgtcctttcagaacatagatgatcccgttgtaccacccccagacgaccgtgtcttggttgtttgctccgagcgagaggcccgagacattgattgcatccagattgctggtatcttcggtctcattctccgagaagacgacctggccgatcttgctgcgagccgttttaccggagccgtcgttgctgattccccacaggttccatgtcttgaacagttgggctttatcgctgaacacatagaggtcgtcgatcgtgtacttgcgctgcagcggatctgccttgccggcagtagtctgttctacggcgaacagtttgccgttgtaaccgttgtcggcgtataccagcagggtgtaacttgtacctgccgacagacccgtatagaacggagcgtaacctgtgccgttaatcttttcgagttgagctgtggtaagtgccttgccggatgccttgacacccgcgatcagctgcgattcgttcatgccctgggtcgaagccgtcgtgaacaggccgatgtagcccgatgcgatctcctcaccgaacaggatggccttgatcgagttctcgggtgtgtggccttcgggctctttctcccacgtaagctctgtgcggacgctcattatgacgggtttctcctcgccggccttgacgtaaccgaacgatacgtacccgtatttctggaggttgcctttttcgtcataagaattgccgacgatggtgtagatgccggtcttctccatgacggcggtgatcgtacccgaagccgtgatctcttcgctcgggatcgtccctgcgtcgatgtctcccgatttggccgcagcgagcgactcgctgagcgcaccctcgaagaaggcatatttcaccttgtcgacgtcgctgccgagcgtagccgtgatgacgaccttgccgtctgcgggcgccgacttctcgaaggctaccgagtaatcgtggcttaccgcacccgggaacaacaggcgggtcatttcggtattggccttgaagtggctggtcgcttcccatagcgaaggtgtcgtcagaaggatcgccttcggcgggaaggtgaggacaccgttttccagcgtgccgtacatcgtggccgaagccatgccgggataattctcctggcagaacgaaacgatcacgaatgcgccgttgtcttcgtaaccgacgtcgttgatctcaaaaccagtcggctgtaccgggaaccatactttttcgggatcccgcgcgtcgatgatggtataggtcggaacggagggaacgttggaataccttacaccgacgattttggccatgtaggcttcgtcataaatatccttgatacggtagtaacccttcatgtcggcacgttcgtaaatctcgacttccttttctgcattggggacaccgttttcctttatgttggagcccattatcgccgtgaagaaatcgtcgcgccacgtgcctttggtttcaccgttggggcccttcacgagatcccactggacgcgggtgacgctgaaatcgagcccgttggaatattctccgtaaagcagtgcgtatttcttgtccttcaccacgatggagcaatcgtaggtcttaccgacctcagctccagggaagtccaccgagaacgtggttgcttcctgtccggcctcgaatttgatttccgagaccgtgaaaagcccgtcctgggtgctgctgacttccacaggcacggtgatcgcatcgttgtagttcttgcgcatggccgtgaaggtcagggtcgtaggctccgccggatcgagctcttggtcgccggcattttcctgcgagggaaaataaacgccgtagcagtccgtgtcttcgccttcgccgggagtatacttaatgtcgtccgagcaacttgcgagcacgaatgtcgctgtgagcgcgtacaatatatatttgattgttttcatactattcggtctttggtattaaagcaaattttgcatattgccgttacttatccgtccaaggtgttatcttgcccgaggggtcggggttgttgactacggcggggttgttctggatttcaccacggggaatgacaaaattccagtggggagcgcggccgtcggtgttcaaacgataatcggaaggagaattggtacccttgtagccgcgggtcatggacatatccagacgtttcaggtcgaacatgatgataccctcgccccagaactcgatgcgtttttggaggatcagctcctcgatgaaactcttgagtgtcggcgtgcgttcgctacaatcgtacgagccgtcggtgaaacggtacttcatgaattcgttaagcagttcacgggcggcgacgatattgctttgcgccgtagcttccgcttcgataaggtacatctcctcgacgcgcatgcagggaatatccgtagctccgccgactttgaagtcggtatagttgccctgggcgggacggaacttgatattgacatagtctttcagcgttgcgaagtatgcactgccgttggggcggcaactcttgtacgcgtagaaattgcggtcgggatcgagccacgaatgcttgcggaaatccttgtcgtcgatcttgttgtagagggccttgtcaatggcacggcctacctggtgtccgtatccccacgactcctcgttaccgatgtgggcctggaagttcagcaggttggaaacgttgtcgctggtgatcggcaggccccagatccacgatttgtttgccgtcgcactattgaaaccggtcgtcggatcctcccactgtgcctgggtcaggggtgtgcaaccgctcgtggtgatggctttacgggcatactctgcggccttcttgtaagcatcgggattgttgtcggcagtaccgcgttccagataagcacgtgcctggagcccatagaccatagccaaactgggcgtgtagggatctgtcgccgagtaatcggaaaggtatgtcgccgccttttcgaggtcggggaagatcactttctcgtagacgtcggctgccgacgcacggggattggccttagcttcggcctcggtcgtggtctcagttacgatcggtacggtaaggctgagcactccgtctgcggacgtgtatttattctccttgaactcatagagacgtaccaggtcgaggtagaacgaagcccggtaagcataagcgaagccgaggatatgcttggttgcggtcgtgagagcttccgggtcgatggtgctgatgatgtcgttggtcgacttgatccaagtgaaatagttgttccaggtcaggagattggccgcgtagttctctgcgagagcatcgttggcgccccactggctgaaccagtcgtagcccgtatcgcccgttatggccatgtcgcctgctgctgaatcggtagcgaggtggatggccgggagtgcgaaattccagtgcatattgccgtagtcggtaagcgacttaacctggataagcgccgtggggatacctttcaccatcgcttcgagggccgaggcggaacctgcgagctggtcggatgtggccctgtcggtcgggaatgtttccttgatgcacccgctaagcagtgcagccgaagcaagggctgctatagatattttcagtatatttttcatatccgaataattagctggttatggattagaattggatattgataccgcccgagatggtgcgtatcggagaataggttgcgtaattcgaggttcccagaacgccctggttgtccgtattgtctgcgtagcgcggatccagtcccttacgcttggaccaatagaatacgttttcgcaggcgaggtagatacgcatcttgccgactccgaatttctgggtgaacttcgacggcagtgtatagccgaagttgatgttctgcagggtcaggtagcttgcgtcgatcaggaaacggtcggaggtatccgtcgtgttcgaatcgccgtactgcatacgcggaatgttcgagttcggattctccggtgtccatgcgttgagtatgtccttgtgccagttcacgccgatgctgccggtcgaggtcggcgtgctcatcgctgcggcataccccgagtcgtagatcttgccgccgatctgatagttgaagttgatgccgaaatcgaacccgaagaacgaaacgctcgtgccgaagccgccgtaaaggtcggggatcgcattgccgcagaggtaatcgctaccttccgaataggctgtggtggtcgttcgttcacccgtcggcttcccgtccttgtccgttacatccttataccacatggaacgtccgtcctccgagacgccggcgtatttcttcatatagaaggtatacagcggcagcccttggccgtagaagaagctactgccggcgtagccgtaataaccttccacctctttggtgcggcgttcgggaggcaatgaaatgatcttgttcttgaggtgcgtcaggttgacgttgatgtcccactgcacgtttttgctgcggatcggggtgaagttcaggtcgacctcgatacctttgttggacatgtcgccgacgttggcatagtaggaagagtaacccagcgacggtgccgtggggaatgccatcagcatgtcggtcgtcttgcggttgaagtactcgatgctacccgatatgcggttctggagtacgccgaattcgataccggcgttgaagttggtattggtctcccaggtgatgttgggattccctttctccaggaatgccacggacatctctccattcgacgaagcgagccggtaggtatccacataacggtagtcaccgatcttgtcgttaccctgcgaaccgatcgatgccttgaccttcagcatgtcgagccagccgtgcgtcccggacatgaaattctccttggttacgatccatgcggcacctaccgaccagaagttgccccagcggtgcgagggatggaagcgcgacgaggcatcgcggcggtacgaagccgagaagaaatatttaccgtcgtaatcgtactgcgcgcggccgaaatagccttcattattataggtgatgacatacgaggttgcgctctgcttgtcgattaccgcaccggccagttcgtcgttgtcgggcgagaacatgttggccgtgctgccgtaaagcaggtactgcctgcgctggtagtattcatggccgagcattacattgacattgtgcttgccgatgactttggtgtagttgaggatctgctgaaggttgtgcgagaaatcacgcgtatggtatttgcctatgataccgttctcatcggcgaactgtccgaaatagggggtctgtacggtcgtccggcgggtctcgtcgagcgaaacacctacattgaaagtgaatttgaaatccttcaggaacaatatgtcgaagaatcccgtgccgttgaaggcattgccttccgaacggtcggtgttcaggcgggaatccgccagaccgttcgcattcggcagcaggggacgggtcaaaccggcgttcattccgtctccgtagtcgtacatcgtgatgccggcgtcgttcttcatgatatttccctgcccgtcacggacgtagaggggatagatgggggctacggacgaggtgaaggcgaagaggttggccgaagagtttccctgcccgtccgcgctcagcgaattgtaggtgaagttggcgtaaccggcgttggcaccgaccttcagccattttttggcctggtaatcggctttcagacgggcggtgtagcgttccatattcgagttttcggtgataccttcgttattcaggtagccgaacgaggcgtagaacgtactgtgatccgtggcgcccgatacgctcacgttgtactcctgacgcatcgaagagcggaaagcaatatcttcccagtcgtcgggggtaagcaggtagtcctgtccgttataaacgacccggttgcccagcgtagcattgggattgagtttcccgtttgtgccgataaccgactggccgtcgggcacgctgtaaaccatgtagcccagaccgccgtcgttcttcgaggcggccaggttcttgttggccatggcgtgtgccgtgctctcgctcatgccctgtgaccggtagtagctgttcagggccgtgtagtatgtttcataatactgggccgggtttttgatgtagtcgtatgactgcatcgcgcgcgagttcacaccccacttggcatctaccgtgacggtggcttcctgtccacgggcctttttggtcgtgaccatgatgacaccgttggcaccacgcgcaccgtaaagggcgttggatgctgcgtccttcagaacggtcatcgactcgatgtcgttggggttcaggttgttcaggtctccttcgtagggagttccatccacgatccacagggggtctttctcggcgttgatcgaactgaatccacggatacggacgatcgggttggcacccggtttacccgattcgttggatatctggacaccggcaaccttaccggccagcgactgggcgacgttcgactgctgcgactttgcgatctcatccgccttgatgacggtcgcggaaccggtaaacgcctcctttttggaggtaccgaacgccaccacgatcacgtcgtcgatcgcctgcgtatcttcgtgcatagtcacgtcgatgcgcgatttgccagcgatggggagctgttgccccacatatccgatgaacgtcaccgaaagggtgccgtcagccggagccgaaagtgagtactggcctgccgcgttggtcgtagtaccgatcgaagtaccgtctaccatgactgtggcacctgctaccggagcaccggcagcgtcggtaactgtaccggagacctgcttgttttgggcgaatgcatatgcgccgagcaccaaaacagcaattaacgatagtacaatttttcttaccataagcgttaattttaattggtttttttaaaataaaaagccagtagcctgtgaacaggattttacgattctggtaagatgctgaatatcaaataaataattaatcaagcacaaggttgcgatccggttttgaaaaggcacggtaacttgaaagttacctgagggtccggtgtataaaatttatttacagcatattaatggctgcttgccgagcacctcgagttaccaatgcataaccaaaaacggcaaaaacgcgctgcaatattcaaaaggttaacgatacctccggacatcgcggcaataccccggatgccgtaatataccccgggcgtcacaagccccctccaggaatcccggcaacgacaggggggggggcgctcgctgctccccggacggtacgggcataaaaaacccggaagcgtcacgacttccgggcccagaaaataagtattaaccactaaagcggattctggtcggccgcattgatgtatgggttgctgttcagctcgatcgacagcggaatctggtaggtgaattccttgccggcagccttgaccaccttgtgcgtgtggttggaggatgccgtacggtccacaccgacgttgaagcgcttgttggtaaagaattcatgtccctcgccccagagttcgatacggctctggaggaagatctccttcagcagtgcatcgcccgtattcgaggacttcgcatagcccgaatcacgcttcgacaccaggtcgtaaagcgtctgctgcgctgcggaattgttgccgccgcgggcttcggcctcggccttcagcaggtatgcctccgacaggcgcatgtagatttcgtcagcctcgtaggtcggggtgttgaacttgacgttcgagtaggccggataggtgaaatcccctaccgtggtctcggtcgcgttgaaattcttcttgcggtagtcggtatctgcgatctggttgtagagctggtcgtcgatggccatgtaaatacccttgttgttggcattgtccacggccgtgatcgacatgaacgatgcgaaggaacggttgccgagcgaagtggaagcagcccacgtatagccccagatggtctcgggaagcgaagtgctctggaaacccgaagtcgtatactgctcctcgttcatgagcgagtagcctgccgaaatcaccgccccggcagcattggctgccgtggtgtaatcgcccgtcgtcagtgccacgcgagccagcaccatgttcgcaaccgtctggtcgatgtccgccgtcgaactcttgggatcgtagccttcctgctcgaacagcgcgatggcgttctgcaaatcggtcgtgatcgtgctgtaaacctcggtcgacggggtgcgtcccttggcaccctcgacggtcagatagagggggacacccgccttatccttgccgccgtgcatgtagtcgtcctggtaaacgcacatcaggtaatagtaagccagcgcgcggtaggtcagcgcctgagccttatataccagcgccttgcccgtagcatcgtcgggaatcaggtcgaggatctggttcgactgatagacgatcttgtagtaacagtaccagcggtctgccgtataggcattggtctgggcacggatgctttcgaacatatattcgtcggcaaaccagttggtcagtttcgtgagcaccatatcgttgccctgcaaatccatacccagattccagaccatgaatccgcggtcgttggtcgttgcctggcggttgccggtatgcatgtagttgacggctccctgcatcatgggggcgagcacgaggtcggcattctccttgatcagttcggccagctgctcatccgacacctggctgcccgaaggctcggtgtcgagctcgctcgcacaggatgcgaacaggagcaccgtagctattgcgatgtaatatactatgtttttcatacgctaatatctcgtttattataagttcatcgtaataccgaaagtaaaggtcttcgcctgcgggaacccgaatgcgttctgtcccgtgtaagcggtacgcgggtcgaagcccgtatgcgcggaggtgaagtagaggttgtcggcagcgaagaagacacgcagcgattcgatgcagatcttcgacgtccagcgcttgggcagcgtgtagccgacgttgatcgtcttgaggctgaagtaggaggcgtcgcggtagaggtagtcgcagttcgaacccacgaaattccaggtgccgttgaacatcagcttggggaatttggcgttggtatgctccggcgtccaggtgttgcccacgaggtcttgcgaggctgcaaaaccggcacgtcccggatcatatacgttggccgagttgccgtcccactggcggccgccgatctggtaggcagcagccagcatgaaatcgaagttcttccagcggaacgaggtgcgcaacccacccgtcacgtcgggcagcgcatcgccgatctcatactgcgtggcttcgttgatattgaaggtcttttcacggcccgtaaccttgccgtcgccgtcaacgacatccttccagaacgtctcctggccggttgcgggatctacgccggcaaacttgaagagatagaggttgtagtaggacttgcctttgccgcgcaggaacgtaccgctgatgtagtcgccgcccagcgccgggttgcccagctccgagggatagtcgatcaggcggttgcgtgcgaacgaggcgttgaccgcgaagttccagtagagatccttatgcttgaggatgtccacgcccaggtcgatttcgaaaccgcggttggccaggataccgacgttttccaggcggctcgcaaggcccgtcgacgacggggtcggacggttccagatcaggtcgtgcgtacgacggttataatagtcgaccgtaccgtagaagcggttccacaggcggaagtcgatacccaggtcgatctggtagttgcgttcccacgaaagattgcggttacccgtgctggcttgcgtaatgccgatctggccatcagtttctccgaccgaccaaaggttggtgtagggatacgaagcagaaagctggttgccggccacaccgtagttgacgcgcagtttcagttcgtcgacccacgtagcgttgtccatgaagctctcgcccttgatacgccatgcggcgcccacagaccagaagtggccccacttgtcgtacttgaagcgcgacgaaccgtcgtagcggtacgaacccgagaagaaatacttgctggcgtagttatagttcacacgtgcgaagtaaccttcgatggcggtcaccacggtgctcgaggtcgagccgttgttatactgcgaaacggcgttgcccagttcggggatgcccgggtagaaaatatttttcttgtaggcatccacgacgcgcgtgtcggtcttaccgaactcgtggccgatcagcacgtcgaagttgtggttctccttgatggtcttgttccagttgagcatctgctgggtattgtacgagaaatagttatcgttgtatttctcgacaaggccgttgttggtcggcgtggcagcagctccgtattcgttattttggtagaaggtatccatccggtacacgttgtccagcgtgaagttggccgtaaacttgaaatccttcaggaatacgatctcgccgtagaaattggcgtagaggttgtcgcgaaccgagttgttgatattgcggctcatcgactgcatggggtgcgcgaagttgttgaacgagttgaactgatcctgcgtcgcaccgtagggcgaaagggtcgtgccgttgccctgctcgtacatcttcgtgccgtcggcattgtaacggatgttaccgtccaggtcgcgggcgtagtacggcacggtggggttctgccacatcgtccacaggaacacgttgcccgtgttggcccccgaatagccggggctgtcgatgtcgcggcgcgaataagaaagattcgtcccgaccttcagccacttggtggcctgtgcattgaaggcggcgcggcccgagtaacgcttgaatcccgacatgattacatacgaggggtcttcgaggaagctgcccgaaacgtagtagtccatcttgtcgttgccgccgctgatgctcagcgtgtattcctgacggaactgcttggtgaacaggtagtcgtcgtagttgtcggcatagagcagttgcgcgtcggaattgagcttgcccgtagcggggtcgatcagcgtcgtaccgtcggggatcttataggccatgtagtttccgagcacgggcatgaggttggagttcgccgcattggcaagcgccgcatggctcgcccccggattctccgcctcaaggtagttataaagcccgccgtatacatattcataatagtcgccggggttctgcatggtctcatgctccttgataccctgctggttccagccccacttggcttcgaacatgatgttggccttctggttgcgcgtccccttcttcgtagtgacgaaaaccacgccgttggcagcacgcgaaccgtagagcgcattggcggcggcatccttcgacacgacgatcgactcgatatcgagcgggttgatcgtcgaaagagccgacgaataaggcacaccgtcgacgacgatcagtgcggtctgggagccgttgatcgaaccgataccgcggatgacgatcgaagcgtcgtcaccgggctgtcccgtagagctgtatgactgtacaccggtgacagcgccttccagcattcgtgaagcggaagcaacagtcgttttggatatttcaccggccgaaaccgatgcgatcgagccggtaaaatccttcttcttgactgcaccgaaagccgtgatgactacattgtcgatcgcctgtgcgttctccttgagcgtcaccgaaacatgggtgtgcccggcgatcgcgacggtctcggtgtcatacccgatgaacgaaacgaccagtttcccgtttgcaggggctgcaagcgagaaggtgccgttcgtacctgtcgtggtaccgatatgctggccctcgaccatgactgtggctccagccaccggagcaccggcggcatcggtaactgtaccggaaacctgctggttctgggccattgcaacggcgcaaatccccaaaacggcaattaacgatagtacaatttttcttaccataagcgttaattttaaattaattttttattaaaataaaaagttcacaagcaaagataacggattgctaactcatttacaaataaattattaaaaaaatttaacacggttacagctatctttcaaattgtggttgacggcttacgatttttcgcgtataaggcctgtggcgattacaatttgcaatcgccatttcggagcgttttttgttgatttcgggattttccccagccggaaggggatgcaaggggtgaaaaaagtgacttagtagagcctttccgactcgttcggcatgcccgacggcgtccagtcggggcacagcgagttgatacgttttgacaggcgttccatctctccgctgatatgcgaatgggtgatattcgcatagatctgcgttgtgcgtatgtttttatgtcccagtaatttactgattgtttcgatggcgacaccctgcgaaagggtaattgtcgtggcaaacgtgtgccgggccgcatgaaacgtgatctttttcggaatccccgcttcggcaacgatcttgtcgaggcatttattgcaccacccgttgctcggaaggttgaatatccgtccggagcccgatgcgggcatgtatttcaacaggatattgtacgggacggtaaacagccgcacattgacctccgcccctgttttacgacgtgtcgtgttgacccacagctgtttgtttattttctgaatattctgcggcaccaggcctcggatgtcgacataggacaatcccgtgaaacaactgaacaaaaacgtatccctgacaagttgtaaggtgacatcctcgttctcatactgcatcattcggtttatttcatccatggtcaggtagttgcgtgttacgaattcgctttgtaatttgtaattggcaaagatatccttgtccatatatcccttgctgcgggccagcatgaggatgtgtttcagggcgatcatgtaaatccagatcgtgttttttttatacccggcttcctttgcgatataggcgtggaagcccgtgaggaattcccggttgagctccttgaacatcaggtctttccggtcgtacttgtcccagatgtagtttgccagatgcttgcagacgcacctatatttataatatgtggccttgctgcggctgatgccgaccatacggttgaattcttcgttgtgctgcctgaaaaaggcgagcacggtctcctgccggagattggcgccgaaatacatctctttgaccatcatcggagttacgaacgactgctcgtagaataacttgttgtaacacctttcgatgtggtagtggatattcgaaagttgttcgttgattctgccggcggcattgctccgcccggcgacacgccccataccgacgtcccagtgttcgggtgcgaccgagaggcgtgtggaaaactgcgtccgctctccgttgatcgtgatgcgccccatgatcgggacgtttccattccggagaggcgcgtttttcttgatgtaaaacaatacattaaacgtgtttctcattgctcaaataaccttttgtgtttaacctaataacaatatgcaaaccgcattaaaggtaatgattaagtaacccccgaataacgtattattcagcctaaatatcttattgtatagatgttagcccgtgtgagacggttactttatagtaacactacaacaatccggcaaggcatttgcagagatttaaaagccttttaatcagtctattacgtctgaattagccgattttgcgccagaaaagaccttgtgcgctgaatatcatgatgttgtgtaagttaacgcacaatgataactttttattttataaaaaaccaattaaaattaacgcttatggtaagaaaaattgtactatcgttaattgctgttttggtgctcggcgcatatgcattcgcccaaaacaagcaggtctccggtacagttaccgacgctgccggtgctccggtagcaggtgccacagtcatggtggacggaacgacggtcggaacgacgacgagtgctgacggtgcttactcgatttctgttcccagggagggtgttctgctggtgaccttcatcggctatgagccccagcgtattgctgtcgccggaaaaacccgtgtgaacgtcgtgatgaaggaggatacgcaggcgattgacgacgtgatcgtggtagcatacggtacggccaaaaaagaggcctttacgggttctgcttccgtgatgaaggccgaggatatcggcaagcgccaggtatccaacatttcgaacgccctggcgggtgccgtggccggtgtgcaggctgtttcgtcgaacggacagccgggtgagagtgccaagatccgtatccgtggtattggctccatgtcggcgagcagtgctccgctctatatcgtggacggggccccttacgacgggtcgctctcgttcctgaacagtgccgatatcgagtcgatcacggtgctgaaggatgccgccgcgtcggccatctacggtgcccgcggtgccaacggcgtcgtgctggtcaccaccaagcgcggcaagtcgcaggatgcgaccgtgaccttcgacgccaagtggggtaccaactcccgcggtgtgcccaattacgacgtgatttccgatccgggactgtattacgaactgggctacaaagctttgtacaacagtaagttctatgccgggagctcggcggcggattcgcgcgcgtttgccaactccgccctgttcgactcgacgaacggcggtacgggttacaacgtctacacgcttcccgaaggccagacgctgatcggtgccaacggcaaactcaatcccaacgccaaactgggctactccgacgggcagtattactacacccccgacgattggtacgacgagctgttcggcagcggcaacctgcgccaggagtacaacgtctccgtcgcgggtgcttcggaacgcctcaactactacctctcggccggttacctcgacgattcgggcatcatcaagaattcgggcttcacccgttattcgacccgtatgaaggccgattaccaggccaagaagtggctgaaggtcggtggcaatatcggtttctcgcacgctattaccaactcccctacggggcagaccgactggggttcgtcgggcaacctgttctacctggccaacatgattgccccgatctacccgatgtatgtgcgcgatgccgataagaagatcatgtacgacgaacacggcaataagatctacgactcgggtgtgaataccaaccagatacgctcgttctcgggcggtgccaaccccatgatctcgatcgacctggatcgtcaccgcacctatactgatgcgatcaacggcaactggtttgcgaccgtgacgcccgtcgaggggctgaacgtcacggccaacatcagtgccagcgccatcaaccgccgtgcgaaccacctttataactcctactacggttcctatatcggcaaaggttcggtctccgttgcgcagtcgcgtacgttcggcgtcaaccagcagtacctggcttcgtacaagagaacgttcgcccagaagcacaacttcgacgtgctggtcggcttcgagaactattcgctgaagatgcagtacctctcaggcagcaacaccgacctttacaatcccaatgtaggggagctggacaacacgatctatgagaccccgcaggtttcgtcctacaccgacacctattttacaatgggtattctctcgcgtgtgcagtacgactacgacggcaagtatttcttctcggcatcctaccgccgcgatgcctcgtcgcgcttccatcccgaccaccgctggggtaacttcggctcggtgggtggcgcatggctgctgaccaaggagaacttcctgaaggatgtgaagtggctcaacatgctgaaactgaaggcttcgtatggtatccagggtaacgacgacctgctcgatcccagcggttacagcaactactatccctaccaggatcagtattcggtaggccgtgtcgacggcgatttctcgttgacgctcaactacaagggtaacaagaacattacgtgggagtcctcgcactcgctcaacgtgggtgtcgagttcggcctttgggacgaccgcctgagcggtagcgtcgagtatttctcgcgcaagacctcggacatgctctactacaaacccgtacctccttcgctgggttactcgcggcagcctatcaacgtgggttcgatgcgtaacgccggtgtcgagatccagctgtccgccgggctgctgcgctataagaatttctcgtgggatctggatctcaatatgacgcactacaagaacaagatcctctcgctcgacggcgacgtgcccgagacgggactggtttactcgatggcgatccgcgaggtgggcggctcgatgtacgactcctacctgaagacctatgcgggtgtcgatcccaacaccggtaagtcgctctggtacgtagaccccgacaacggcgattattcgaccacggatgtttacgacaacgcccgtcaggcccgccagggcagcacgctggccaaggtgagcggcggcttcgctacttcgctgagcttctacggcgtggatatctcggcacagttcgcttaccagctcggtggcaaactctacgacaacacctaccacgaattgatgcactacggcgataacctgggtatgaacttccacaaggacgccctcaaggcctggacgcccgagaaccccaacacgaatgtcccgcgcctgaactcgtccgacgattcgaaccagaaatattcgtcgcgcttcctcgtaagctccgactacctttcggtcaacaatgtgacggtaggctatacccttcccaagaagtggtcgaacaagatcggcctgggcagcatccgcatctatttctcgggtgacaaccttgccgtcttctccgcccgcgagggtctcgacccccgcatcgtattcggcggtacgggtactgcggacaacacctcctattcggccctgcgtaccatttcgggcggtattaacctgacgttctaattttggcacaatcaaataacaacgtgtatatgaaagcaatcaataaaatatgggtatttgccctggggacggcggttatggtctcctgctccgacctcgatacgttccccgagagcggtattgtgaccgaggatcagaaaaaggaggtcgtggaggacaaccccgaacgtctgcaggcggatatcaacactctgtcttcgatcttcacgaagctcctgcccaactgggccggaggtagcgccacgcctttccacaacgacttcagctatcctgccgtatgtatcgccaccgacggcaacggtgccgacatggtatcggacaacagcgactacgagtggttttcggttgcgttcgagtattcggatcgcaacgccaactatgccgtgcccatgttcacctggaatttctgctacaagctgaacaagcaggccaacgacatcctgtccacgatccccgcggataccgaaaaccagacgcttatctactaccgcggccaggctctggtggcgcgtgcgttcgccaacttcacgctggcgcagcgtttccagttcacctacaagggcaacgaggacaaaccgacggtacccatcgtgacgtgggacatgccggccgagcgtgccggtgcgaacccccgtgccactaatgccgagatctacaagctgatctacgacgatctgacgcaggccatcgccgacctcgagggtttccagcgcacgagcaaggccgccgccgaccggaacgtggcttacggaatgcgtgcccgcgtgaacctggtgatgaacaactggggcgaagctgccaccgatgccgaagctgccctgagcggctacacgttcctctccaaggatgacgtgtcggctcccggtttcaacagtgccaactccccgtcgtggatctgggccggcatctacaaggctgccgacacccccgccaactaccgcaatatcacctggggcggacacctctgctcctttgcccgcggttataccaccagccagggtttgtataagcgtatcaattcgctgctttacaacatgatccccgatacggacgtgcgcaagggatggtggatcaacgccagcctcgaatcgccgctgctcgaccacatggactgggacggcgtgaccggctcggccatcagctcgctggcgattcccaatgtcaagcgtgccttccagccctataccaacgtgaagttcgcgccttatgaaaataagtgcggtacggacatcaacgcgggcgactggtgtatcatgcgtgccgaggagatgcttctcatccaggccgaggccatggccatgggcggcaacctcggcggcggcaagtccctgctcgagaattgggtcaagacctaccgcgatccttcgtattcgtgcgccgccacgactcccgaggctttccagagcgagatctggtggcagcgccgcgtcgagttgtggggcgagggccatgcctataccgacatcatgcgtctgaagaagaacctcgtgcggtgcacgacggacggcaagtcggacttccccgatgcctgggcgttcaacatcgcggcgacggacggtatcctgctgatgcgtatccccaccggggagaccaacgccaatgcggctatcgaccctgtcaaggataacaacaacgagggtacgttccctgttaacggcagcggagctggtttgaccgacggatgcgtagttaaataagttttgaaccggataacatcgacaaaatatgaaaacactcaagagtttattatatgtgttcctggcggcgttcctcttcgtggggtgtaacgacgacgagaacttcaaccccggggaacccgaagatcccgattgttacagcgtctatttccctacgcaggagaatataggttccaaggaactcgaccccgcggctccgaccgagatgacgttcaccgtacgccgcctgaagagcgagggtgcgatcgtagttcccgtggccgtaacgtcgagtgaggagggaatcttcgttccctcgcagatcgaatttgccgacgggcaggaggagacgaccttcagcattcagttcccgcaggccgaaatcggtaccacgtataaatgcgaggtcaatatcaaggacaagaagtacgcctctgtctatggtgaaaaagccacgggcttcgccttcagcgtgacccgcgtgaagtggaacaaactgacgggcaaaggcggcgagaccaagggcaagtggcgcgacgacatcatttcgacgctgttcaataccgccaaccccaatgccgaggtcgacgtggagatttacgagcgggccgacaaacccggttactaccgcatgaatccctttacgcaggatttgatccgggccctctttaacggaaccgcacaggcttgcaccgaacccaatatcattatcgacgccaccaaccccgatgccgtgtggatcccttaccagacgacgggcgtgacgctcggaggtgacggcgagatcgaaattgcttcgaaggtcaatgctaacttctcctccgtgagcgagtcggccagcctttacggtacgctcaaggacggtatcattaccttcccggccaccggcatcatggtgaacttcacggtctccggcgggtggtacggcgccaacggcagcggtctgcaacggatcatgcttccgggtgccaaggcatacgactatacgctcgcactgacgaacaccgagcctgcggccggtgtggtcaaggtcggcttcaagttcggtgcggacgtggccaaggtgaaatacgcgttcttcaacggctcgatgagcgacgcgctggccgacgtccgttcgggcgagatcgaatcgggtgagaccccttccaccgaaatcacggcttccggcacggtttccgcttcattcgacgatacgggcgtttattcggtcgtcggcaatatgtacaacgcggccggcgaactggtagggcgttcgttcctctcgttcgggtacgtcaagtcgggtgaggagtcccagaatgcggttatcctttcggtaagaaccgaactttcctgggaaaaagaggcgttgggctatacccccgagaattcgatcaaggcgatcctgttcggacagaatatccagtcgggttattggggtttgttcaagacttccgacctggcaggcctgagcacggcacagttgggacaggttgccaaatcctcgggcgatgcgttcacggaagaagagctcgcgaagatcaacggcaaagagtctttggttccgttcctcgtcggcctgaacagcggtacgagctatacgctcctggtgtcggctttcaacgggtatttctccaaggtctatgccgtcgagcagactaccgccggtaaggaagaccccatgcagcagaagtataaattcgacgacgtcaagggtgaggtgagcaaagacgatctcttcaatacgacgtggaattactatgccgtggatgcattcgacgaaaatgatgccaccaaccgccaatacctcggcaaggtcacgttcagtgagaatgctgacgaccctaattacgtcaaagtcaaggggctttcgtcctaccttgcttcgaatctggatacgaaagacgacacgttcctggcaaagtacaacggactggtcagcccgatgccgacctgccacatcggtatgttcaagacctatcatgtcggcaacatgttcacctacgaagagaatcccacgggaataaatggcagccagggttgtctctatgcaggctatgtcgatgacggaatccttgcattcgttccgaacccgaattatgtgacgcagggctacaccttcaaaggtatctattggggtggtttcggcaattatgatccagccacgggcaaattcacgaatttggctgccgatttggtacagttcgactacctgatgctgataaatcccgcaaacgaccccaatgcggtaactgccgcggctgttgcccgggagcttgaggtacggccggccaacaatttcgtcgaactgcgcgggcccgaattgattcaggtactttggagcgagcagaccggcaaacctgtcaaccgtgcaacattcggcggttacggtatgcagcccgacctgggcgtggccgatgcggtcgcgaccttcagcgagggcagtatgccccaggctccgggggcgatcgtgatgatcggcaagaaggtatccttgaagtaaccgattccggcaatgttggaataattatcgggaggagccggctctgaggggtcggctccgccctctaaaaaccgatagactatggctgataaaaaaatcctacttttcgccgtgctgttgctggcggcgtgtactgccgatccggcgatggatggtgccgacggcgggaattcttctgcgaataccgcagccgccgcgaagctgatcaacacgccttacgatgccaagcaggggtcgctgatcgtttgtttcgacgatgctgccgtgccgaccatcgaggctacggcggcttccttcgccgcaacgcgcggcgatgccggggacgctgccgtactgacccgttcgggcattgccccggtcgacgaagtgttgcaggggcttgaaatcacctccctgcgccgtgtgttcccctacacaccccgccatgaggagcgtacgcgtgccgcaggcctgcacaagtggtatgtcgtgactttcgacgagcaggccgacctcgaagccgccgccctgaaactggccgccgtggccgaagtccggaatgtcgagttcaacacgaagctttatgtgacctcggtaggtccgcgccgaccgctgacggctgccgatatggctgccacccgcgccgcagccgcggggcggttcaacgatccgcagctttcccgccagtggcactacaacaacaacggcgacaagaccgttgcctcgacgtcccgcgccggggccgacatcaacgcccaggatgcctgggcgatcacggccggtaaccccggcgtggtggttgccatcgtggatcagggcgtgaaatatacgcatcccgaccttgcggcgaacatgtggatcaatacgcaggagaaaaacggggctacgggtgccgacgacgacgggaacggctatatcgacgatatttacgggtataacttcgtcacgcgcggtgccgtctcctgggatcgcgaggtatgggtcggcggcgagaacaaaggcgactcggggcacgggacgcatgtggccggtacggtggccgccgtcaataacaacggcgtcggcgtttgcggcgtggccggcggcacggggcgcaacgacggggtgaaactcatgtcgtgccagatattctcgggcaacgacgccacttcgggggctatcaccacttccgccgaagccatcaagtatgccgccgacaacggagctgcgatcatccagtgttcgttcggaagcaaggcgggagcctatacttcggacagcgcctatgagcgcggctcgggcgtgcagtacaatgccatcaagtatttcatcgaatctcagaactgcgatgccgtcggcggcggcgtggtcatctttgccgccggcaacgatgctactgccatgtcgggctacccgggggcttaccacgattatatctccgtgacctctttctcgcccgattacctgccggcctattacaccaattacggcccgggctgcaatatctcggctcccggcggcgactataagatcagtgccgatgcggccaagacctacgccgaagtcctgtcgacggttccttccgagttgtcggaatacaacggtgccgattacggcttcatgcagggtacgtcgatggcctgtccgcacgtttcgggcgtcgcggcgctcgggctctcctatgcgctggaaaagggaaagaaattcacgctcgacgagttcaagaccatgatcctcacctcggtgaacgatatggaaacctatctcgacggttcgaaaaccggccttgtactggccgactaccgcaagaagatgggtaccgggtcgatcgacgcataccagctgctcatgcaggtcgaagggacaccctgcctgcgggccaaggtcggcaccaagcagctcgtggccctgaccaaatatttcggcggttcggcttcgaacctgacctatctgcgggtcgagatgacgcgggagaatatggataagctcggcatcaccgagtctccttcgatctcctacggcaaactgatgatccactgcaccaaacccggtgtcgccaagatctccgtcacggctattgccggcggcgggagtgtgggcggcggcagttcgatgggcggtcaggagatctccaaggaattcgccgtcatcgcccgcgcgacggaaaatgcgaacggaggttggttataataaacgataagatcatgagaaaaactctttataccttattcgccgtgctcggtttgtgcatgttcgccggctgcggctcctcgtcgaaaggcgacgacgcttcgccgctggccaagcagctcgtgggcgaatggcacctcgtttcgtggaacggggcagcccccggcgtattcgatgcttacgtgtcgttcgcttcggataagaccttcgaaatctaccagcagatcgagcaggtcggataccagaaatacacgggttcctacctgatcggcaacaagatgctttcggggaaatacagcgacaatacgccctggggcagctcttacgaagtgtcgttcgatgagtcgggtaatacgctcacgctggtgagcgatccttcggtgggcgaagtgagcgtctatacgcgcgcttcgatacccgcgtcggtcaagggcggagccacggtcatgaaggcctcttcccgcgccgccggcccgctgctgttctgacgacccggtttttctgtaaaactttctggaaatgccttctgcaattcgcagaaggcattttccatgttgcggacttgtgcgggttttacttgaaaataggcaccgaaacatcgcttgttttgccctgggagaaacagaaacccttgattccaaacggaatcaagggtttctgtttcttttgtggtaccaccaggaatcgaaccggggacacaaggattttcagtcctttgctctaccaactgagctatggcaccatcccgataattgcggtcggaagcacttctttcccgtattatcgtggtgcaaaggtaaacaaaatttccaaacgtgcaaaatattctccgaatttttgcgcattattacacttccaggctgatcctgggcacatacaaatgtcctgtactcctgcctgccgagtcttgtcggacagggtctgattgaaaatattgccagggcttgccatttccatccttggctgccccgattccggagggctggatcgataataaaccattttcattcgacctcacttgcggggcatccggagtctggatgccggttctgaaacccggcccggcgggaacccaccggattaccgggcgtacccttgctcatcggccgcaagggctgctcccggcccggcttgccttacaagtccctgcagcccggcctcgtattccgcaacggtttcgcggacgatctgtcccgccgtcggcagctcgcggatcagcgaggctgcctgcccgatttccagttcgccgtccgtcaggtcgccttcgaagatgccccgtttcgagcgtccgcgtccaagcagctgctgtaactcttcggccgtcgcacccctgttctccgcctcctcgaccgcacggaaaaagtcgttgcggatcaggcgtgtcggactgagtttcttcagcgcgagcatcgtgtcgccctcctgcagtccgatacagagtttcttgaatgcgtcgctggcggaactctcctccgaaagcgcgaaccgcgttcccatctggatgccctcggctcccagcgcgaacgccgccagcataccgcgcccggtggcgatgccgcctgcggcgatcagcggtatcgccacggcctgccgcacccggggtacgagcaccatcgtcgtggtctcctcgcgtccgttgtggccgccggcctcgaagccctctgctaccacggcatcgacccctgcctgctggcttttcagggcgaactttgtgctcgaaatcacgtgcgccaccttgcatcccacttcgtgcaggcgggccgtccatgttttcgggctgcccgccgaggtaaacaccgcgggtacgcgttcctccatgatgacgcccatgatctcttctgcgtagcggtacatcagcgggacgttcacgccgaacggtttttcggtcgccgcgcggcatttgcggatatgctcgcgcagcaggtcgggggtcattgagccggagccgatcagccccagtccgcctgcttcgctcacggctgcggccagccgccagccgctgcaccagatcatgccgcccgcgacgatggggtagcgtattccgaacagcgaagtgattctgttttccatggtttcaggtatttgtcgtcctgcaaaaataggcaaattatcgggagtgcaaacggcctgccacgggaaataacggccgtattccttgcccggggctgaaaattttgccacctttgtcccgtattttacgaataaccgttcacagccatgttatatacggaagatacccggatcgcggcgctggccgtgcatatcgtcgggaacaaggccaaggacgagcccctgctcgtcgcccctgcattgtccggtcaggtcggcgacaccggcctgatgcagaccctgaccgcctatttcgccggaggtttcaaatccgaggagtactacaacctccaccacgaaaccgacctggcctgcaacgaagtctacaatttcgtctgtaaggtgttcgacgaccgggagacgttctacgacaactccgtgggccttgcccggcacctttacgagacgggcacacacccgcagatcaagggcggcgaattttacgtcgtctatttcaccggctgccgtttcgggggcgaggcggtcgatgccgtcgggcttttcaagtccgagacccgcgatacgttcctcgaggtcggggagcaggacgggcagctgcatatctcctcctgccagggaatcaacgtcgacaaactggacaaagggtgcctcgtgttcaataccgagcgcgaagaaggcttcgccgtctgcgtcgtggacaacaccaaccgggcggaagcgcgttactggatcgacgatttcctgcatgtccgcccgcggcaggacaactaccacaacacgcacaacgtcctggccatgtgcaagaaatacgtgaccgggcatcttccctcggagttcgacgtgtcgaaggccgaccaggccgagatgctcaacgagacgatgaaatacttccgggagcaggacaatttttcgctcgacgacttttccgaaaaggtgatccgccagcccgaggtcatggagagcttctctcgctacaaacaggagtacgagcaggagcgcgacatccgcatcgaggatgagttcgccatttccgattccgccgtcaggaaacaggcgcgcgcctataagagcgtcatcaagctcgaccgcaatttccatatctatgtccacggcaaccgcaacctgctggagcagggcgaggacgaaaagggcaagttctacaaggtctattatcaggaggaggaataacctccttttccgggcggaattgccgtgccggcaaggcggactgcaaggtgcagcccgcttttttttgtgtattgtgccgaataaccggattttgaatccccttcacagggagcaaatagtcgcttattgtgtatatttgtatatgaagtggggattccgaaaggtacggcaggttgctgcgttatctcgcacggcctgtttttatggttcattataaccgggtgaaggccgggtcatcgtttgcaggatattccgggacgatgcgattatagtgcattcgggctgaaatcggcggattatccgtctcaggacttcagtggaagcggtatcatcctgccaactacttatttgtagttataaatcagggtataaatgcggtaatttgcactatgaaaaggcagcgacgaaatgacttttttgtcgggcaggttgctgacaggctggcgaaagccagacgaaggcataacctgactcaggaagtcgtgcgtttcgataccgggctgaatgtcggccggatcgaagccggatgttccgatatcacgctgtcgaccttggctgacctttgtgattattatgatatttcacccggggagttgtttcaggacatagtgacgcactcatcctgaagagggaaccggccatgcggccggttccctcgttttatgccctcatgtcccgagggttttctcgaatgccagccgttcgccgctccggtagcgtaccttgccgcaatagacgaaccccagccgtccgagcatgcgcagcatgtaacggttgtcgaaattggtgtcgacgcgcatactgcccgtgccgcgcccgcacgccatcgcttcgacgcgccgcataaactccgtcgccaccccgcggcctttctcaccgtcggccaccgccatgcggtgcagtacgacatactctccgtcggtgagccatgccccttcgatggcgtcgtaggccggttccccgtcgaaaaccacggccccgtaggcgatgacgttgccctgtgccgcggccgcttttgcaggctctgtttctcctcgtcctcccgcttctcccgctttttccgcctcttccgcctcttccgcctcttccgccgccgctgccgtttcgtcagcgccggatactcctgttttgccggccgcctccgtgcccgttgttttccccgccgcagccgttacagcccggaaccccgcagcccccgtgccgtcggttccccgtacatccgtgctctttcccgcctccggtttctcgaagacccatccgtagccgcaggcgatatcgtgtccgatatcggccgttgccgggtagccgtcctgccattgcaggcttcccagtgcccgcatctgcgcctgcgcctgccggatgatctccatgatgcgctccgtgtcggcggggcgggcgcgccggaacagtaatttttcgttcatacggcaaatataggataaaatgccgtgatacgctactgccgggggatatttgcgcggcggaatttccgccgtacggcttttttacccctcctttcgcccgggcgggatgccttccgcagccttttttaccatgccccgtgcgaatccggcaaaaaaatccgggataaaatcgtacataataggcaaaaatcgtagctccagacccctggttgtgtcctgcggacttttatcccgatgccccgtcctaaattcgctattagcgggacagcccttctgcggggtgtcccccgggataccaaccaaacctattttttaaccttaaaattagtgtgtatgagtttttctactaaccgtttttcccggaaagcactattacttgtgacagccgtgttctctgcgtcgttgctgtgggcgcagaccatcggcatctccggacgtgtgctcgatgagaccggtgcgccggtcatcggcgcgacggtcatggtcaaaggcaccacgatcgctacggcgaccaatgtcgacggtaccttcaacctgaagaataccgaccgcaacgtcacgctcgtcgtgtcgtatgtcggttacgaggcgcaacaggtatcgttcaaaggcgccgggtcggtgacgatcacgctcaagcccgaggccatcggcatggagagcgtcgaaatcgtctccgtgggctacggtacccagaaacgcgaatcggtcgtgggggccatctccacgatccggcccgaggaactgcgcgtccccgtgcggtcgctgagccagacgctggccggcaacctggcgggtgtcgtcgcactgcaaacctcgggcgagcccggcaaggacgatgcccagttctggatccgcggtatcgccacctttacgggcagccccgatccgctgatcctggtcgacggtatcgagcgtccgctcaacgatgtcgacccgctggagatcgagtcgttcagcgtcctgaaagacgccagcgccacggccgtatacggcgtacgcggtgccaacggcgttatccttgtcaacactcgccgcggtttcgacggcccggcccggatcgacctgcgttacgagcagggtttctcgttcgccagcaaacgcctgtcgttcgtcgacgccgctacccgctccgaaatgttcaacgaggcggtggatgccgtgaatgcctcggcggcactgaaatacggcgccgacgagatcaaggccatgcgcatgcagaccgaccccgaggtctatcccgatgtcgactggcagaagctccttatgaaaaaggtgtctctttcggagaaggtgagcgccaacatctcgggcggcggcaagttcgcccgctacttcacggccctctccttctacaaccaggaggggcagtatgccgtcaaacccggcgaatattcgtgggtgagcgacaagatcggccgttacggcgagaatgtcaactacaagcgctataacttccgctcgaacgtcgacatggacatcaccaagaccacggtggtgaatctgggcgtgcagggcaacgtgaccgagaacatggagcccgtcgagggatcggcggccatctaccgcgacatcatcaacgcggcgccgaacgctttccccgtccgcttcaaggacggcgaactggccggccgcgacggcctgaacaacccctataacatgctcacgcagcgcggttggaagaagaccaccggcaatacgcttcgcgccaacctgacgatcaaccaggatttctcgttcatcaccccgggcctttcggccaaggtgagctacgcctacgacgccgtgaattattcggtggaggagcgtgcgcgcaacatcaacttcttcgaggccacgggccgcgaccaggacggcgaactgatccgcaccgagtggcaggccgaccagaaacaggagtacctgaattacaaacagtccggcaacggttcccgtacgcagtacgtcgaggcggcgatcaattatagccggacgttcggcgaaaagcacgaggtcggcggcctgctgctcggcttcgccaaggattaccggttgcaggaggctacgagcgattacctcaagtcgctgcccaaccgttcgctcggccttgccggccgtcttacctatgcctacgacaagcgttacctgatcgaggccaacatcggtttcaacggttcggagaacttcgccaagggcaagcgcatgggcgtattccccgccgtggctatcggctgggtggcctccgaggagagcttcctgcgcaacagcgaggtgctgacgtggttcaagatccgtgcgtcggtcgggcaggtcggcaacgaccagatccccagtacgcgtttcatctacctggctacgatcaacagtggcgccaacggttacggtaacctcggcgtcaacttcgaccaaggggccggcggtatcggcgaaggtcgcatggccaatcaggacgtgacgtgggaggtgtcgaccaaatacaacgtcggtatcgaaaccgggtttttcaacgagttgaaaatcaatgccgacttcttctacgagcggcgtgaaaacatcttcctcgcaccccagttctcggagatttcggggcttcccaaggattataccaactacgccaacatgggtctgatggagaaccgcggctttgaggtttcggccgaatacgtcaagcgtttcagcaaagacctcaccgtctccgtccgcggaaacttcacctttgcccgcaacaaggtgatcgacgacggcaagtactatgcctatccgtggcaggatcagcgcggcgtgcgttacggactgaccatgggctaccgtgccatgcacctcttctcgcaggaggagctggacaacatgcccgactactatacgcagttcggcctggacaagcagcagctgcgtgccggcgacatccgctacgaagacctcaacgacgacggcaagatcaccgaggccgacatgacgtggatcggcaaccccgcgatgccggagatcgtctacggtttcggagcgtcgctcaactacaagggctttgacttctcgttcctcttccagggcggcgccaaccgttcctcctacctgagcggcggctggtatttctacccgttccaggcagaccgcggcccgaagttcatgggtaacgtgatgaccatgttcaaggatcgctggacggtggacaaccccgacccccatgccttctcgccccgcctctcctacggcgccgatgccaacaactacaagacttcgacctggtggcagcgcgacagcggctacctgcgcctgaagaatgtcgagatcggctatacgctgccctcggcctgggccagcaagctccggtgcagttcgctgcgcatctatgccacgggtgtgaacctgttcacgatcagcaaatttatctccgactactgggatcccgagacgggtgccgatgcctatcccatgcagcgccaggttttcgtcggtgtgaatttaaccttctaatacagcctaaagaatgaaaaagaatatcgtatatttaatgctcgcgtcgctccttttgtttaccggctgcgccgactatctggatcaggatcccgaagacctgaactcgatggacaagatcttctcgtccaagatcgagaccaccaagtggtacaaccgcatttacagcgacgatttcatggtgcaggagatgcattacagcggccagattccctatttctggtgcaccgacgaatcggcctacattctcgaatcgcacgtgcgcaatatcgccgaagggaagatgagccccgacaactactacggttacacgggttcctacaacctctatttcttcgtgcgttactaccaggccatccgccattgcaacctgttcctcgaaaacgtggacaagtgcgccgaactgggcgagatcgaccgccgcacgatgcgtgccgaagcccgcttcatgcgtgcctattaccactacctgctgctgcgcctctacggcccgatccccatcgtggagaccagccgttcggccgaccagatcggggcttcgcaggcgcgcaacacgctcggcgaatgcgtccgctggatcaacggcgagatcgactgggcctgtgaaaacggcatgcccgccgcccgcgacgagaaattcacgctggggctccccaccatcggtgccgcccgggccatccagtcgcgcatgctgctgatggtcgccagcccgctcttcaacggcaattcggcctacaagaactggacgaatcacgacggcacggtgctcatgccccagacctatgacaaggagctgtggaaggatgccgccgatgccgccaagacggtcatcgacatgaccgaataccagttgctcaaaccggccgctgacgctacgttcgatgagatcgtggataacctccgcgccgtgacgaccacctggggcgccggcaagaataccgagatcatctgggggcaccccaactcggtgcagtggtacggcatgtgcgccctgccggcgcgctggtacggctggaacggccgctattcgctggccatcggcatgatcaacgatttcttcatggccgacggcagcccgagccgcccgctcgaagagtggttcgcctccaaaaaattctcgtccgaagccggcgacggcaccatcgccaatacgttctggatgttcgtcggccgcgagccgcggttctatgcctcggttcacttccccaaccagcgcctgtcgtacgcctatgagaacaagaccgacagctaccaggatgccgacggttacggcgtagtcgatttctggtactcggggctgagcggcaacggcagcaccccgggcgacaagaacacctcgggattctccgtgcgcaagaacctcccgctggattaccgcagcaacaagcagaccagcgaggcgacgcgtacgctcaacgtgcctttccccatcatccgcctgggcgaggtctacctcaattacgccgaggccctgaacgagtactacggtacctcccggcaggacgaagcactctattacctcaacgaaatccgcacccgtgccggcatcccggcctatgagggcacctattcgcaggacgagatgcgcgagatgatccgccacgagcgcaagatcgagctggcgtgggagtgcaaccgctatttcgacgtgcgccgctggttcacggcccatggccccgacggcgagttcaaccacgacgaatacgggctggacatgtcgcgcggtacgagtgccaccgacccggcgttcttcaccctgaccaaggtggccaacaagcgcttcgacatccagcactacttcctgcccatcaagtcgtcggaggtcatgctcaacacgcagttggtgcaggcgccctactattgatggccgcagccggacacatgttaaacttaaaaatggaaaattcgctatgaaacagttttttaagatactggcgctcgcggccctggcgctgcctttcaccggctgcgacgtggagtattcggacataaatattctgcccgacccggttttcgaacagaacgggctgtacacggtcaataccatatccatctatgacgactacgaaaccgtcatcaatgtttcgagaactgccggtctgtcgaaagaactggaattggatatcgtggtggacgaaacgctgctcgccgaatacaacgagttgtacaacaccgactataaactgctggaaacgcagttctacgacattccgaagaatgcgcaacttgcaagtacggtcaagtccgtcgatatttccgtgcggatacatcccaaagccctgattgcggccaaaggcatggctgcggctaacaacatgctgctccccatccgtatttccaatgcctccacgcccgtcgaggacggcggttcgatgatgcaggcgctgttgcgtttgagcatcgtcgagccgattgtgcaggtggagatgcccgaacagatgccgcagctggagttcattccgaccattccgctgccgcaggaaattacgctgaacgccacggccaatttcaacacgctggaggtggcgaaaatcggctatcgggtcaatgcatcgaaagtcgatgcctataacgaggagcacggcacctcttaccagctgttgcccgagcagtattataaaatcaaggaatcggatttcgatacggaaacgctggaaatcgagagccgcatcgaattcgattgcgctgcaatcggcggtgagggcacctacctgctgccgctcgaaatgcattccgacgactattcggtcgtccagcgggagccggtttatgtcttgattcagatgtccgaactcaaaatatgggtaacgaacgtcgctgacctcgcaaaaacgtcgggcaagggaaaaatcagggtacagatgaactccccgatgactgtcggccagcctgtcgacttcgtattcgaaccggagaaggtcgaaacctacaacacggagcacgggactgcattcaagacgctggatgccgccaaggtggtcgttaccccgactgaaattcaggccggcagccaatacggcgaactctcgttcgagctcgatctgtcggaattggattacgacggcgccgataaatacatggttccgctgaccctcaagagcagcgaactggtggacggcacgatcgtaacgggcccgtcgacattctacatcgaggtgaacaagacgctcaagggcacctacgacaaggaagtatggggcgaagaaaaaagcaaccgagttctgaaaccggctattttcatcgcaggacaggacggctatgccgagtcgcggaatgcgaagaagcagaagtacatcatcaattacaaccagacgtggacaggcggcctgatttacttcaatatttcggacgaaacggtcgcaggacatcccaatcggcgggtactcgtcgatttctcggatcgtcccaacgaaagagctgacggttatgaccagattgtcgattccggcagttatctggacactgacacgggggatatttatttcaacctccgggttatggacggtgcgtacggcgcgacgggcggattcggtatcgaagtggtactgtccaaccgtgcagacctttgacggtctggcagggccgatggccgggggtacacagggtatcccccggccatcggcaaccgctgccctgctggcagggggctgctccggcctgtaacctttccggcacagatcgccgcgctgaaaaccctgaaatgattgaattttaaatataccggttatgaaaaaaatgcgattctttttgtgcgtagttctgtcggccgcggcgctttggtcatgcggcggcgacggtgacggcgagcccgggcccgaacctcccgtgccgcccgtcgtggatcccaatgccgtcgaggtcgttaacagcggcttcgaaaaggggctcgaaggctggacgcgcgtcgatttccacaacggcggcaaggtgacggtcgaggtggtcgagggtgccggcgtcaacgacagccgctgcatcaagatccagcagttccccgagaacggccgttgcggcgtgggcatcaaacagaagcttacggggctggaacccgaccagatgtaccgcatgtatgccaaggtcaaatattcggacattccgcaggacgaggggcgcggcgccatcctgttcgacatgtcccagaagcagttctggggcgcctcgaaattcctctacggcaccaacctcaggaactggacgtcgctccatttcgacttcctttcgcaggacgacgggactgccgagatcgtctgcgcgctggggttccgctacggcgggacgaccaacggcggctattcgaccggcacggcctatttcgacaacgtgagcgtggtgaaggtcaccgacgaacttttcatgcaggaaggcgagcatatccgcctcttcgtcgaaccctcgcaggtctacgcctcggcgtcgcagatcaccgagtggatcgccaacctggacaggatgtacgagtcgtatgccgacctgatgggggcgaccccgcacgaggggcgcaagctggcgatcctttcgtcgcgcgggctcgaaagcggttattgggcgctggcgggctatcccatcctgtggagcagcaactattcggccgtcacctcgaccttcgaggagctggcgcagcacggcacctggagcttcggcctgatgcacgaactggggcacgtcttcaacctgggcaattcgagctggaactggaacgacgagatgttcgccaatttccggatgcagtacggcctggaacagaaccagggcaaggtctggatggacgaacgggtctacaccgggcgcgagatcctcgacatgtacaagaaggattacgacaatacggtctacacgcaggtcaacgacaacggcatccattacatgctcgggcgcctggccggcccgggcggcatcggctgggaacccttcaaggccgctttccgcgaactgacgaccacgggcggcgcgccctcgggcaaatacgacaagttcgaatacctgctttcgctgctttccaagcacgctacccggctgaccgggcgcgacgtggatgtcaagacgcagtatttcaccgaggccgagctggcctcgatccgcaaacagttgcaataataaccgccgtatcccgtcgcggggcgatgcgttgcctctgccgggcggcaattaatacccaatgcgaaaaatgaagagagtggtatttcttctcgccgccatcgcggcgtgcgtgctgtgcctgtgcgccttcggctcgaaggtcaaggtcttctccgacaatttcgaccggcccgaaaggttcgcgcgctactggaaccataatgccggggaggtgcccggcacggtcgaatacctgcccgaaggcggtgccgacggcagtggatgcgtgaagatcgccagcgcggaaaagaccgccctggccatcaaacacaaacttacggggctgcatcccggcaagctctaccgcctgagtgcgctgatgaagtgcgacagcgtgcaggacggccgcggcgccgtgctctacctcgaccccgaggggctggaacagtcgtggaacgcctcggagttcgcctacggcaccaacgactggacggaagtgtatctggatttcgtgcccgacctgcagggcgaagccgtcgtctgctgcggcctgggattcccctggggcacctacaacggaggcaaggcctcggggacggtgtggtacgacaacgtgaaggtcacaccggcgcccgaggaggccctctatacccgcgagggcgaacacatcgtgctgaggctcgaccgcgacaaggtgaccgtctccgatgccgacatcgacgcctggctctcgaagctcgaccgcacgtacgaggcgtaccgcgacctggtgggcgacgtgcccttcgacgggcgcaaaatcatgatcctcaacacgccgggcatcgaacccggttactgggcgctggccggcaacccgatcctgtggaacagccacgtcgccgtatcgaagctgctcgaccgcacggtcgagttcggcgactggggcttcggcatcatccacgagatcggccatgtcttctcgcagggaaacatttcgggtacgggacgctggaactggaacgacgagattttcgccaatttccgcatgtcctatgccctcgaagcgtgcgacggtacgatgtcgcagcgcgacatctgctaccggggtgccgacgtaatcaactactacaagattttctacgacgaaaccatcggcgccggcatccccaagaacaacggcgatgccctgcattacaccttcctgcgcatcaaggagcgttacgggtgggacgtctacaaaaaggcgttccgcgaactctacgcgctcggcgactcggggcaggaagggctcgagacgccctacgacaaattcctcttcttcctctcctacgtttcgaaggccgcgggcgaagatgtcgtggcggcgacctatacgcccggggaactggccctgatcgaggaatcgcttagaaactgatgccgatgaataccttgcgaacagccctcctggccctggtcgtggccgccgcgttccgcgctgccgcacaaccggtctataccttccgcgtcaaggtcggcatcgaccgcgaatcggtcgattcgctgggtgggcgcgaccgagtcgtgcaactgaccgaagatatgttccggcgcgtcaaccgtgctttcaactacggggcgcagctgcgtgcggtctacgatttcgtggtggactgggacgccttctacatctacgacggcgtgtcggccgaccagatccgcaagccccatcccgaccacgattatctggtggtgatggacggttacaaatccgatccccgcgagacgggcggtggctggtacggcgacgggattcaggccatctatcattcgcgcacgcacaacgaccgtttcaacagcccgttcgaaaagaacgccatcgacggcatcatccacgagttcggccatgcgcggggcgtccccgacatctatgccatgaaggtcgacgcggacaagaaccccgtcaacggacaggcgttttccggcgtgcggtgcatcatgaattatccctatggcgaggagctctggagcgactatgccgtccgcatgatcgaccatgccgccgaccgcaatgtcgacatcgacgacctggtggcgggcgtgttgcccgaccgtatccgggtcgaggtggcggatgccgacgcaagcccggccaaaggggctatcgtgcggttctatcccgtgcgatggtacacctatacggtgaccgccgagccgcaggccggggccgcgaccgaccgccgcggacgctgtacggttcccgttgcgcgaattttcgaacccgaggaggagttcggcgtgcgttattgcaactgcctggtcgaggcggaatacgacggcgtgaaagcctatggctggctgccgctctacgagttgcagaacacccgttttgccgggcagcgggagcatacgctccgcttgcggctcaaacgcggctgcgggctggttcacgctgtaggaattgacgaataattgctatctttagggctcttaatcacaaaacaccgaactatgacaggaagaaccttactgacttgcattttcatgctgtccgcagttgccgtatgcggacaacgctggcagatcgcccctgacggacggggcatcgtgtggaaggtcggcagcgacatcccgcacgacgaccacatcgagatgagcggcgagcggatggccttcgtgctccgctggggcgtcgactcgcgcggggcgttccgccaggagcgttcgctcgtcttccccctgttgcgcaccctgcccaacaacacccacgccagcctgatgtaccgcatggccgcggacatcccttcgctgctgggcgtcaacggcctggccttgcaggacgaacgggtcgggcaggtggccatcgacggcgcgctggaggtgcggagccgctggggcgtgggcaagatgaacgtcggttcggcgcgggacatgaaacccgagcccgtcgtggagatgacgcgtacgatcttcccttcgcgtacgctgccgctcatgtgcgagcgctacacgctgcgtaacgtcggggcgaagccgctgacggtttccgtacccgaattctcgcaggtcgtgacgaccgatccggccaagggcctcacgggcagctatgtcgtgcggggcgacattgcgggcagcggcacctttacgcttgccgcgggggactcgctcgcgttcgacgccgtgttccaggcctacccgggcggcggagagcccctgcaccccgacgtggcggccgagttcgccgcccggatggcgttcgtcagggagtgcatcgacgcgaacctcgtgctcgaaacccccgactcggtgatcgacacccaattccgctatgccaagctgcgggctgccgagagcatcgttgcgaccaagggcggctacatgcacgcccccggcggcgaatcctactatgcggccatctgggccaacgaccaggccgaatacgtcaaccccttcttcccctttctgggctacggggtgggcaatgcctcggcgctcaattcgttccgccatttcgcccgcttcatgaaccccgcatacgaaccgctgcccagctcggtcatcgccgagggcgacgacatctggaacggcgcgggcgaccgcggcgacgccgcgatgatcgcctgcggggcggcacgctacgcccttgcacgcggtgaccgtgccgaggccgccgagctgtggccgctcgtcgagtggtgcctcgaatactgccgccgccagcttacgcccgacggcgtcgtggcttccgacaccgacgaactggaggggcgtttccccaccggcgatgccaacctctgcacctcgacgctctattacgatgcactactgtcggccgtgtcgctcggccgcgagctgggtgtggaatccgcccagaccgcccgctatgccgcacaggccagggcgctcgcccgagctatcgacgcgcacttcggcggcgaggtcggcgggtacgacacctaccgctactatgcgggcaatacgctgctgcgctcgtggatctgcatgccgctgatcgtggggctgaaggagcgcagcgaaggtaccgtccgggcgttgctcggccccgagctgatgaccgacgacggcctgctgacccagcagggcagctcgacgttctgggatcgctcgacgctctacgccctgcgcgggatttacaacgtggggcaggccgaccgtgcgaccgaactgctgcaccgctattcgcagcggcgcctgctgggtgaccatgtgccttatcccatcgaggcgtggcccgaaggctcgcagcgccacctttcggccgagagcgggctctactgccgcatcatcaccgagggcctgttcggcatccgccccacggggctgcggtcgttcgacctcacgccttccatgcccgctgcctgggagagcatgtccctgcgccatatccgggcgttccgctccgatttcgacatcacggtcgcgcgcgtggcggacggcaggctccgcattacggtggcccggcccggcgcaaaaccgaaaatataccgcgcggcacccggcgcgacgatacgggtgaaactaaccgattaacaatccgatttacctatgaaccttttccgctgcttcgccatttcgtttgcattgtccctcgcggccgcctgctcgtccggccccgggactgatttcaaagtcgcctcgcccgacgggacgctctgcgtcgggatccgcgcggccgactcgctgacctataccgtgacccgccacggtacgcccgtgctgcagccttcggccatcgggctgcacttcgccgacggcacggtgctgggacgcggtgcgaaggtgaccgatgcgcggcgcgaaacggtggaacgggtcgtcgaggcccccttttaccggcaggcacgcttcacggagcattacaaccagctgcggctcaccttcgaaggcggctatgccgtgactttccgggttttcgaccagggttgcgcctaccgcatcgaaacgcagctgccgggcgaatgcaccgtggccggagaagtggccgagttcaatttcgcgggcgaccccgggttgttcgccgcctattccgacggcctgtgcaacgcctaccagagccagtatgagaagtgccgcctgagcgcgctgggaacggaaaaacccgtcctgctgccgctggccgccgactgcggcgccgccggccgcgtgttggtctgcgaagccgacctggaagcctatcccggcatgttcctgacgccctcggcgggcggcctgcgggggctgtttgccgccgtgcccgacagttgctaccttcacgagcgccgctgccaggagaaggtcgccacgcgccatgactatatcgcccgcgtcgagggcacgcggacatatccgtggcgtattctcgccgtggctgacgaagaccgcgaactcccgaccaacgacctggtctatgccctcgccgcagagaaccgcatcggcgactgctcgtgggtgaagcccggcaaggtggcctgggagtggtggaacgactgggggctgacgggcgtggactttgagccgggcatcaacacgcgaacctataaggcctatatcgacttcgcggccgactacgggctcgaatacgtcgtgctggacgaagggtggtcggatccgaaggccggcgacgtgatgtccgtggtcgagcagatcaacctgcccgaactggtgcgttatgccgacgccaaaggtgtcgggctgatgctgtgggtcgtgggcaacgtgctcgacgccaagctcgaagaggcgtgcagctactatgccggattaggtatccgcggcttcaaggtcgactttatcgaccgcgacgaccagaaggccgtcgagctggtctaccgccttgcccggggcgccgccgcgcaccgcctggtgctcgatatccacggcgtttacaaacccacgggtcagaaccgcacctatcccaatatcatcaatttcgaaagcgtcttcgggctggaggaactcaagtggagcaatcccgacatgccgctctacgacgtgaccttccccttcatccgcatggtgcagggcccggtggactacacgcccggcgcctaccgcaatgccacgcgcgaaggcttccggatcgactaccgcaacccgatgagccagggcacgcgggcgcaccaggtggcggcttacgtggttttcgacgcaccgctggtgatgctctgcgactctccgacgcgctacatggccgacgaggcctgcacgcgcttcatcgcttcgctgcccgtcgtgttcgatacgacgcgggtgctcgcgggcgagatcggcgaatatatcgtcacggcacgcaaacggcaggattgctggtatgtgggcgggcttaccggctggacgccgcgcacgctcgatgtcgacttgtcgctgctcgaccccgggcgggagtatacggccacgctgctcgccgacgacgaccgctcggctgcggagcccgcccgctatgtgctctccacgcaacgggtgacctccgcgacacggctgcaaatacccgtggcgcccggcggcggcttcgcgctgaagatcgaaccggctgataacaaataaccctatccgaaaaatacgacccttatgaaccgaaccctgagaaaatgctgcgccgccctgctggccatcctggccgtatatgcggcacctgcggcggaaaaaaccgtctacctgaaagatttccttgcgcccggtgctgccgggacggatgccgtgcccgccgtgcgggccgcgctggaacactgtgccgaggtcggcgcctcgcggctcgtgctgcccggcggccagctccgcatgcgccccgaccgggcggtcgaaaagtaccagttcatcagcaacaacgacgagagcctcaagcgcatcgcgttcgacctggtgggtatgcgcgacttcgagatcgacggcaacggcaccgaactgctcttcacgggcttcatctcgccgttcagcctcgaagactgtgagaacattacggtgcgcgacctgacgatcgacttcacccgtacgttcaattccgagggcaccgttgtgtcgaagggcgacggttggctggaaatcgagttccccgaagattacctctgcgacatcgtcaacggctgcctgcgtttccgcgatgccgagggtacggtgtaccccttctccaacctgctggagttcgacgccgtgcggcgcgaaccggcgttccgtgccacggactactggctgtcgaaccggacgatcccggccgaaaaatgcgccaacggcaacatccgcatcctgcgcaaagacctgaccgccacggtcggcaacgtgatggtattcggcgcggctgcgcgttacaaccccggtttcacgctcgccgactgccggggcgttgccatccgcgacgtcaacctctaccactgcggcggcatgggtgtgatcgcgcagcgcagccgcgacatcgagcttcgcaagctggtgatcgtcccctcgcccggcaaggggcgcatgatcagcattacggccgacgccacgcactacgtcaactgcggcggctacatccgcatgatcgactgcacgttcgagaaccagaaagacgacgcgacgaatatccacgggctgtacatggccgtcgaaaaggtcgggagccccgacaaactgctgctccgctggcgcaactcggggcagtacggcgtggatttcatcgtgccggggatgaccctcgaactggtcgacaacaacaacgtggagacctatgcccgccggacggtgaagtccgtcaggcgcctcaacaaggtttacactgaagtcaccttcaccgagccgctccccgacggggtcgagcccatgcatgtcgtggcggccgacgatgaatatcccgaggtgctcatcaagggttgccgcatgcgcggaaaccgggcgcgcggactgctgctgggctcgcgcaaccgcatggtcatcgaggataactacttccacatcgccggggcggccattctgatcgaaggcgacgccaactactggtacgagcagtcgggcgtgcgcgacgtggttattcgcggcaacctcttcgagaatggcaactacggcagccccggatggggttcggcatgtattgccgtgggcagcggtatccccgaccgcgagaccagccgctaccaccgcaacatccgggtcgagggcaacaccttccgcgtgttcgacccgcggatcgtcaacctctactgtgtcgacgggttcgtgtttacgcaggacaatgtaatcgaatataccgatgattatcccgttttatccggggaaaaacgtaactttatcacccggaactgcgataatattgtcattgaaaaagagcaaaccgacaaataatcccaaactatgaaacgattttttttagccgcagtggtcttgttgctggctgtgcaggcggaagccgaagtgaaacttccggctctgctcggaagcaatatggtgctgcaacgcaatacggaagtgaatttctggggcgaggcatcgccccgcagccgggtgctgctcaccgcctcgtgggacggtcgcacgtacgacgccaaggccgacgctgagggcaggtgggcgatgaaaatcgccacgggcgaagccggaggcccctataccgtgaccgtcagcgacggcaaggaggtcgtgcttgacaacgtgatgctgggcgaagtgtgggtctgctcgggacagtccaacatggagatgcctgtgagcgggttcatgttccagccggtcgaaggggcggtcgacgccatcgccgatgcgggcatgtaccccggcattcggatgttcaccgtccccagggtctcgtccaagacgcccctggacgattgcgatgcggcctggcagactgcgacgcccgcctccgtcggccagttcagcgccgtgggctatttcttcgggcgtatgctctacaaggcattgggcattccggtcgggctcatcacctccaactggggcggttcgaccatcgaggcgtggatgaccgtcgacgccatcgacgcgacgccgggcatcgaccatgccgttgccaagtcgggaacctacgacaacagcattccccagcggctctacaacggaatgatcctgcccgtctgccgctatacggccaaagggttcatctggtaccagggtgagtcgaaccgcaagaactggtacgattacaaggcgttgcaggtctcgctcgtcaaactctggcgggaaacctggggcgacgggaagatgccgttctactatacgcagctggcgccttaccgctacgagggcgacgagttgcgttcgctgccgctggtgatcgaggcgcagtaccgggcgctggccgaaatcccgcactcggggatcgctgccacgaccgacttgggcaacccgacctgcatccatccggcgcgcaagcgcgaagtgggggagcggctggcgttcctcgccctggcgaacgattacggggtgacggggctgcccgccccggcgccggtatacaagtcgatggagcgcgacggcaataaactggtgctgactttcgacaacctgcccgtccgggcccaaaacggcgtcgacagcttcgtggccttcggccctgaaggttattgccgtccgggcggcttcgagattgcgggcgaagaccgggttttccaccctgccgttgcgaatttcaaatattgggacaaccggatcgaagtgagctccgaccgggtgcccgacccggtggcggtgcgctacgccttccgcaattactgccccgaagccaatgtcatgacgacgatggggcagccccttgtcccgttccgcaccgacgactggccgctggacgacatcggtcggatcaggtaaacatccggcggccatgaatcccgaattccccccccctcttcccggctcatttccgggtactccctgttattcacggggatagcgacccgtatcctgtgtctgtattgcggatggcatcggccgtccgcccgggggcggcatgtcttcggggcggggcggcggattgcggcgcgtaagggcggtgccccgacggataatgccttccgcttcggagccggacggcgcatttctgctgcccgaaataggtataatggcgccttgtatttgtatatattaaggaaagaaagtatttttcccatcggatgcttccgccccgggaaaggttgcgtcggttttgcgggatggaatgataaagattataaagttctctaaaggggcggcgctatggaatcgagggtgaaatgtgcggtatgtgcggtcgcgatgtgtctggtgttgcgtgccgggagcggtatggagcacaaattcaggtattataccgacaacagcgggctgtcgtcgaacaccatccagtgcctctatcaggatgacaaggggtatgtctgggtcggcacggccgacggcctcgaccggttcaactcctacgatttcaccaactaccgctccgattaccgccgccgcaatacgctcgaaaacaactgcatttacagcctttgcggcgaagggttccccaacggcgaccgcatatgggtcggaaccagcgacggggtctatatcttcgactcgaaggacgagtcgttcgtccacctgcccatcctgggcagcgatggccgggagcgccgcaacctgctggtctattcgcttgcggcggacgtcgcgggcaacatgtggatcgggacgctcggcgacggcctctaccgttacagcctcaagagcggcacgttcgaacactataacgccgcgaaataccccgaggccttctcgtccgacgtcatcgtgaagatcctgctcgaccacgacaacaacatctgggtggcttcgggcggcggttcgctgctgagccgctacaaccccgagaacaaccgtttctccactttccgggtcgaggacacgctcacgcgcgagccgatttcgcgcatcagtaccatgtgccaggattcgttcggcgacatctggatcgcagggtatgcctgcgagctctacaagttcgaactttcgcggctgacgttcacctgcaaccgcccggaggacggcgaggcgtacggccgcgtgcggagcatgatcgaatacgccccggggataatcatgctcgggacggatcacggcctggtgaatttcaataccaagaaccgcagtttcgagcatgtcgacaacggcacgaccaaccggaacggacggctcaacgacaaattcatccactccatcctcaaggatcgtgacggcggcgtgtggatcggaacctatttcggcggcatcaactacctctcgccgctcagttcgcttttcacgctcatcgaggccggcgaggggtgcgggcatatcatcagcaaattctgcgaggatcccgaggggaatatctggatcggcagcgacgacggggggctgagcctttacaatccgcgtacgggcagctatacgcccgtggcggtcgacccgcgcgaccgggcgctcaacatccatgcgctcaccatcgacggcggatggctgtgggtcgggacgtatggcgacgggctttaccgcatcgacctgcgcacgcggcagatgaagcacttcacgcaggccggcacgggactcgacaacctcgacgtctattcggttttccgcgattcgcgggggcagttgtggatcggcaccaaaatgggcatctgccgttacgacgacgtttcgcagaccatcacgtgcgcattcggcctggggcataacagcgacgtggtggacatctgcgaggatgcccgcgggcacctgtggttcgcgtcgctgggcaaggggttgatccgctacgggttcgacgacggcaggttcaccctttgctcgcacgattccgggggcgggctttccgatttcctgagctgcctggccgtcgagggggacaacctgtggatcggcacccacggctgcgggctttgccgttacgacatcgcggccgacacgctctccagggagttcgacatgctgccctacggcaactgcgccgtgttccagatcgtgcagaacggcggcgaactgtggctcacgaccaaccgcgggctgctgaaatacagccccgggaacggcccgcagtcgatctacaagttcacctccgacgacggactgctggccaatatcttcaatgccaattcgggcatcaagtcctcgaccgggcatatctacatcggctgcaacaacggcatcaacaagttctatccctatgatttcacgcgccgcgagaattcggccaagctcagcgtcgtcttccccgatttcaagctcttcaaccgcagcgtgcccgtggacggccggctgctgtccaataccatcgactgccagcgctcggtgcgcctgcgcggacggaagatgtcgttcagcctcgatttcattgccctcaacttctcctcgccgctaaggacggtctaccgttaccggctggagaacttcgacgacaaatggatcaccaccggcctggacgaaggggccggggtgcagcatgtctcctacaccaacctgccgccgaaccgttaccgcttcgtcgtgagcgcctcgaccggcggcgagcagttcggcgaggaggccgtggtcgagatcctcgtgttgccgccgtggtggatggctcgcgccatggtcgtggcctacggcgtgctggctctgctggccgtggcgggcggcggcctgtggctgcgccgcaggatcggccgcgcgcaccgcgagcagatcgcctcgatcacccgcaagaacaagctcgacctgctcgaggccaaggtgagcctcttcacggaggtggccaatgaaatacgtacgcccgttgcgctgattgccgcacccgtcgaggagatcgccaagcgcgccggggatttgcccgggttgcgcgacgacgtggacatcatccgcaagaactgcgagcggctgcggacgctggtcgaccagatcctgaacctgaaaagcgcggaggagggcgagcatgccgcttcccgtgccccggagcgcgtcgacgtacgggaagtattgcggacggtggtcgcggcggtgggggatgccgtcccgcggcggggtatcgcggtgcacctcgggctgcccggcgaagccctcacggccgagatgtgctgcgaccacttctcgaagattgtgggccagatactcggtaatgcctaccaattcgccgagagccgcatcgacgtgacgctcgaaggccccggcggggaggtgcccggcgatgtgttccgtgtgcgtgtccgtgacgacggcgcggggatagaccgggcggagaaggcacggatattcgaacctttctatacgtcggacaagtgtgtctccggcagcgggctggggctggggctcgccgtggcgaagagcctggcgacccggatgggcgccgtgctcggggtcgaaagtgccgtgggacagtggacggagtttacggtgacggttccgctcggtgcaccccgtcccgtccccggggcggatggcgattccggagtgcctgccgggcagccggccgtggcggccgtgcaacccgaggtgcagaaacggctgcccgacatcctgctggccgaggataatgccgacttcgcggactttttcgtgcggcatctttccggcagctatacgatccattgtgtggcggacgggcgtgaggcgctcgacctgctccgaagccggggcattgcggccgtcgtgagcgacgtggcgatgaaggggatggacggcgtggcgctctgcgcggcgatccgcaacgacccggcgctggatcaccttcccgtggtgctggtttcggtggactcctcttcggcggcgaaggtgcgtgcgctggaggcgggtgccgacgcctacctcgaaaagccgctgtcggtggattacctcgaccgccaaatccgggcacttatcgacatccggggccggctgcgcctgaaattctcgaagatgccctacctggtcatggacggggacgcggcgagcccttcgggcaaccgtttcatggcgcaggtgaatcagtatgtcatggacaacatctccaattcgaacctttcggtcgaggatatcgccgcagccgtgaatgtcagccgtacgctcttcttctcgcgcatcaagtcgctgacgggcactacgcccaacgagttcttgcgttccacgcgcctcagggtggcctccgacttgctttccaaacccaacgacttgcgtgttacggagatatgctatatggtgggcttcacgtcgacctcctatttcgccaagtgtttccatgcgcagttcgggatgctgcccaccgaattcatggagaaataccgccgggaataggccgcctcatcccgcggtcgaggcgcagcagtacgagcaggagcagggtcgtggccagttcggccgccggtaccgcgagccagatgcccgcgacgcccgccagccgcggcagtacgaggaagcagaaggccatcagcacgatgccccgcagcacggtgagccccgtcgccagccgtccccgctcgatgctctggtagtagccgattgtggcgacgttgatcccgaaaaagggatacccggcggcgaagagcggcaggccgcgcacggcgattgcataggccggggcgtcgggcgtcaggaacagccccacgatccgtgggctgaacagccacgtgaacccgaataccgccagcccgcaaacgaacgccgtgccgagtgccatcgcgaacgcatccctgccgcgccgcatcagccctgcgctgtagttgtagctgatgatcggctgtgccgactggatgatgccgttgtagaccatgaagatgatcgggaagatatagcaggcgatgctgtacgccgccacgccgtccttgccggtgtagcggatgaacgtgtagttacccacgaccatcaggcacgaaatggccagctcgctcagcagcgccgggaacccgatgtaggtcatgtagcccagattgcgggctgtgaggcgcaggctcttgtaactggttttgaacttcacgaagtgcagcgtccggctgtggcgcagcatgtaccgcagcattacgcccgagcctactatgtagccgactcccgttgcgatggccgcgcccgcgagcccccacccgaattcgaagatgaagaggtagtcgagtacgatgtttatgcaggccgccatgatgttgcacgccatggcgaaccggggcgcgccgtcgagccgcacgatgaacatcaggatgttgaagacggccagcggcgtgaggaagagcgtgaaccatacgaggtattcgcgcgcgggaaccatcagttcgggcggcgtgcccaacagcagcagcaacggtttgtggcaaaggatcagcagggcgctgagcagcacgatcagcagtgccggtacgaagagcgactgcgtgatgttgatctgggccacgcggcgtttgccctgcgccaggttcaccgatgccaccaccgagccgcccatgccgaacatcagcccgagccccgtgccgagcgtgaagagcggggcggtgaggttgactgccgccagtgcgtcgctgccgatgccccggcctacgaatatcccgtcggtgatgacgaacaccgccgagaagaccatccccatgaccgtgggaaaaagaaagcggcggaaaagtttgccgactgccgtgcctttgtaatcgatactgtcgcgtaacataattgcacctctttttattgaggtggtgcaaaagtaaggcattctgcgccgggaaaagttaacttatggtaatttccgtattatttgaccccggcgcggatgcggctcaggctttggggtgtgaggaaaaggtaggccgcgaggtctttcagggcgatgcgctgcagcagctggggatattcgcgcagcatgcgaccgtactgttcgcgtttgccgcgccaggcgtagtcggcgaaatagtcctcgtggcggcgcaactgctcctcggccatgcgccgtccccagtcggccagttcggcgttcccggcgaaaagctcgtccatgcgggcacgcgggatgcgtaccagggtcgtgggctccatcgtttcgatcgtctggcgcgataagccgccgggctgtgtgccgagtgtcgaggttgccgggtcgccctcgaacgagaaggagaagatgacgcacttgtcctcgcgcatgacatacgtgcgcaccgaaccctcggccacgaagcagacgtccgggtcgcgctgcccctcctcgatgatgacctccttgcgggcgtgttgcgtcagcgtggcggattgcatgagcaggctcgtgccctcgtccgagagtgcgtagcgttcggtcaatatccgtgcgaaatccatgcggcaaaggtacgcttttttcggcaattgcgaaaaggccgcctattccgtcgttgccggaaggtttttttgccggtttgtcatgtcggaatagcaggatgtgtgacaatttgtgacattttttcgttttcatgcggctggcacaggatttgacctgttacggatgaaaccgctccggaaggggctgcgaaagaaaataaagttaaaccaaaataaaacaaggaggacaagattatgacacctgcaagaacgaatcagaactggctgccgagcattttcaacgaatttctggataacaactggctcgccgaacgccgcaacgccacggctcctgccgtcaacatcatcgaagacgaagacgagtacaaggtggaggtcgctgctccgggcatgacccgtgaggatttcaaagtccatatcaacgaggacaacgagctgatcatctccctggagaagaaatccgaagagaaggaggaagacaagaaacgcaagggtacctacctgcgccgcgaattctcctatacgcagttccagcagagcctgctgctgcccgacaacatcgagcgcgagaaaatttcggccaaggtcgaaaacggcgtgatgaccattgacattcccaagaagaaggtcgaggaactggccgccgccacgcgccagatcgaagtgaaatagggcttgcgagcccgacgtgggaggggagtgccttacggggtactccttttttcgtggcatgtcccggcataataatagcccttttatacttaaaaacgtccacgggcggacaattcatccgtaaatccgctatctttggggcatacgcgacagcatactaaaccgacgaacatgaaagtaggattgttcataccctgttatatcaacgccgtctaccccggggtgggacgtgcgtcgtacgaactgctctcgcggctgggctgcgaggtggattatcccctcggacagacctgctgcgggcagccgatggccaatgccgggttcgagaaggatgcccgggcgctggcagaacacatggatgcgctttttgcgcagtacgactacgtggtcgggccttcggccagctgcgtggttttcgtgcgcgagggctatccgcggttgttggacaattaccgcgagcatgcctgcgtcgattcgcgtatctgggagatctgcgagttcatccacgacgtggtgaagcccgcgaagctggatgcacgtttcccgcaccgggtgagcgtgcacaactcctgccacggggtgcgcaaaatgggactgtcatcgcccagcgagctgaacgtgccctatatgtcgaagctgcgcgacctgctctcgctggtcggggacatcgacatcgccgagccgtcgcgccgcgatgaatgctgtgggttcggcggcatgttctccgtcgaggagaacgccgtgtctgtctgcatggggcgcgacaaggtgcgcgatcacatggctacgggtgccgaatacattacgggcgccgactcttcgtgcctgatgcacatgcagggggttatcgaccacgacaaactcccgatccgcaccatccatgccgttgaaatcctcaattcgaagttatgagcacccactccaaagccgccgcgaaattcatcgccgacgccgatcgcacggcgtggcacgacaaggcgctttacgccgtacgcgaaaagcgcgacaagatggcacgcacggtgcccgaatgggaagacctgcggcgcatgtcgtccgagatcaagcgccatacgctgagccatctggggtattacctcgaagagttcgaacgcaacgccacggccaacggcatggcggtgcactgggccgccgatgccgacgagatgaacgccacggtgtggcgcctggtgcaggagcacggcgggcggaacctcatcaagagcaagtcgatgctctccgaggagtgcgggcttacgccctacctgcgcgagcggggcgtcgatgccgtcgagagcgacctgggcgagcggatcatgcagttgctggagctgccgcccagccacatcgtgctgcccgccatcggcgtacgccgtgaggaggtcggcgagcttttcgaacgcgagttcggcaccgagcacggcaacagcgatcccacctacctgacgcatgaggctcgccgccagttgcggcccaaattcctgggtgccgacatcgccatgacgggcgtcaacttcgccgtggcttccacggggacgctggccgtctgtaccaacgaggggaatgccgacatgggaacgtcgttccccgacctgcatatcgccatcatggggttggagaaggtcatccccgacatgcgggcgctggcggtcttcacgcgcctcttggcgcgttcggggacggggcagcccgtcacctcctacacgtcgctctaccgcaagcctgcaccgggcaaacggatacacgtcgtgatcgtggacaacggccgctcggagtggctggccgatgccgcgcaccgcaacatgctcaaatgcctgcgttgcggcgcctgtatgaatacctgccctgtctaccggcgctcgggcggctattcctactcctatttcatccccgggccgctgggcatcaacctgtcgatgctgcgttcgccgaagctccaccacggcaatgtctcggcctgctcgctgtgctactcctgctcggacgtatgcccggcgatgatcgacctcggggaacagatttacgcatggcggcaggagttggcgcccatgcatctggccgacccggtaaagaaactgacggtcaaaggcatggacttcatcatgggagggcgacgacgattctacggcggcatcgcgctggcccgcgtcgcggagcatctcccgcacgccgtgctcaacaaccggttcaatccgtggagcgccccgggccgcgacatgccgccgttcgcccccaagacgttcaatgccctgtggaagcggggcgaggtaaaatccggaaaaatgagtaaagatgaataacagcaaggaaaacatactgaaacggatcgccgcggcgggaatgcccgaatacgcataccccgacttcggctacgaaccccagcatttcgacgaccctgcggcgatgttcgcccagcggctccgggcggccgggggcgaggccgtatggctggacggggcaacgacgctcgatgaggtcgtacgccgctgctaccccgatgcgaagagtgtcgcttcggcactgcccgaagtgacgctcgccacggtgaatcccgaccgggtcgaagacccgcgcgagttggtcgacatagacttgggggtcgtttcgggggcgttcggcgtcgccgagaacggtgccgtgtggatcccgcaggacatccgccacaaggcgctctatttcggcgccacggcgctgatggtcgtcatcccgcgcgatgcgctggtcgatacgatgcacgaagccgtcgtgcgccccgaagtcggggacttcgcctacgggtgtttcatgtcgggcccttcgaagacggccgacatcgaacaggcgctggtattcggcgcccacgggccgatgtccgtcaccgtcgtgctgcgctgaccgtctgccccgggagcggggagtatgccatgtgccggtcgggatttcccgtgcctttttctgccgcggcagccggctttttcgcgggcttgtttttccggtacggattttttatctttgccgtatgacgaccgaactttgcgcctacagcgtcgaggcgtgcgagactgcccgccgtgcgggtgtcacgcgcgtggaattgtgtgcctccccttacgagggcggcacgaccccttcggctgccgccatccgtatggcgcgccgtatcggagggttgcagctcagcgtgatggtgcgtccccgcggcggggatttcctctattccgataccgaattccgccaaatgctcgaagaggtgcgcttcgcccgcgaatgcggcgccgacggcgtggtcttcggcgtgctcacccccgacgggcgggtcgacgtgcagcgtacggctgccctggtcgccgaggcagggctgatgcagaccaccttccaccgggcgttcgacatggcgtgtgacctggaggaggcgctcgaagcggcggtggctgccggatgccgccggatcctgacctcggggggccgcaatacggccgtcgaaggcatcgacacgctgcgggcgttggtggcgcaggccgccgggcgcatcgaactgatggccggcagcggcgtcaacccctcgaatgtgcggcagctggcggccacgggcgtcgatgccgtgcatttcagcgctcgcagcgtgcgtccgggcggcatggttttccgcaacccgcatgtttcgatgggcggctgcggcgatgtttccgaatacgatcttctttgtgccgacgaacggctcatccgacaaatacttaccctgctcgaaccatgaaacgcatcatcttccttttgctgggggcgtgtctctgtacctgcggccgttacggctgcggcgtccctgcccgatacgaaccgctgctggatgccgcgctggccggctgcccgcgcgccgacagcctgcggcaattgctgcggcaaactccgcgcgagcagcgcgaagggatggcctttctgatcgcccacatgccccggggcgaccgcgacacgatgcgcctcgacctgctgcgcgagaatgtggaatatgcctaccgtgcccgccgggactacccttggacacgtgcgctgcccgattccgtcttcctgaacgaggtactgccctatgccgccgtggacgaggtgcgtgacagctggcgggcggatttctacccgcgcttcgcccggcgcgtggcgctttgccgcgacatccgcgcggcgatcgactccgtgaaccggaatatcgcgtccgacgtcggggtggagtacaacaccgcccgcgaaaagaccaaccagagccctgccgagtcgatgcggcagcatatggcctcctgtacggggctttcggtgctgctggtcgacgccctgcgcgcggcgggaatcccggcgcgtttcgccgggactcccgcgtggcacgacgaccgcggcaaccacagctgggtcgaggtatggatcggcggccgctggtatttcacggaatattacccctcggggctcgaccatgcctggttcctttcggatgccgggcgggcgctcgacgaccgtatgcacggcatcttcgccgtgtcgttccggcccaccggcgactggtttccgatggtgtggagcgaggactcgcgtgaggtgcacggggtggacgtctcgcagcgttaccgcgacctttatgcggcctacgagcataccctcgtggcgcagggaaggcatacgacggtgacttttgtgatgtacgacagtgcggcgcacgaagggcgctcggacgcccgtgtggcggccaatgtcgatgtattctgcggtgccgagcagatgggcggaggccgtacggccgggccgaggcaggacatgaacgatgcgttgaggttcctgctggaaaaaggcaagtcctatacgttccgctacgagaacgcccgcggcgaaacgacggaggtcacggccgaggtgggcgatgccccgctgaccgttacgggatacatgcgatagcgccgtcccccccccctgttcgggaatcctgtccttcaccgcttcaccgccgatggtgcggagcgggctgtcggctcgctccccgaaaatggaaatcacccctgccggagataactcgggcgggggtgaagtcgtaagaaccgggcttgtcggacagcactttccgttagggctgcttttccgtatccgtgccgggcacttcggcccggaagtcgatgtcgattcggtcgatcagcaggctcggaatcggcacgagccctgtgtgcggggcgtgtccgagttccatatgtaggatggggtagggccggcccgacgggtcggttgcgtcgcgcccggcggtgcggaatcccatccgttcgtagaaacccgcggcctgcgggttctgctcgttgacgtcgacccgccgcacgccgcaatgccgtgtgatgtggttcacgagttgccggccgaatcccttgccccgcattccgggggcgacgaacagcatttcgagcatatcgcctgcgacgcctgcaaaggcggtgaatccgccgaactcgtttgtccggctgtcgcgtcctgtttcgcccgtttggcctgtcgcggtcgatcccctgttcccgtctgtcccgccagacccgaaggcccggtctgttctgtcgtcggtgtcccgtatgacatacaggtctacggccgcaagtgcttcgttgcgaaccatctgccggaagaaggggatgtcctcctcgctgaggaaatcgtgcgtcgcccgcacggaggcctcccagagggcggtcagtgcgtccagctctgtgggcgagggttgcgagaggtgttcgatcatactgccgtaagggttacaataaggttacgggcggtttccgccgcgcgaagttccgggccaaggcggctgcaaagggcgtgcggaacgtgcgggcaccgaaggcgcacccttttacgcaggcgcagcagcggatgcagcgtgccgggtcggtgtgcagctcgtcgccgtgtgcgatggcctgcgtggggcacagtgcgacgcagcggccgcattgcgtgcagcgtgcggcatctccctcgggcagcaggacgacggggttgcgtttctgccggcggcggtagcccagtacgaaccggatgaagcgcagcttcgggaggagcggcgtacgcggttcgcgcagtttcgcggggtcgatggggacaagggcgcccgttgcgggggccttggctgtatccacggtgccggcttgggttgcccgggtggttgctgcggtgtcggatgctgtttccgggttcctgccggaggaaggccctgtttttgctaatttttcgcgcacctgagccccgaatgccgtggcggcagccagatcccgtgcgtcggggcgtccctgtgcgatcggggtttcgggcgtgctgtacgaatgctcgccgacgaatgcccctgccgctacgggcacgaatccccgctccgcgacgaacgaggcgagctctgcgacggccgtgccgaacgagcggttgccgtagacggccaggacgatggccggagtgccttcgccgcggatctcccgcaggcgttccagggctgcgggtgccacgtgccctccgtaaaccggcacggcgaatatggcgacggcttcgcctggcagcggagcgggttgtccggcggggtaggtcaggtcgatggccgtgacagccggtgccccgtgcacgcttgccgtttcgttcctgtctccggcggcaggctccggtgccgccgcggcggttcccgcttccagggtttgcccggcagggggctccggtgccgtgttgtctccggcggatgcccgtgcggctctcccttccgtccctgccatcccctgcgccacggctgcggcgattttccgcgatgtcccggtaggcgagaaaaagagggtgtaaatgcttgtcgttttcatgttcccggcagatttttttcggtgtaaagatagcgtttttccggctgaatttttatatttgtccggaaacctgtaaaattgagaagagatgactatgaagatttttgcatgtgcggccttgctgcttgcgtcatgcggcggcatgcagacggcaggggagcaggcacagacccccgaaacgaagaccgcggtgaagcacgggccggagatcgcactcctgaagcccgacccgaaatcgggcatgacggtcaacgaagcgttgcagaaccgccgttcctggcgtgaatatgctcccgaagccctttcgctcgaggagttgtcgggcgtgatgtgggcggccggcggcatcaaccgcccgcaggacggacggctcacggcaccttcggcactggcgttgtatcccatccgcatttatgcgtttttccccgagggcgtttaccgttacgatgccaaggggcagaaactggtgcgtgtggcggaaggcgaccgccggagcgtcgcaggggcacagccgttcgtgttcacggcgccgctcaatctggcttatgtggccgacatgtcggtctatgaaggtaagaatattcctgccgggcatgtccgctacctttgcgggcaggatgccgcgggctatgccgaaaacgtcaacctctacaccgcgggccatggcctgaagtcgatcacgcgcggcagtgcccccgaggccgagctgctcgagaccctcggccttgaccccggccgctacttccttgcgctggtgcagacggtgggcaaatagcggtgtgcccctggaatggaaaagggacggcttttaggccgtcccttttttatttgtccgcagatgcggctaaggccggtcggatggcgcgccccggctttggttcggtcacggcctttcgcccgggctgtcccgggcgcgttccccggtgttgtcctgaagactgtttccggctgttccgtccttagtctgccgaaagcgtctcctttgccgcatcccggccgtcgggttcctccagcgggacgatatagaatccgcgtcccggtgtccactccacgcagaaaagtttttccgcatcggggtatcccgcctgccggaggtggcgcaggagccaccgcttgcccttgccgctgcgtttgagtgcgtcttccatgaccttgcccccgttgacgagcaggtacgattctggcggttcgttgcggcgcgatatggttatccgtccgttggtttcgaaacgcacgtcgtcgacgtcgaacatcgagaagatgccgttttcgcgcagcatggtgcggaactgttccatttcgagcccgttgcggcggaattcgcgcatcaccagccggcggtcgcggacgagcatcaccgagtcgcccttgatcgccctgcggatgcggtggaagcgcatcaggtagcgcagcgagacgttggccgccgtccacaccgcgaaggcgaataccagataccataccggggtgtcggggttgtagattacgccgccgaccagcgccccgagtacgaacgagtttaccgaatcgaggggtgtgagctgtgccatctgggtcttccccgatatgcgcaggaaaaagatcacgcccagcattccgaccagcagtttgatggcgatggatagatacatggtgtgcaggttttatttttccgtttcccctcagcctgcaaattccgcgcaaatccggaaaaacctgcccgggcggtgaggagcccgtcctgcgaatagcgtggtacggccgtatctccggccgccttcctcgggggctaaaggccgtattccgcggcgtaacgccacaggggtgcggccatcagcgcctgccggatgcggccgctttcgagcagctcgcgaacctcggcgcccgagaacagatgtacgcggatgtcctccgtagcatcgaggtgctgttcgcccaggcgttccacgcccgtcgccaggtagcagtacgtcaggttgttctgcgtcgaggggttgggcgccacgaccattagctcgcgccactggccgccgccgtaccccgtctcctcggccagttcgcgctgtgccgcggccagcatcgaggcatcgtcgggctcggccacgcccgccgggatttcatagtccgtttcgcccagcccgtggcggtattggtcgataaagacgaatttcccctctttcgtaatggcgatgacgttcacccagtcgggatattcgaagacgtagtagtcgggtatgaggcgcccgtcgggcagttcgatgctctcgtggcgtaccgtaaaccagggtttgcgggcgaggtattcgctggtgagaactttccagttgcgttttttcggattttccatggcggcgtcttacttgtcggatgcaaaaatagcgaaaaatagttatctttgtaacatccgaaaaaaacatccatgttgtcccagaacgaacgaaagcgtattatcgccctcatcaaccgcgaagtggtgcccgccatcgggtgtaccgaacccatcgccgtggcgctgtgcacggcgcgtgccgccgaactgctcggctcgcgtcccgaaaaggtcgccgtgcgcctgagcgccaatatcctcaaaaacgccatgggcgttgggatccccggtacggggatgatcggcctgccgatcgctgtggcgctcggggcgctcgtcggccgttcggagtaccggctggaggtattgcgcgatgtgacgcccggggccgtggagcagggccgccgctatatcgatgaaaagcgcgtatgtatcgacctgaagcagggtatcgccgagaaactctatatcgaggttgaagccgaaggcgccgggcaccgggccgtagcggtgattgcgggcgggcatacttcgttcgtatacctcgagcgcgacggtgaggtgacgctcgacaaacgtacggcctcggcggccgaagaggatgggggcgaagtgcccctcacgttgcgccgggtgtgggagttcgccacgacggcacccctcgacgaactgcgcttcatcctcgaaacacgccgtctgaacaaggctgccgccgagcaggctttcgccggggagttcggccactgcgtagggcgtacgctccgttgcgagcgcgaacggaagattatgggcgacagcatcttctcgcgaatactgtcctacacctccgcggcgtgcgacgcccgcatggccggggcgatgatccccgtgatgagcaactcgggaagcggcaaccagggcatcgcggcgacgcttcccgtggtggtctacgccgagcagaccgccgccaccgaggagcagacgatccgtgcgctggtgctgagccacctcacggtgatctatatcaagcagagcctcggccgcctgtcggccctgtgcggctgcgtggtggccgccacggggtcgagctgcggcattacctacctgatgggcggcgcgtacgggcaggtcgcggcggcggtgaaaaacatgattgccaaccttacgggcatgatttgtgacggagccaagccgagttgctccatgaaactcacgagcggcgtttcgaccgccgtgatctcggccatgatggcgatggacggccattgcgtgacgcccgtcgagggaatcatcgaagaggatgtcgacaagtgcatccgcaacctcacggccatcggccgcgacggcatgaacgagaccgacagggtcgtactgggaataatgacacataaatgctgactatgaataaactgaccatgaaaatgaggctccttgcggcgttcctgctgctcggcctttggggcgccacggcccagaccgcccgtgagcagatcgccgccatgcccgagcgggcgggcgggatttaccactcgtacgagtacctgcccggccccgccgtacccgccccgaagggctatgttcccttctacatcagccactatggccgccacggcagccgttggcatacttcggaaaagatctatgccgagccgctggggatcctgcgcaaagccgactcggccggggtgctgaccccgaaggggcgcgacctgctggctaaggtcgaggtcatcgcagccgatgcccgggatcgttacggcgacctctcgccccgcggcgtggcggaacaccggggcatcgccgaacgcatgtataaggcctatcccgaggtcttttcgaccggggacggccgcgaatgctttgtccagagccgttcgacgctcgtgccgcgctgcatcctgagcatggcggccttcaacgagcgcctcaaggagctgaaccccgaaatccggatgacccgcgaatcgagccagcgctacatcccttatatgagcaacggcgcagggttgaattcccagcgaaaggcatccggtgccgtggccgacagcctgcaggatgcccgcacgcatcccgcccgtctgatggcgtcgctcttctccgaccccgccttcgtggaacgcgaggtgaaaaggccggcgaaactgatgaaccagctgttggcgcaggccgccatcatgcaggacgtcgaatacctgggcatctcgctctacgacctcttcaccgaggaggagatatatgccgcctgggaagccgagaatttccgccgctacgtgatgttcggcccgtcgaagcgtttcggcgacccgatcatcgccgatgccaagccgctgctgcgcaatatcgtggagactgccgaacgggtcgtcgcgggggaggagaacctctcggcttcgctgcgtttcggccacgacgtgaacgttattccgctggtagcgctcctgggcgtcagggaggcttccgggcgcgtatggacagccgaggaagctgccggggtgtggcagatacaccgcgtatcgcccatggcgaccaacgtgcagttcatcttcttccgcaaccccgagaccggcgacgtgcgggtgcgggtgctgcacaacgagcgcgatgccgaactgccgatcggcggcggcccctattatccctgggagaccctgcgcgactactgcaagtcgctctatgaatgacatgcctcggtgccgggcataaaaataaaaggggctgcccgccggttccccggaataaaaatcaccctcgccagaaatgcttctggcgagggtgattttttaagccggcttgtcgggcaaccttttccgcggcctttccggggtggacgccgatagtcccctctttggggacggctaatggaagatggtcttgacgatgatgttcgtggcaccctggtgacgggtggtgtagtctttggctatacggcttgttttcagcaggaaatcctcgttgtcgcgcaaggggatgaaccacgtgcgcagttcgtcgtagtttttcaccgaacgggcggcgccgagcgtcaccaggtcgcgtgcctccttgaatttcgcgtagttggggccgaatgccaccggaagcccgaatgtcgccgcttcgagcgtgttgtgtatccccacgccgaacccgccgccgatatagctccacgtcgcgtagccgtagaccgacgccaggatccccaccgtgtcgaggatcagcagttgcttcgacccgtaagccgtgtggggcgtgcactgcgtgtagcggagcgtcccgcccttggcctcggccgcgaggcgtgccatgcggccttcgtccatctcgtgcggagccacgatgaatttcacgtcggggttgtcgtttatcaggcggatcagcagctcttcgtccgggttccaggtcgaacccgccacgaagaggcgtttgtcccccttgaaccggtctatgatgtcgatatgtttggctgctgcggcgatttcggccacgcggtcgaaacgcgtgtcgcccgctacgatcacgttgtcgaagcccagcccggccagcagctttttcgactcctcgttctgcacgaacatcacgtcgaaggactccagcgcctgcctccacatgccgccgtaggggcggaagaagatcgagttgcggcggaagatggccgagacgatataggtgcgcaccttgcggcggcgcaggtcgcgcagcaggttgagccagaattcgtattttacgaagattgcgatttcgggatgcgccgcatcgaggaaccggcgggcgttgcgcggcgtgtcgatcggcaggtagaagatgtaatccacgccctggtaattcttgcggacttcgtagcccgagggcgagaagaacgtgagcaggattttgtattcgggatgggtcttgcggatgcgttcgatgatgggacgcccctgttcgaattcgccgagcgacgcgacgtgcacccagacgatgcggtctgtcgggtcgatggtctcggccatgcgtttatagagatctttgcgcccgtctatccatagctgtgccttcggatgcctcggtgcgaccagccggatgagccacacatagagtgtcagaccgaaattatataaccacatcggtgtttacggtttgcggtgttgaaatactatacgttaacgttcgccgggcgggcccgggttttccggccctgtacgcagggctttcattttcagtgcgacaaaggtagtataatttgtcggaaatgcaaaattaccagttgtattccatcgcctgctccaccaggcgtacctccatgtgcccgtcgggcatcacgtccacggccgccaggtcgaactgcgcctcgtcctgcccgcccgttgcggccaggtaacgcacggccgcccgtgtcagtgcgcggaatttctgcggcgtgacggcagtctcgggcggcgtcagggagccggccctgcgggtcttgacctccacgaaatgcacgatccccgccttgcgggccacgatgtccagttcgtagcggccgctgcgccagttgagggcgcagatttcataccccgcacggcggaggtattccgccgcggcccgttcgcccgcacgtcccgttttggccgtcgtactcatgcctgtcagtggatgatgcgctggatcgagttggcccgctcgaaggcggccttcagcccttcggcgtcgtcgcgctcgatcatcctgcgcatgatctgcaactggtggatatgctcgcgcagcacgtccagcaggttgtatttgttgcgcagcatgatcggcacccacgtggcggccgagctcttggccagccgcacggtgctctcgaacccgccgcccgccaggtcgaagatgtgccgctcctcgcgttccttctcgagcacggtcagcgccagcgcgaacgaggtgatgtgggagatgtgcgacacgtaggccgcatgcaggtcgtgttcctcggcgcccatgtagacggcgggcgcctccagcgtgcggaagatccgctcggccatcgccagcgcgtcggggtcgctccgctccacttcgcacaatacgacgttgcgccccgtgaaggcgccgtgctgtgcggcgcgcggcccgctgtattcggtgccccacatcggatggacggctacgaagcgcccgcggcgggcgtgcatcgagataacctcgcacaattcggccttgatggaacccaaatccatcaccacctggctgccgtttacgcggttgagggcttttacggccatcaggggaattgtatcgacaggggtggccagcaccacgaggtcggcctgtgggatgccctcttcgaacgccacgatgcggtcggccagcccgagccgcactgcctcggcggcgttaccctccgaactctcgacaccgagtatttcgtccgcgatgccgcggtcgcgcaacgcgagggcaaaagagccgcctatgaggcccatgcccgctatcagaactttcatacctatttatataaatatttttgattgcggccagaagcgcttccggctggggattagagcaggaacgacaggtcgctgcccggttgtacttcgaagggctccatgcccttgcggaacatgcgcatcgggcgcttgccgatcagttcgagtttcccctccgcatggcggagcatgcacccttcgcgcagcccggcgacccagcgccgcgggttggcctcgatgtattcgaggatgcgctgctcgcgcgtctctccggcgtgcccctcggggttggcgtcgaggtagtgggggtttatctggaactttacggctccgacagccctgaacgactgcggctcgacgatgggcatgtcgtttgtggtgcagatggtgggacatgccacgttgctgcccgccgaccagccgacatagggagtcccggccttgattttacgcaggatggcagccataagcccctgctcctgcatcttttttgccagcgcgaaggtgttgccgcccccgacgcacagggcttccgcctcgcgtaccatgcgcgcggggtctttggcccggtgtaccgagcgcacgcggatacccagctccgagaagcgtgcctgcacctttttttcgtactcggcgtaggaaaatgtcacggcggcataggggacgaatacgatttcgctgacgccctgcaggaaacgcccgatttcgggcatcggatagcggaggtattcctctccggcgttggtcgaattcgagattagaagcaatttcataagcctatggttttgaatcggttaatttgaaaaatgtgctaaatgtcgaaaaagttgtgaataaaaaaaaggtctgttttgtcaaaagtaataaaaaaagtgttacttttgcgcaaaattaccccggaaatacgaaagaactatttccaaataattgtttaactaaaaaattaaaattatgtcagaagttcaatcaaaagttgtcgagatcatcgtcgacaaactgggtgtcaaggaatcggaggttgtacccgaagcaagcttcaccaaccatctgggtgctgattcgctcgacaccgtagaattgatcatggagttcgagaaggctttcgatatccagattccggacgaggacgctgagaagatcgctaccgttggcgacgctatcaagtatatcgaagagcacaagaaataatttataaaaagagctttcacagcctcttatagccttaaatttatgacagaaagaagagtagttgttacgggcatcggtacgatcaacccgctcggtaataatattgaagagtatttttcgaatttggagaagggagtcagcggtgccgcaccgattactcatttcgatgcagagaagtttaagacgaagtttgcttgtgaagtaaagaattacgactcgaacctctatttcgaccgtaaggaagtacgcaagtacgaccttttcacccagtatgccctgatcgcggccacgcaggccgtcgaggattcggcgctcgacctcgagaccgtcgacaaggagcaggtgggtgtgatctggagttcgggcatcggaggaatcaaatctttcttcgatgagtgtctgggctgggccgcaggggatggaaccccgcggtttagcccgttctttattccccgcatgatctccgacatcgctgccggcttcatctccatgaagtacggctttatggggcccaactactgcacggtgtctgcgtgcgcatcttcgaaccacggtatgatcgccgcgttcgacgccatccgctacgggaaggccgacgtgatggtggccggaggctccgaagctgcggtcaacgagccgagtgtcggcgggttcaactccatgcaggcgctttccacgcgcaacgacgacccgcagcacgcttcgcgtccgttcgacaaggatcgcgacggttttgtgatcggcgaaggcgccggtgccctgatcttcgaggagtatgaacatgccaaggcccgcggtgccaagatctactgcgagatcatcggcggcggcgcttctgccgacgcttaccacttcaccgccccccatcccgaaggaaagggtgccatgaagtcgatgcgcgacgccatcaaggacgccggcatcaaacccgaagatatcgattatgtgaatgtccacggtacctcgacccccgcgggcgacatccccgaactgaaggctgtcgccggtgtgttgggcgaccacgtttataacgtcaatatctcttccaccaagtcaatgaccggtcacctgctgggtgctgccggagctgccgaggccctggcctgcatcttcgccatcacgcacggcgtggttcccccgaccatcaactgcgagaacctcgacccggagatcgacccgaacctgaacctcacgctgaacaaggcgcagaagcgcgaagtgaggtgtgccctgagcaatacgttcggtttcggcggacataactccacggtcattttccgtaagatctgattaccctaaaaccgtccgggccgtgttcgatttcatactgcgcccccttagaaggaatttcgggcgggataaggcgtattataaggttgtcgatgatatgttcgggtttatcccgaacaacatcgaactttacaagctggctttgattcacaagtcagcttctttggttctggaggatgggcgcccgatcaacaacgagcggctcgaattcctgggcgacgccgtgatagaggccgttacctcggactaccttttcatcgagtatcccgaccgggacgaggggttcctcacgcagctgcggtcgaagatcgtgtcgaggcagtcgctcaacgagttggccgtgaaaatcggcctggatcggcatgtcatctcgaacgccagtacgagcattacccagaaacacatctacggcgatgccttcgaagcgatgataggcgccgtttacctcgaccaggggtatgagttcaccaaccggctgctgatcaaccggatttatttccaggccctgaacctcgacgaactgaccgagtctgagaccgacttcaagagccggctgatcgagtggtgccagaaaaaccacctcaagatcgtattccgcacgggcaacgacaaggagtactcctcgaaccaccccgtattttactccacggtgctggtcgatggcatagaggtgggacacggctcgggcgaatcgaagaaagaggccgagcagcatgccgcattctccgtggcggagtacatgaccgacgagcagtgcgcgtcgctgttggacagggtcgaccggctgacgcaataactttcggttataatccggtgctggcggaaagcccggccgatgccctgggccggccggatgcttgcgatatgcggctcgattttgtgaccgataacttttccgcatactgcgcgatatagacccgatttcctgcctgatattttccctatgaagacgattaccgataagatgacggcgaggggcgtcgaatccctcagcgatgcggagttgctggccgtgttgaccgacgacgaacagacggccggggcgttgcttgcggcctgcggcggtgcgctcgcgcgtatcgcatcggaagatgcagcccgcctgcggatggtcggcgggttggggctcaggcgtgcccgcctgctgcttgctgccgccgagttcggccgccgcgtcgctgcgtcgcgggctgcggaggcggatgtcattgcgacgagcgacgacgtggtggcgctgttccgcccgcagctggaaacgcttgcctatgaggagtgttgggcggtttacctcacctcttccaaccgcattatcgagcgccagcgcataagccagggcggggtgcagggaacggtcgtcgaccataggctggttgttaaacgggcgttggaactgctcgccacacagctggtgctgattcacaaccacccttcgggggctgcggcgcccagtccgcaggacaaggtgctcaccgagcgtgtcgcacaggctgcggcgttgttcgacatccggctgttggatcacataatcatagcgcgcgaaggcgatttctcgttcctgcgcgccgggctggtgtagcactatttcttacttccggcattgccgcatattgctatgatagcgatggcaatgagcgcaatcagaagtttcatcgttcccgtcatttgtttgggtcgtttcgtcggggcgggacgcaaaagcgcggactcgatcctacatccacggcagaggtattggacgacccgaacggtagaatggtagaatatgcccgcgctgaaaaacagcgagagcatcaaccttcgttccttaccgtccgggaaagtgtccaattttctgccggaagaaaaaagccgatgcactttttttgtctcttatgtcggcggcccatggcaggccgccgtggcaaatatagaaataaattcgctacggaaagacgtagttcccaattattttgtacttttgtaattcggaaaataatttaaaaacaagataaaatgacgcaggaagaacttttcaagaaactagtggcgcactgcaaggagtacgggttcgtattcccctcgagcgagatatacgacgggttaggcgcggtctacgactatgggcagaacggcgtggagctgaagaataacatcaagcgttattggtgggattcgatggtcaagctgcacgagaatatcgtggggcttgatgccgcgatcttcatgcatccccgcacatgggaggcttcgggccatgtcggtgcgttcaacgacccgctgatcgacaataaggactcgaagaagcgttaccgcgccgacgtgctgatcgaagactggctcgccaagcaggatgaaaaggtcgaaaaagaggtcgagaaggcccgcaagcgcttcggggagtcgttcgacgagaccaagtaccgcgagacttcgccccgcgtggccgagaccctggccaagcgcgacgaggtgcacaagcgtttcgtggccgcccagaacgccaatgacctgaatgaactgcgccagatcatcgtcgactgcgagatcgtgtgcccgatttcgggtacgcgcaactggacggaggtgcgccagttcaacctgatgttctcgacccagatgggctcgacgtccgagggtgccaatacgatctacctgcgtcccgagacggcacagggtatcttcgtcaatttcctgaacgtgcagaagaccggccgcatgaaactgccgttcggaatcgcgcagatcggaaaggcgttccgcaacgagatcgtggcccgccagttcatcttccgcatgcgcgaattcgagcagatggagatgcagttcttcgtacgtcccggcgaggagatgaagtggtggcagcagtggaaggagacccgtatggcctggcaccgtgcactgggcttcggcgacgaccgctaccgtttccacgaccacgacaaactggcgcactatgccaatgccgcgaccgacatcgaatacaacttcccgtttggtttcaaggaggtcgagggcatccactcgcgtacggatttcgacctgggcaaccaccagaaattctcgggcaagaagatccagtatttcgacccggaaacaggcgagagctacgtaccctatgtcgtcgagacctcgatcggtgtcgaccgcatgttcctgcaggtaatgtcggcggcttacaccgaggagcagctcgatggcggcgattcgcgcgtcgtgctgcgtttgccggctgcgctggcgcccgtgaaggtggccgtgctgccgctggtgaagaaagacggcatgcccgaggtggcgcagcggatcgtcgacgacctcaaatacgattacaacgtcgtttacgacgagaaggattccgtcggcaagcgctaccgccgccaggatgccatcggtacgccgttctgcgtgaccgtcgacgggcagacgctcgaggacggcaccgtgacggtgcgccaccgcgatacgatggagcaggagcgcgtcatgatcgagtcgctgccttcgctcgtcgaagaggagtgctcgtaccgcaagctgttccggaaaatgaacctgtagcggggcgattatgggccggttcaatattttcgattccgacagcatcgtcgagggtgaaaaacggcgtttcccctggtgggcgctgctgctttgcctggcggccggaatgctggccgactggctgctgaggaactactgttatatgggcggcgaatccggcccgaacctttagtgcgtgggacggatacttgccatagactacgggacgaagcgcacggggattgccgtgagcgatccgctgcgtctgatcgccggggggctcgatacggtcgatacgaagggacttgaggcgtggctggcaaaatatttcgcctcggaggacgttagtaccatcgtggtgggaaagccctcgcgcatggacggcacgccttcggaaacgtggcgtttcatcgagccgctggccgtgcgcctgcggaaggcctggcccgacaaggaggtcgtcttccacgacgagcgtttcacctcggtgatggcgcaccgcacgatgctcgaaagcggtatcggcaagatggcgcgccgggacaaggcgctggtggacaagatctcggccacgattattttacagagttatatggagtttaacaaatgatttatccgatagtaatttatggttcggacgtgctgcgcaagccctgcgagcggatcacgcccgattatcccgaggtgaagaaactcgtggaagacatgttcctgacgctcggcgaagccgagggcgtcgggctggcagcaccgcagatcggcaagaatatccgcctttttatcgtcgattgtacaccctggggcgaggacgacccggagtgcgccgactacaagcgcgcctttatcaaccccgagatctatgccttgtcggaggaaaagaagacctacaacgagggatgcctctcgttccccggcatccatgccgacgtgccccgctcgctggcgatccggatgcgttatatggacgaggatttcgtcgagcacgacgaggagttccacgggctgaaggcctgggtcatccagcacgaatacgaccacatcgagggcatcgtcttcacagaccggatttcgcccctgcgccgcaacctgctgaaaggaaagctgatgaacctggcaaagggcaaataccgctgcgcgtataagaccaaatgacccgtatgccggggctatgcgcccgcaggggcgatccgcaggctgcgcaacaggttccgtccggcggaaaagttgttccggccatgcaaaggcaaacgggacgttcgcccggccggcaggctccgtaacggtgcggccgcggggagccggcggtttttccgcatggcgaaacaggaaaggggctgcctgacaagctcccaagataaaacgcacccctgccagagattgttctggcgggggtgaaatcgtaaaatgcggacttgtcaggcaagccggtctgcgtcaggaacggcctctgtcagaacctgtatgctgcgcctacgaagaccacgagcggattgctgcggccgctgtcgaacatgggttcgtatttcagacctgcggagatattccagcggcgcgcgacgttgaagtcgaaaccaccgccgacgctcatgccgaatgcccagtccttgatgtcattggcgacaacgcccacctggggatagacgccccaccagtcggcgatgcggaatacgtagtgggcgtcgaaattgatgtcgaccgaactttccttttccgtcaggacatagatcgacggttctatacgccagtgggaatctaaactgtaccggtagtaggcaccgattccgacggatgcgtcgcccgtattggtatagaagttcacgcgcgggcccacggcgctgcggtaattttccggcgtgctgcggtaattgcctgcctgggccgcattgcggttgttgtcacgggtgttgcggtagttgttgtcctgggcggacgccgtccaggcaaacaatgccgcggttgcgatcagaagaatttttttcatggctttcagtttaattttatatgaataatcaagtggttgtcaattagtcacaggatcccatcccggctggggacgacctctccgatgcgctgccttgtcgcctgaacgacgtacaacactcgtgccgtgatatgtgtttttcggattttgcggatcacacttttgcaacttccgccgtcgcttcctgtatccggcggaagctattcagccggcacgggatagccgggatcggggctgcggacatgaaaaatcccggcacttacgaatagaaacggtattaattactaatttttctaagaaagtgcaaagtccaatataatcaatgaattatgcactttctttcggagttccggttttcctaaaaggccccgataaggtaatgataaacgaggttacggtttccaaatcgttacctcgtttattttgctatattcttcatatgaatgtgatttacaatcagtttcgcatttattcatcttgtcttacgactctgtctcgattatatttgcaaccattaaaaagcagagcgtatgcgaagtaccttcaaggttctgttctaccttgaaaggaacaaagacaaaaagcagtttgccgtccccgtcatgggccgtattacggtcaacgggagtattgcacagttcagtgcgaagctcagtgtcccggagagtctttgggaagtcagcggcggtcgcgccaaaggcaagagtgtcgaagcggatcgcatcaaccgccatctggacaatatccgcacccagatcaacaagtactatcaagccatctgcgaccgggaatcgttcgttacggccgagaaagtcaaaaatgcctatctgggtttcggagacaaatatcgcctacttctcgaagccttcgagaaatttacctccgatctccaaaaacgggtcggcatagaccgtagttgtggtatatggaaacgctattgcagatccatcaatcatttacgttccttcatgcgcaaggagtaccgtgttagcgacatgcctcttgcagagctggaacagtcgttcatcgaacagtatcacgtctacctgaaatcggatcttggtttgcaacccacgacggtctgcgggcatctccgctgcctgaaatatgttgtcaagatcgccttcaacaacggctggatgccccgcaatccctttgccctttatcagtacacggccccgaatccggatcgtatttttctgaccgaagaggagctgctgcggatgatgacgactcctttgcgctataagcgtcaggattataactgcgacatgttcctgttctcctgttttacgggcatctgctatgccgatatggcctcgctgacctacgaccaactcgaacaggatgcgaacggggattggtggatcagcggcaaccgccagaagaccgagacgaaatatgtcgtcaaacttctgccttatccgctcttcctgctggataaataccggggccttgccggcaagtgctatctcttcaggatgtcttcgctggattccatcgacgacagcctgaagcatatcgcccgcgcgtgcggcatcgacaaacaactctcgttccaccttgcgaggcatacctatgcgaccacgatctgcctgtcgaacggcgtatctttggaaactctttcaaaaatgctgggacataagaacatcacgacgacgcagatctacgcgaaggtaacctatccgatgatcgcccgggaagtcgacatgctcaaagaaaagctggcggacaaattttcgggtgtctgactcctgctggatccaagcatattacgataaatctcatatcagtaagcgattaccgatataaatacctcataccttcgtgccatctttgcagcagtaacacttagaacaaaccgcttatggaaagtacggaagagatatttgaaatcgttcgggatatccgtgaggatatttcctatatgaaacggcatcgtaatatgctttgcgggatgccgattctggaagtcgccgaagtctgcgacctgctgaagatgagcgaccgccaactgcgccgctatcggacgagtggacaacttacgggctcccgcttcgggcggcgccttctgttctccaccgccgagatcacgcagttcatcgagcgtacggagttggagtaccagcgacgtaaacagcttaaaaaggctatccgcaacatctaatatccaatatcatgtcctctcaaacccctgaaagaacttactatctggtggagaccggcacttttgaaagcctgctccgcacacatttcgcactgatccaatccaccttgctcttcgagcacctgtgcagtcagagcgaccgcccgatgttcctctcatcggataaagtttgcgaagtgctggggctggaacgcactgtactggaacaatatcggcgtagacgcacgatcaaagcccggagtgtcaatggacagatgatgtacagcgcctacgatctgattacccttacggaacgtcttcagcgccgtaaaatccagcgtatgctctctgctgccgtgcgtttcgctatccgttgaatccgctgccggcatacggcacagggcattccttgcatacttcattttctgctctctttgtaaggccgtccgtttcgcaccgggcggccttttgtttcagacattccgacggaaatatacagataatatcccatatgatcgccgtctgcggggcaagatagcgtcaggggcttacgcccttttcgactttttcgcgcgatctccaccctccgggtcgtatcgcacgaaaaagaccgactgcgggctgcccctgccgctgaatattctgccccgaagccggcgtctcactttcatagcgggtattcgccggccgtatgtcaaaccaaaattcatttcgaagatgaagaatcagaagttcgaaattgcggtagcaggttacgactaccgcttcaagacctacgcccgggacggcgtggaggcagcggtaaaggtgaaatgttttctcaggcaacccgatgccgagtgtacgatccttacccctgcgttgaacgactacctgcgggaaactgaatcctgccgcagacaggctgttcagcgatgaaaaagtggatcgatcagtcgacctttgacgagctgctgctcgccaatgccggggataacatagaacgggccattaaaagcgcatcggccgtgttggaagcggtgcaggagttcattccggaggtggccttgttctaccgtgttacacatgctgcggagagcctgaagaactatttcgaggaagcatgcaccggcttccgcagaaacggtatcctgtttctcgtccgcagatacacctacccgaaaacctattacgagcttcattgcgattggtcattcctccgatatgcggacaactactcctacggcaaggctttcgacaagcaatccgaacctaatcgtatcggggttttcacaaaaaggaagatcgacgactgggtggaatacctcacgcaggggtaccggaatctcgagcggatcaatgcggagaacgaacgaaaaataatcgggtaccgcaaccggttggaggcgatacccgatgtggtttggctcgacaacaaaagccgctgccatatcacgcggcatgggctgacttatactttcgagattcggcagacagtttatagcgaacggatttcgttggatgatcggtgtcacacgctcgacgatttcctggcactttccgacaacaaactcacacttatatagcttgaaatgaaaatggcccatggaacgaaacattattatcgaaaatatctgctccgcatgccactgcggcgaacagcgtgccgaggaatatctggccggtgaacttcgcaacctgcgggaactgcgggatactggcgcgctgtgctacggcgatcttgaaacggcttgctcgggactgggactggacttcgattatacggactatttctgtctggccttgtcgcagaactaactccgatttacgatgaacaatctttgtttcaaccgtttcacactgcagacaggcgatgtggaagcccgccgcaaaatccttcgttggctggcgctcaattatcgcatgtacgaatacctcccctcggatggcgagattcgcggacgtttcatctcgcataagctctttcccgccggggcgttccggtgtcagatcgggaaactgcacggcgacaggacgctgttcctgcggattgtttctgcggacttatatacgctctaggtggaaggtaacgtctacctgagcggagcgtggtacagaagcttcctttaatcacctgccgtctgctccgaaacgaacgggcggcataatttcgatagcatggcatacgaatcatctatccctttcgcggacatcagggattttcgcgacgccgagatcaacggcatcccggctcttttcactacgtatcgccttgatcctgaaacccttcctgcagattttcacttgagcgaagttatgggcggccgaggcagcgattttcagtggctcgtgccgctggcttttgcaaacttcaccgggacgttcgtttcccggcagcccctccttcagacaggaaaggcatacgccggaatacgctggtacggcatctacgatgtgacggctttcgacgaatggtctgaaagcaacaacgacaactcttaaacattatgcgccgaaaattcaaacagaagatcagttataccttctacgggtattttatcctgcgtgtggctttcaagcctgtatccgataatcattaaaaacgctttcaaatgaatatacaggaatccgatttctggcgtgcgctggaaatcattacccgaaaaaccgaatcacggtgtcgttcaacacaccgatcgccgacaactactcccacggctatccgcatcttatccatgagaacaatgcctcggttctccaggagctgcatgaggcgggttattcactctcgatgacacctccaggattttgtgtcatgaaatattaacctcaaatgataaaaacataacatgttacaaattttatcaggacaagaaatgtacggtttgggagcgaacctttttcaccatcgaagccgccgcactgcggatgcagttctatgagatagacttcctatgtgagaatgttgttgccaacccgccatcaggtcataaggatccggggctgcacgatgcgactgcggctgctcgatctgcggattaccgaaaacggctacatgtgcgggactaccgtgatgattcccggtgctttcaaaggtgaagcgctgtcgcattatatgacgaaaaactacatccgcatagactcgtgccgaatcgcatggaaatgggacgggcagccctgccggtgcagttggtacggataaagttgaacttaaaaaaacgaacattatgaaaatcatgtgtcaggaacactacgacaaggtagtacaatacgccgaaagcatcggcgacaatatgctccgggagtgcctggagcgtctcgaacgcaggaaccggaatccctgctgcccgtgccagatcgaactttacagggacttcgcgccctattcgtacctcttcaagaaacgctatcccgacgggcgtttgggcctcgttggcggactggtctatcacggccacccggatcaatcgcattgtttcatcgacgagccatttcacggctggatgatccacacctgaaaagtcgaaatccgaatcgtcgatcccggccgaagcaataaatccggccgggattttgtttttattattaaatattggtaattttgcgtaaagacagcgtgattatgaaaacgacatcggtagccctcggggtttatttcgaggatttcatcaaggcaaaaatcgcacaggggcgttataacaatgccagcgaggttattcgggccggcttgcggcttttggaggagaacgagagccgtctgacggagttgaaagctgcgatccgcgaaggagtcgacagcggtgtagccgaggaattcgatccggaagagcatctgaaaaccctgaaagcgaagcgggcgaatggctgaaatacgggttacccgtaaagcggtcgaagacctctccgacatttggaactatacggcggataagtggtcggaacgacaggcggacacttattacaggttactgatcgcctcttgccgcaagctggcaggcaatcccgtgctgttcggccgggaatacaaggaactcggggagaaagcgtacggcttcaaggtcaacaaacacatcatcttttaccgtattccggccgacggggcgatcgaggtcgtacgcatccttcacgaacggatggatttaagcaacaggttcgcagattaactgccgttaaacatcagcgacagaacaagaaattgtcaggcaaaatgttcgggaggcggaggcttgcctttgtgcgattcctatttcccgccgctgcggttttcgtttcgttcgcagcatttccagaccggagagtttccccggatgccgtccgaaacagaacgggctgccggataactttccggcagcccgttcgcatcgtttgtgcctcgctgacttttcattccaaatcttttagcggaatggcgtagacgcaaaagtcgggcaggcgatccacgacgaaaagcgtattgcgtcgaatgaggcatttgtaaggattcttgaattcgacatcgccgattttcgtcaggtcttcgagcacttcgcccgattcgggattcacacgggcgaaacgcactttcgaggaatttccgaaactcacgaacatgcgtccgtcgtctgcgaagcagactccgcggggtgcctgctcgaaagtcagctcatgtgcgacgcccaaccttccggacatcagcagactcctgtccaggcacatgattttccgggagccgccgaccacggcatatatttctcccttggggttgcgtgcaagtgtattgtcttccgagcggctccatttggcacttgttgcgagcgtaggaacgctgcccgcatgctgggatgtcaccagatgctccggcatggcatacacggcatctagtatgctatataccaccccgtctgcgacggccacgctgaaagcacctcccgcgggcgtcaggaaattcaggcattcatacgtcttggcgtcgaacacgtagacgcggctgccggttccggacagatagattttatcgtaggagcggtagattcccgtgggtttgccgagcgtcacctcggctccggactggggatctttccatgcggtgatgcgcttcagcagtttcgggctgccggtcgagaggtcgaagatatcgaggctataatctccggcccgcatatcgttggcgacatagagcaaatcgtcgtagacatagaggtcgcgcggagcatagtcgcgctggtctactccggccgccgcatagtcgaaccggaaacgcagtgcgtcgcctttgttgccgccgctgtccgttttcagaaaatccgctccgccggccaacccgccgtccagctcgtccaactcgggatcttcgatgacatactggccgcggtagtaacgccccgcagctccgaaataggccagccggttgtcgctccactggtcgtaatggttgcgtcggctgtgcatgaaacgccgcgagtagacggggagctccttggtgaggctcaaccggagatagatcgactggcacatctgccgccagctgtatttgccgccgctctcgctgatgacggtattgttgccgtgggcatagcccatgccgtgaccgaactcgtggaagagcgccatgttgtcgctcttgtcgtcggcatagtgtcctagaaagcagacgtcctgcaaccccagcgtaccgccgccgcccaatccgccctgaacgtggagcgttccccacgcgaaactcggacgggtcagggattgcgaaagcagcgtctcggcgctcagcgtattgagcgcgttgtcgacgaagcggtggtcgttgacccgcagcgaatcctgatactcctgtgtcgagaacaggtaggccatgttcagcgacatggccacggcctcgcggcaatgcgcggggttcatggcgagccagtaagggtgattcgggtattcgaaattggagaagctgatgctccatgtagtcttgatggccgcgaacttcttgtaatagggatcttcgcattcgatgcgcagggcaagatcctccgatcccagatgcgggtttttcaggataagaatggtcttccccgccgcggtcgtatactccttgtccgctgaaacgaagggaacggacgtccggaattcaaggaacggaggcacaatgtcgaactgcgccagcaggaattcgtccggatagccctcgaccgaggcccagactttcaggtcgcggatgcgccgcggcgagtaggcccgcagctgcaactcccggttttcggtcacggagacctgaaccggccggcggggatcgaacgaacgttgcgccggatcgaggaaaatgctctccggttcatcgtcctgcaacatgataatatggttctcggaggtatagtcttccggggaggccatgtggataagccccgagagtccggccgcatccggatttccgccgagcggcgtatcgaggttctcttccgagcagttccagaataagatgcaaaggccggccgcagcgaagagtctgatttttgcgatgctgtttcgaataaacataaatcggtcgttttacaggtttgacactcggttgttattgtacggatggctcttcgacgatttcgtgcgtccgcatgtccacgaagaattcgcgcgaagctccgcgtgccgccggctccgaaacccgcagcagatgcctgcccgcccgttcgtattcgcggatttcgttcttgtgcacggccattttcaccagagcccgcttcgagatatccgagatccagaatacggaatcggcctgtgcctgaatgtatgcgggctgcgaaaaggcatgtcctccgattgccggcaggcttttgctccaattcccatcggcccggtcgtatatatggatgccgttcccgcccgtaacataatagcgttcgggagttacggccagtcccgtaggagcgaaggcgggtgaaagagcctgttccggcaggtcgagggcggcatcgttctccatctccgctgccgcagaaatatccagcacgtggattttccgctggttgtaatccgtcagcaacaggcgtcccgctccgtcagggcgcatacagtgcgttgcgaaattgttgttcacggcgcctaccgccgcactgcggcggtagcgggatacctgctggtagttcgcaggcgttacgtccgcttcccggtagaggcttacggtaccgttcttgtcccggctgaacaccagtccgtcggccacagccacggcctgcgcctgaaacacggcgttgttccagttgccgttgccgatgcacccggcgtattcgagtgccgggagcgtgaagcagtgaatcctcgactcccgttcggcgacatagagacggccggcagtcgggacgatggcttcgattctgctgtcgaaatgtttctgctcgccgttgaaatcccatgaatccagcgtgcgcagcaccttttcccgttgggtgtcgaagagcagcagactgttgtccgcattgcaggctacgaagagcgtgtcgcccaggctgcccagcgtatagggcgtgaagtcgtccgcggagagatcctccgccgtaagaacccgttcggcttcataggaataataccagtaactttcgtacttttcggcttcgggagccggagaaggcgatccttcgtcgcttttgccgcagcggacgatcgtcagtatgctcaacgtaaggagcaggtagcgcagcgacaggatggaagaggaaattttcgtttcggtagttccatttttcatcgttgtgttccgttaaatagtgtttatagcttcaaaaaacgaggggcgcaaagataattcaagtttcggacatttctaacgaccgggggcatttatttcgtatatcgacaacggatgtcgctcggaatcaatgcaatgtaaatgcaatttccggattgcggcggcctgatgccgtgtcaaggcatatcgtgtcggcctccatctgttctgcaatgctgcgggacgcttacggacgtgctctttatcggcctcgaattcttcgcattcggaatggttctctcctgttctttaccataaagtttataaataagattagaaatggctcaaagtaaaagataagaaatactttattttaatctcaaaggcattgctctccatcgaatagaacagaattaattgtcggcttgcatatccggatctcgtttatgtcaatggtgcttcccatttcagacaatttgacgatattttgtcgattgtttttatatggtatttacaccgataatatttagctatagtccgatatgatcgggggaacctcattcccttaatgaagattgctattatgtaaacttagcgatctttgggcgaaagaaaaactgttttgctttttgatattggaataaaatgagatgtgttttttcccgagaaccatgcggaaaagaaggaagcagactgcaagttggatgacgatattgccttgtgacgggtgcgctggattcggaaatctcctatgaacggtattgaagtatgataaggatgtggagctgagacttggcgccaaataaaaaattgtgatgttatcatcggtaagtgccgtagcctcaatactggaatcggggctagatgagatacgtgataccaactcaaatctgacggagctacggagttattgatggagaatatgacaatattcataagtcatatgtttctcgtctgcaagatcagtcagcgaaattccggaaacatagcacgtcttcggatgtttttgtagagtttccggaagctattatgtaattttaataaaacgagacattctaaatctgctattttgtcgtattataaaaatattatgtctgttattcggaaaattaataatatggaaaatcataattttgcaaccaataatcaatatatattgttatgcctttgtgtaatatacaagaacatttggggtgcctttattatgtgaaagaagaagacgcattgttccgacactatcggttagatgatggcggaaacatatcggatatgaacaatgaccgcagtgcattactctatattgccgaaggctgtctccatgttgttttagggcattactctccgcgcaaaatcgagaaaggacagttattgtttctaccgaaaaatattagattctgcggacagtctgtaggcctgagccgcttcgtggcaagtttctttgccggaggattgcctttttgtaataaatatgatctggctaatttgcggtgtcagatatgtcggtatggaacctgccaaaattcccttcctcttcgaaaatttcctcaaattgcttgttgccaaaaaatcgagtctttctttttgagtctatcggaatatctggacgacgggcttaattgcgctcatttccataaagtcaagcaggaggagttatgcattcttctgcgttgttattattcgccggaagagctttatacgctcttgaaatttgtcattggcaatgacgatcgtttccgtgatttcgtgctccggtattataaagatgtcaatgatgtcagcgcttttgccgcgctggcccatatgagtgtgcgtaatttccaacgcagattcaaagcggagttcaagcggccggttttggaatggcttaacgagcgccgtgctgaaggtatcctgcgcgaaatctgcgataccgacaccagtatttctgaaatcgcattgaatcatggctttacaactcaatcttattttacgaccttttgtaagcactatttcggaaagacacctttggacctccgccgccagaagtcggtatttgtaaaaggagacagtgtcttttctgccgaaattttagagaggacagacagtatgccggcgtcgaaaaatcgccggtgcttaaaatcaaaaaataattaattcacccaaaatctctgcaaaagcgtctatcaggcaactataaactaaaaaccaaatttacgaattatgcgaatcagcagattgatattgtttttatttttgctcggtagctgctggcctagcttcgggcaggaaacgatgcggacggatacaatcagtgtgaagatctacttccgtcaggggtattcgacttttgagccgtcgttccgtgataacgcagcacgcctggatgcattcgttgcacgacttcacgacgcggctttcgataccttgcggcaagttcgctccatccgtattgtaggcggtgcatcgcccgagggtgtttcgaaactaaacgagcacctttcaagcaaacgggcaaagaatctgatctcatggttcgaggggcatcttttgctgccgaacctgacgtacgatgtggaatcgctgggtgtcgattggaagggactgatccttctggtcggagaatcagatatgccttatcgagacgaagtgctggatattctgcattatacacccgagtggattattcgtaatggtaaggtcgtcgatgggcgcaagcgacaattggggatgttacatggcggcgattgctggcgatatatggaagagtatttctttccggaattgagaggtgctgatgtccgtgttgtctgccaggtcgtacgtcagtctgagtcggctgtctttccggcagagtgcgatacggtcgcttccacgtctcgtgatccgattgtggtcgtccggcgcgatacagccgttttccgcgatacggttcgtacttccgacgtcgcggagccgctttgtaaacctttctacatgtcgctcaaaacgaacctgctctacgatgtggctcttgtcccgaatatcggtgcggaattcttcgtgggccgcgggtggtcgatctgcggcagctggatgtatgcgtggtggaagagcgataggcgtcatcgttattggcgaacgtacggcggagagttggagctccgaaaatatttcggacgtcgggcgtccgagaaaccgcttacggggcatcatttgggggtttacggacagatctttacctacgatttcgaaacgggtggccggggatacatgggcggcaaaccgggcggtacgctttgggataagatgaactatgccgtaggcttggagtacggttattcattacctgtcggtcgtcgtttgaacctcgattttaccgttggagtaggttattggggtggagaatatcaaaaataccttcctgaagacggagactatgtctggatcgaaaccaggcaacgtcactggttcggtccgacgaaagcggaaatatcgttggtgtggttgctcggtcgcgggaactataatacaaagaaagaaggtaaacgatgaaaccgaagaagatgaaaaagcgtgtttgtacgatagctgccgccattcttgcagttttgacatcctgcgagcataaggaactttgttgcgatcatacatcctcggtcgctgtaaatgtgattttcgactggcagaatgcaccggatgcaacgccccgatcaatgtcctgctatttgttcccgaccgatggaggaaaggtgctgcgttatgaattcacgaaccgaaccggtggtgtgattcgggttcctgccggacgttacgacgccttgtgcctgaacagcgacacggaaaccatcaactaccggaatacggagaaagagaagagtttcgaggtgacgacgcgaaccacggtactgttgtcgggcctcgcctctctggggggacgtttgtccgaagcacctcgtgccggggatgcggaaaacgagcgcgtagtgctgtctccggatatgctttggagtgaccatgcagagagtattgaactggaacggacatctgcgccgcagacggtcacgttgtatccgaaagtgtcggtttgcagatatacggtcgaaattcgcaatgcggaaaatttgaaatatgtgtcaggcatcagcggttcgctgtcgagcctggcaggaggtctgtttgccggaaaatccgaaacgaccgaggaacttgttacaatccccttcgaggtcactgtatccgcagacaaatctactcttaggggcggtctactgactttcggtcattgtccgtcgaagcaaaacagacaccgactgatcgtttatgctatattatccgacgaaagtaagtggtattacacctatgacgtaacggatcaaatccatttggctcctgatcagcgtaatgtgcatatcgttttggacgggcttccgttgcccaaacctatcgtcaatggcggcggtttccagccttcggtggatgagtggcaaagtgtggatgtcgatatcgagatgtaaaatgtaatgatcttcccgattttgtggggcatagatcaatgttaaaccctttaattaattcactgatgaaaaaacaattatttttaatggtcgtggcggctcttgccatggcatcgtgctcgaaggatgaatcgacgggcatcaacaatggcaacgcgatcgatttccgtgtagccatgcagactcgtgcttcggaaacgacaacggctaacatcacgaactttttcgtgacggcgctcgacaagaacaacgccaactactttaccgatgctgagttcacaaaggacggggctttctttacttccgatccggcctatttctggcccagcgacggcagtaatctttcgttcttcgcttactctccttcggctgcggacttgggtgctaccgtaacgattaattcgacgaccaagacgctcgctgatttccagcccgcagcgacgatcgccgaccagaaggatttcatcaccgccactgctacgggcagcaaaaccgatgaggcggcgggtgtcgccctgacgttcgggcaccgactttcccagatcgagatcaaggctaaaaacacgaacgacggttatgtttataaggttcagggcgtgcgtatcggacagccggtttcgaaggcgacgttcgatttcggaacagcctcttggcagttgggagcgctaaagaccaattatgaagcgacctatgcgggtaacgaaaagacgctggatggtacggccgtatcgatcatggcggaggcagacgacaatgcgatgctcattccgcagcagcttacggcctggactcccgacacggacaaatccaataccaacaaaggtgcatatctggccgtgaagatcaatattacgaccaaggacggtgctcgtgtctatcctgtggcctctgtcggcgaatacgactgggctgctgtagccgtcaatacgaactggcaggcgggacagaagtatacctatacactcgatttctcgaacggtgcaggtaaggtcgatcccgagaagccgactcctacggatcctacggatcctttcaaaccgggcgaagatattctgggcagtcccattaagtttacggtagaggttactccttgggccgatgttgcgcaggatgtgaatatgtaaaaaatcgttcgacagcacggctgtcgaacaaataagatcgggcggggttgaaccgaataaatgtgtcatatgttaagaggcatagtgcgtgacatgtatcggggagaagtctggataggattctctgtcccctcccgatcactaaaggtggatattcgtcttccgtgggagtcgattaaaataaaaacacggtatgttatgaaaacaacaggatttttactttctgcaggtcatttgcaggctataggaacggttgctgcggtgcttctgtttgttgcttgttcaaacgatctgacgacagatacggcacttcaaggtggtgttttgcgcttcgaggtagccgaggccagcgactggcactctcgaccgcagggccgtgctgtcagaaatgcagccgagatatcggaaataacgactgaatcggaatcaacaggcgttttaacattgcagggcaaaaaacctgcggacacgctgttcctgcacgcctcggtcgccgacggaatcgcctcgccgcacctgaatgtacaaaccgaccgatcgcagacgcgtgccactcccgtcgaaacggcgactttttacgattcgttcggtgtattagcttcggtttatacggggacttggagcgaggattcctgcctgccggattatatgtacgatgtcgaggtgaccgaagcatcgtcctggacgacctcctattactggccaggcgccggacgcaacatccgtttcttcgcttacgcgccctacggcggccaagggatcgtcctttcggataagacgtcggccggtactccgtcgatcacctacacgatcccgacagccgtcgccgaccagcaggatttgctggtcgctgctacctccgggatgaccggcaataccgctgcggcggctccgttgagtttcgctcacgcgcttactgccatacgcttcaccacgggcgacgatatgatggccgggcgcattacgaaaatcacactcaagggcgtttacggttccggttcgcatacgatgggttccgattcgtgggacggttacggcgctacgacagacttttcgcagacacttgcggctactgtggacggggctgcgaaccaggaggtcactcctgtcgcagcgaccttcatgatgttgccgcagacgcttccgtcgggcgcttcgatcgaggtcgtctatacggacgacctgacttcgacacaacgaactttaatcgcctctatcgcaggcagccaatggccgatgggcagaaccgtcacttaccggatttcgacgtcgagcatcgtaatcactccgacttttaccgtgacggctccggccgattttacctatgccggaggcagcaaaaattattcggtgaccagctatgccgccgtttcccggccgggcgatgctacgcgaaccgttccggtggcctggatcgccgaatttgtcgaggatgacggcagcggaggctacaacgtgatcgcccgtccggaatggctcacagcttttaccgcgagcggcaacggcggtatgtctgccacgacgttctcggctacggccatggctcaacagggagtgacctccaatgcgcataacgatgcgttgcaggcggctccggccgtgagcgggacatacgatctctcgacctccggcggcacgaccgcgatgcgaaccgccaactgttacgtcatcaacgccccgggacagtactccctgccgttggtctatggtaacgctatcaaggacggcggtacgaacgcttcagcctacacttcgcagtccagcggaacgtacgtattgaagaccttcgtaaaccatctcgatgcagctatcaccgatccttatatctataacaatgcggggtgtacacccctggatgccgtactcgtttggcaggacgaggaaaatctggtgacgaatgttagactttcgtccgacaagcacaacctgaccttcgacgtgacgcaagcgactatcaaacaaggtaacgctatcgtggccgtgcgtgacacggacagccgtatcatgtggagctggcatatttgggtaacggacttcgtgccggggctcgcgccgaccgtggaggagcgttacgatcctgtgaagacgcagcgggataaggttgtgaccaattatcaaggggtaaaatatacttttatgggggttaatctcggctggtgcgatgcggaaactaccacctatgctgcccgcagcgtgaaggttcgcttcacgcaggcggagaccggtgccatgcaggtcataacgctcacccaggcatcgcattcggtcgtaaattccggtaaccagccttatttccagttcggacgcaaggatccgatgttggccggtatttgcgacgcttccggctccgcagtcgataaggactgctattccgacggctatgcgttcgacaagtcgggaacgggcaaagtcgccatcggtctctctattcaaaatccgcatgtgttcttcaattatggaggcgttgtgcctcaagattggtgcgccacgtcctattacaatctttggagcgtcgacaatgcggtaacgacggctaacgacaatgcggtggttaagacgatttacgatccttcgcccgtcggctaccatctgccttcgtcgaacgcctttacgggctttacgtataacagtgaaaatcttgttggaacttctaattttacttctcggttcaactcaccctatacctccaaagtcgattgtcccgataattttggctgggagttttattgtaacaaaatgaatggagagagtagttatgatattgctggtggtacggtcttttttccggcttctggatatcgcagttacttgccgggtacgacggactttgttggcctcaatggttactattggtcggctgttccgtattcgggaagttcctctcgtagcttatacttctttgcgttgtatgtcggcccattgtatgacaactatcgcacctacgggtttgcgatacgtcccgtccgagagtgagctttaggaaatcatgtgagataatttatgtcgggaattatttccctaaactcgataaaaataaaacgaatcgaaatgaacaagaaagaattcgtgaaagctgtatctgccgagggtggactgtctctttccgatgcaaccagagccgtcgaagcgatgatcgaagtcgttacctatgccatgagtaagagtgaaaaaattgtccttaatggttttggaactttcagaatcaaggaacgcaaggcgcattcgggctgcaatccccgtacaggagaagtgatccgtatctgtgcccgacgggtcgtgaacttcaggcccggaatatacttagctacagcagccaaccgaaaaggcataatggtcaaccaggattcagagtcaaaatccgcaaactaaaagcaaatttgacgaagagagtttgggtttcttgtttctggcattggccgccgcagatgccgtggctcaggagaacggtaaccgcgatgcaagcaacgagattgtgtgctgaccctacgaacccaatcgctgcttcgacaacatcttcatcggcgttgcgggcggtatggacatttaccaagggaaagacggctgctacgtgaagaatgcgctcgaaacggacaagaacaagactttcacactctatggctgacgggtacgaccgccttcaaccagaagtaaaatgagaaacgtatgtaatatgtttatgagtcgcttcgtcaacaaatatggcccccgaaagaacgtttgaaaatggttgccaaaagcgataccaacaacagcttccccgagccggagttgaatcgtactgtgatcatcatggaataatttacttagatgcgttatgttctgaaggaagcacaaaataatcaccgctgtaacttgtcagtttacagcgatgtccccccccccccctcccaaaaaaaggttgttgggattggcctataagatatacaacggaaacaaagctccgggagtaaggcgttccggggtcttgtctatgttttatatcggaaaatgagggacgcaaaccgaccgaggaatagaaatagaataatcctgcttacacgcccgtataaggcgtgtttttgttttatccgaagttttgcaaatgtaccgattttccttgaaaaaagttgtaccttatttgtacctcatcgcagtatctacgctattttccatatatttggcacaactaaggcacttattgcgacttaaatgcacttaacgctacctatttcgacttaaatgggctccaacatttacctgcaaaaaatctgcgaacaatgcggcaaggaattcaccgcccgaacgactgtcacgcggttttgctcccatacgtgcagcagtcgggcatacaaggatcgcacccgaaaagacaaggtagaaaaaattaagaccgacactatccggatcaaaaccaaggagatcggggaaattcaagcgcgggatgtactgaccgtatcggaagtggcggcattagtcggctgttcgcggcgcacagcatacagattggccgcaacaggaacgatcaagagtgccaacttgggccagcggctcacgcgcatcagacgctcagaggtggattcgttcctgtcgctcccggcaaaacccgccccgcaagagaaagagtacgaaatttcagaatgctacaccgtcggcgaagccctgcgaacattcggtatatcgtacaagactctccgtgacatcctaaagcggaacggcatcccgaagtttagcggggcaagttcatttacattcctaaaaagttactgaatgaaatttttaactaaattcgcatatggctgtcaaagttaaacttctgcaaaagaagatttcaggagggcgcaaaaccctctacctcgatttctaccccgcaatcatcagtctcaaaaccgggaaggagacgcgcagggagttcctcggcctgtatatccacgagaagccgaaaaacgccatcgagaagcaatacaacgccgaacagctgaaactcgccgaggcgattcgtcaacagaaagagaacactcacaacaagccggagatatacaacgaatacgaaaaggagcggctccggaaaaaggagctgggcgaccgcgatttcgtcgaatatttccgcaggacggcaggcaaacgttccggctccaaccacaacaactggatgtccgcactaacctatctggaacaattcacaggcggcagggtgaaattcgtcgacctcagcgagcagtatctggaagagttcaaagaatatctgctgaccacccagagcgtcaagagcaaacggaaaaaggagccgctgtcacaaaactccgctctctcctatttcaacaaggtcaaggccactttgaagcaggcatacaaggagggaattttacaaacagatctgaatgcgcgtgtggattccataaaagcggccgaaacgcgcagggaatacctcacctcggaagaattgaataaattggctaaaacgccttgcaaggatgatctgctgaaacgtgccgccctcttctccggattgaccggactgcgtttctcggacattgaaaaactgacttggggcgagatcggacaggacgagtcgaaaggctataccattaattttcagcagaaaaagaccaaaggcatcgaaacgatgcctatatccgaacaggcgttctgcctcctcggagagcagcagaagccggaaagccggatattcggaggactgcgttcggcatcctaccacagcaaagacctgcgggactggctgaaagcggcaggaataacgaagcacatcacgttccattgcttccggcacacgttcgcaacgttgcagctattctatggcacagacatatatactgtatcgaaactactcggacacagagagttaaaaacaacacagatatataccaaggtcgttgatgatactaaacgcagagccgtcaataaaataaccatagaattagaataattatagatatttcagaaatggatgcatttcatccaacatacagagaaactatcattgcttactaagacgatatccatgcttggaaagaaatattatctcaatttttgtccttacagagaaatcgaaagatacctattcggatatgttgatttctgcaatgttatgtaaataataggagacaataatagtagagttatgaaggcagatatagaacgagaaaaaatgtggtttatcttggaattgagaaagatcacagcaagtaatatggaatcaatctacaacgaaaagctacatcggttttgttattataaaagttcaaaagcgacggttgacggaaaagaaattccacaaggattcgatcggttccttgcgaccatcacacccgaaaacaaaggaaaaacagccactctcaacttaaaaacatacaacgagttcgacatatcggaagcggattttatcgaagatgaaattttaagagtggaacggctgctcaacctatatcagacagaaatagagtaccctcaacgaaaagcgggtgcaatgtatctggaatttctgcgaaatcagctcgaaacaatcggtaaaaatgaaggcaagaaaagccacgacaatttacaggaactaatcaacagcgaaaccatctaccaatccataatggatttgcttgccgataagaaaaaagtggacggacaaacccacaaatggagcgacgagagcaaaggaaataaaaaggtgctcatcgtaattctgaaacaattagagttaaaaggatatttcaacatcaaacgtaaactaactgcggccgaaatccaagcaatttgcagaaatactttcggccatgaagttagtatcgatttaattaagaaaactgctcatgacgactataacatcggttttgaaataccccgtccaacagatttgacacagaattaactacacaaagtgcactcgtgtactttgtgtagttaatatattgtatatcaatattttatatctatattttcgcagctgtgattaaattttacagctatgaaaaatataggtttttctttcgacgatctgcctatggcagtgagtcagcttaccgacaaggtaaattcgatctattccatgttggcccggcattccatgccgcaggaatcaccccaaaccgaggataagctcttgtccgttcgtgaggcctccacgctactgcggttgaccgttcccaccatttacagcaaagtgtcgaggggcgaactgccgtgcatgaagcagggcaaccggctctatttctcgctggccgagatcactgcacacctcagatcgggcaaaaaacgatccgccgcagagctgaccgcccaagccgaggaattctgcaaccgcaaggaaggagggcgttatggaaaataaccgcactgaccgacagccctgcaccgttgatttttcattattcgaccaaatcgagactaccgtccccgcatacgatctggacaaagccattcaaaagagggattaccgaatcgacctgacacagcattacgccgatgcagagtatctgctaactgtcgatggaatcgggatgctcgccaaaggcgacatccaagccgtgaaaggcaaggcgaaacaaggcaaaacatttttcatcacggcattggtcgcggccgtactgaacggaaagttcggggcgttaaaggtctccggcgaggactatcgcgttctgatcgtggacacggagcagaacatgaaaaacgtggcaaggaacgcccggaaaatacaccgcttgtgcgggtggccggaaaatgaaaatcatccccgattcagcgcggtcgctctgcgcgggtacaacaccgacgaacggcgggagatactggagggcgaaatcgcattgctcaagcccgatctagtgatactggacggaatcaaagacctgtgtcgcaacattatggataaccccgaaagtactgacgttttggatttgctgtcgcggctcagccaagacaataacacggcaatctgctgtatcctgcacgaaaacaaaagttcggcagacagcaatatgcggggacatcttgggacggaactcatcaacaaatgcaccgaagagtaccaagtgaccaaaaaggacaatgtgatcaccatagagcagacggtgagccgggatgcgccactttacgacaaattggaatttacgatcgaagaggacggaatgccatcggaaattgctattgcaatgaaaacacacaaaaattcgatccaaaaaacaatcgccaagaccgattactggcggcagtttttcattaaccaaagcagttacaccagaaaagagctgcaccgtgtcattatggagagcggcgagaaaaaccgcaccaatgcctatgcgaaaatcagagccggactcaacgagggcaaattgaccatcgacgaaaaacaaatcatcacgctcacacaaaaagaggattcgatttgagtgtgggcattgtgttgtgtatgcgcctatataggcgcttatacacaaatcacaattttatgcaggagaaaccgccccttctggctgtatttccacctataaccataaaaacagcagacaattatgaaaaacagattggatgtaaaagttagtttatttcagaactgcaaagccagcggaatgcccgttagcgaaatttccctgtgcgacttcttgtccggctccacgtttcgcgggaaatacaaaacaaccgtagacaggtatcgggccgctggtgacgaggacaaaaaccgtttaaaaacgagtctccctgccgttacggtaagcggaacattcagcaagcggaacagtgcggggttgatcgcccacagcggtctgatctgcattgacatcgacgaaaaagacaatccggatgtcgcggagttcgaccgtctgaacgaactgatccgcatcattccctatgtggtctactgcggacactccataggtggaaaaggctatttcgtcattatccctatagcctctccggagaagcataaggagcatttcgaggctctccgacaggatttcgcccgatgcggcataacgatagacaagagcggcaaagatgtaactcgcctgcggatttattcctacgacaatacagcttacatcaatccttccgccgccacttacgaacgaacagcaaccgtccgcaccatacacgtggcaaccgactataataagcctcgcatttctacaccgaaagaaaaaatcccgaacgcccggaaaatcgcatcgcggattgcagatctcatcagaaatggaacagaccccacagcggtttatgaaaactggttcgaaatcgcctgcgccctaatcagcgagttcggagagagtgggaggacgctataccatatggtcagccaaaattacccggactacgatccggataaggccgaccggcagttcgatgcggccctgaaaaaggacggctactcgtatcacatcggaacatttttccatctcacaaatgggaaataactgtatttcaaataaatacgggattgcatataaccacccttatttcaatttgggaccattccatatggatttattatggcattaaagattaggtgcggcagattgaatgaaaacaccctttacgcgcacaatctgccccccccaaatgataaccgaggtttaataacctcggtttttcattgcctactcttcgccgcatttcaggcgtgtgctctccgcgcgtaaattcacgacaggatcgaagatgatccacacactttccacatcccggaatatttcctatctttgaggtcgaaaacatattgaatagcgttttgctattgttactgagctgagaaaacgaccaaatttcatagcactctgagaacaataggtagaatgctcacgtttaggcgtgggctatacttatttggagtgcgggtacttggtcgtacctctcagccgataagctatgacccgcgccatttttgtaggcggggtcaggaaaatagactgacctatggagtacaacaaaaacgggcagattctacgcgagttctatgcccggcacgacctgaccgattgttttgaacgcgacaacgcctacctcgaatcggcattcgacgagatcaatcgaatctggttcgacaacctctgcaaaatagacgaggttaactacctgatgattgccgaagctccgctgtggggcaagtccaaaagctacatttacaatcctgctacaccattcactcagttttttcaaaagagcgatctagaatatgttctaaacacgaaaatccgcgacaaggcggagtttatcgaccgttgcaaccaaatcggtctgctaattattgacatctccccattcgccctcaacaccgaggatacgatcatcaactaccgcgggaaatccaaacagaatccttatggtatcaccaaacgcgaataccgtctactgattcaggaaaccctgccgacattcttcgactgcaaaatagagaaaatcgctccgaaggcatcgtgcgacatcagagtatttttccgctatgcacgggtggaaaacacatttcgggatattatcgcagactccttgatcaagtacaatctgcttgcatcggcaaacgaccttccggaaatctcaaatccagccggagggatagatcgaaataaaattaaggagataattaatttggctgtcatctaaataattacttactttgtaaaagtgtgactattaaacctaatagatatggccgatcttcctatagatattacgtcagtatatgaaacccatgaatatcgacatgcaatagccatattgcaaacagactttcccgaagagtataatgaattattagagatgcttagagcatttcgattaaaacggagtgatattttatgtgcaggtgggcgtaaaagtccaatttcaggttttctcgacagttttttatacgcaagaggctgggaagaaaaaatgtttgatacgaaacttattttagatttttctcggtttgacttaaccgattgagaaataaacttttagcgaattatttgagaaatagaggtaacgatttagcaactgtgcgaatttcagcgttttacattgctatgctgtcaaataactctttcatttgcaaatataacatctttttccgaaagtacgaactttcggtgacaattttataaaatcgacttgcgaaaaaagaaaattatcgtgaatggtctaactctatataccagccttccttgacgggcttgtatagcgtagtgtcattgtatgtcctgcggtaaattttgttcaggtcgccgtgttcggtgatacggatgtcacggcggcttctcaattcgagatcgtaaacgaaactcttggatgttcccgcatccacgatgccgtgggagtagtacagcataaataagctcacatataccgaatctgccgtttcctgctccctgcggtcaacaaggacaagaccgcatccaatctctgacaacaaggagtcgagttgtattcggtcagatcttgataacccgtgtaccggcgtgtcctgcacttggttcggttggtaggatatttgtcctgccgaatcaaggatgagaatatcgcagggagagagcggtggatagtgaaagcttccctccgaactctccgccatgattttgcgtatcttgtcgaatgccgcctcgtgcgtggcgaagtggcgtatcatttcctcgtccgtcggcggcatgggtggctcgcagcttacgaccgatgcaagcgttaaaagtagtattatgataactatcttcatctctgtttaagccccaccttcaccatgccatgtgcaggtttgggtattgttatcatagttatgttctatccattgccccgatttctcgccgtcagtgtattgtccctcgatagttatatagggtttgccgtcccgtgtcgattccacacgataagagccgtcaagttttccgttacggtagtggcgtattatcctgctgcgaagcgtgctcgcatcctcgaagatttcccactcctcgccatcttttttcccgtcgatataatgagattcaaaaatctgctctcctgtcttgctgtcaaagcggcgctcccgcccgctctccacactctgcttatattccttttcggcttctattttgccgttacgaaaataggtctttacagttccgtctatcttgccttgctgcatgggtgtttcctttcggggagtaacgccgtcttggtaatactccgtgaatgtgctgttacgcttgcctttggcatatatacccgattcacgcagcaccccatcacgatagcggcgataatcaccgtttatcatgccatcggaaaatttaacacactcctcgtcaagtcctcgtataatgcgatattttccccgtaacggctgttttctgccttttttataatagaccgtgcgccgtgagttatctgttatagtctgcaaatcgctccattctacgatttgttgtgcggaaaccgtgccacacaatagtaaaaagatgtatagtgccaatattctattcattgtattttttgtttttcaaggttgcggctaacacgtggctcaatcaccacgaaaagcgattgagccacacgccattatccgcataaatcgaacttgttagcctcttcacttcttcaacaaagcgaaaaattcctcgtatcgctcgaaagattcaaagaatcctgcatgcaatgttatttgtgtatcatccgtcaagaagatttccaattctccttcttcatcgtcatatttaagatgttttatatccgatattttaaatattttgtcggttttctcccctttctttattataggataggttacactatctgcatcgacaacgatttttcctccgttcgccgccaaagcacgggcaagacgaaccttgttcaatgttattaccaagagaacgagtcctccgattataaaaacaatggcagtactcgtagggccaagtattcgggtactgcctattcttataccgaatggataaacgagcggcacgacaaccataccgactgatacagccaacattgtaatgttatccttgataggagaggctggagcataattaaacgttttcataattcaaaaaaaatgtagagttaataaatgttttttaataaagtatcaccattttatataagtccaagggcttttggtatctgtcagtaaatcttctgccaatccaatcatgttggtagttcccatcgacaaagtacgaccaagaacataactataagcatagtctttccaattggtataaacttctttggtcatctcgtaagcggcattgatacactgcatacattcttcttttacaatgtactcttgctcaaggcaaagtctgctgataaagtttaatcttcctgcatcccacgcaagtactccgagtttgcccatttcttctttggatacgacaattccagcttgttcaatgtccggatatttttcctccatcgtttccaacttttccaaacagtcatttcggaaatcggtgtgttctttcaattcttcattttcattaagccacttcctgcttatattaccccctccttgaagaaaagccgtataagcatagtgaaacattgtttgcgagggagcttgcgacaaccaattcaaagtttcgatggcactatccctatccgttataccaaagtattcacctaaaataactttacgaacagagggagttacgccagtttcgaatgtgttcaatacaccttgttgttgatatacatacagattgccaagacttatcttgcgtaaatccgcttctggcaaatgtgaattttcatccacattcaaaccatcctgaaagaaactctgcaattttgcaagtcttccccaaagagatgtcatgtccatagtactatgtttgtctttccagctccttaagaccttttattattaaaccacgaagcgtggaactgcaatgccacgtctttgttgaaggtcgtaggaaaaacctaatgagcagatgtagtaatagcagcccacgctatagcgtgagaaccactatgccatccttgctcattttgaaaatttcctacgttttcaacaacaagataagcataacgcttctttcttttctaatatgtcttggacggagtttccctaatccaaccacaaaggtagtgaaaagttgtgataatcacttatgttgcaatagatttatttgctcgctgtataaaattggagctttacagtttcatacccctgcttttcctttgctgctgtataggttgccgtatgttctgccttaacttctcgaactgttccttaaaccactcggcaatgggctttcggtcgatggcaagaaccaatttagccccgtccgtggggtctttcagcacttggaaacctgccctttcggtcgtgaatttccgtccgtgttcctccgagtagagttcccctgcatactccaacggttttcccttgacgagcgttgcggtctgcctttcatcgaacccgacaaggcggcaaaggttttcgatacggagcatttcacggaaatagggaaaccatgccgcagcctttgcgattaccgttttcaagaaagatatttcctccttgtgcttcgtttccttgtccgctatctccctgcggtgcttccgttctacttccgccatctgtcggctgtggtctgcctgcatggtctgtattctgtcttgcagggcttcgatggtttcctcgtggtcggctacctccctatgcagggcggtgttctccctttccagcgtcttgaccttgttactgccgaaaagagaaccgacactctcggcgatgttggcggctgcgacggttgccgcccctttcagcttctcggtctgtatttcttttttcgcccgtcttagttcttcccgtgccgtttctttctgctgctgcaaatccaccacttccgctttgaggtcgtcggagagtttctgtatatcccgataatactgctgcgtggacttgtgacgagctttcgagccgtctatgcccctttgcagcccgtatttcgccatcgccacggcataggtatcttggtaggacttcaatttcagccgtgtcataatatcgtctgcgcacagcctcacggtgtcggtcggcttcttgcggtatcgcttcttcgtctgttcctcccttttcctgcgctttcgctctcccttgacgatggggacgagtgtaacgtgtatgtgcggcgtttcctcgtccctgtgcaggtgagccgccacgatgttctcctttccgaacgtgtcggcgaagtatttcagattgtcggcgcaccactcgtccaaacgcccctcttcctctatccgcttcatgtcctcgtgcgttcccgacacgttgatgcggattgcccgtacttggttgcttccgattttgcgtgtcagccccgcttcttctaatctctgctgtatagccgccgaacggtctttcaccccgtcggggtattcgataagcctgcggttcaggtgcgtgcgtgtggggtcagcgttcttcggtatgatgaaacgctcgatatgtgcggtcgttccgctgtcgctgccgtgcgccttttccatgtgtaaaactacgaaacccatatattcctttcttttctggcttgtgaaacaataaatctgactatctttgagggcggcgaaatgccgtcctcaagggggtgtgcagaggggcttgccccttgccttattggggaattttcagcgatacgtagtattgcggctcggaaaattccctaataagctacggtattttcttcgtaaataccctgcggcgtgccgtctgcttacccatataaccccaccttattttttccctttcggtcggtgggtggcggggcggtcgttttcgttttcaaaggctcttttgcacggggcggtcggatacaaggttttcccgataaatacgctcgcagcgaagcgagaggaagatttatcgggaaacggcgcagccgcctgaccttttagccgacgtaaagccccgtgcttgctttgcctttgtaaacggaaatgattgctccgctttcctctgaaaagagaaatagaccctgcaatatatatcaccatagtgataggtttgcatgctggtatgctggtacgtttgcatgttggtatgttgatatgttggtatgtcatcatgctttccaacggctgttgggcttgccgtccgaaacaaccgacacaaataccgtcgttttctcttttcgcccgtgtataatcctttccaataatgccctgcggactttcgccgccccgaacgattcgatacggaaagcaagggcggctatcgtttcgaggttgtaaacctccgcgctgtatctgtccgatatgcggataatgcgctttatgtcatatatactcaaaactccgcttttgcagagagcctttatccctgcccgaaccgtcggggcgataaccccgaacagttcgcagatttcccgctcggtcatggcggttgcacctatatcgctcggcagggagatattgccctgcccgtccatcgtgataatgttcctttcttctttcatcggtattctgtttttaattagatggctcggcagatattcttctccatgtcctccaacttgtgcgacaaggtttccatgtcttgacttatcttttgggcggtgattttggcgtaaatttgggtggtctttatgttcgtgtgtcccaaaaggcggcttacggtttcgatgggtacgccgtgcgacagaagcacggtcgtggcgttcgtgtgtcttgccacgtggtaggtcaaacgcaccttgaagccgcattgtctgcctatctctttgagtatcttgttacaactgccgttactcggaacggggaaaacatgaccgtcccttgccagtcccttgtatttctctatgatacgcttgggaacgtccaaaagacggatgttcgattcggtgttggtcttctttcttcgggtgattatccaaaggttgccgtcgaagaatgtttgcaggcggtcggcggtgaggttcttcacgtcggaatacgccaaacccgtgaaaacagaaaagacgaacaagtcccgtacaagttcatgggtggcgttcttcatcggtgcgttcatgagcgtctgtatctccgtttgggtgaggtagcccctgtccacgctttcgggagaattgatatatccggcaaagggattaaagggcaatcgtccgtcgttcctcgctatcgaaacgatgtgtttcaacacaatcatatagccccacacggtattggtgcggcatttcttctccgtgcgcaaaaaatactcgaaatcgtttatgaacgtgaggtttagttcctttaacggaatatcctcacgcttgtaggtgtggggcaggaactcccgaatatggttgcagaccgtccgataacgggtaaatgtaccctgcgccctgctgtgcccgactttcttctcgaactcggcgttgtgctgctcgaacagcttcagcaaagtttcctgcttgacgccgataccgagataggcgtctttgagtttggcggcggttacataaccgtccgtctgcatcagttcttggtagcggcggtttacctccacacggattttatctaccgcaaggttgattttctgcgcttcgacgctcttgcccgaagcacggctgtttttcacgtcccacaaccgtgggggaacgtccatcttgcaactgaactgtttaatctcgccgtccaccgtgatacggcacattaaaggcaggttgccgttcggcttctcgctgcctttcttcacgtaaaataataccttgaatgtacttcgcataactcactcctttttttggttacaaaattagttattagtgagttaccgacagctatgtaaaattacgcaaatcacagaaacagaaccatttagcaagaaatccgcacccgttacgggggtaatgaggtggtaactgaactcttgcgctgtttggcttcgaggtggtatttcgttggctctgccccatagaaaaacaaagcgtaacgaacgctctatcagctaattcgctacgctctgcccaaatttactttttcgctatgtgtttattttagataatgtcgaacacgatactccgacacataaaattgactgctacaaaaacagaattgcccttgacattgagtggaataacaaagacccgttttatgatcgggatttgaataattatcgactcctccacgatcgagatgcaattagcgtcgcaataattgtaacccgatgctgtgaattacaagagattttcaaacgactgggtaagggagattcttatggggcatcgacaactcatatgagtaagcttttacccagaatcgaaggtggcagtggaggcggttgcccaatacttgtttttggaatcacggaaaggttatatattgaggattagcgcaccacaggcctcctaacaagaagtagcttttcttttacatcccgcttcctatcctctttacgtcccattgtcatatggaaatgatccaatgtcttgacagtaacatatcttttttcaaaaaactgtaaggctaactctcttagtcgtttaatggtaatcatacctgtatcgctatagctcaatactaacgaacagttattatcccgaataagggcaaacattttactaaaagcatcctctacctgcgttttaatacaaaatggtgactgatgcctatcaacacgataacgaccttttacaatttcaccatttttttcctgcagttctgggtagtcatacaacaccattgtttcaagagcgtggtaaaatcggctataatggacaaaacaatatgggggatcggcatatactgttgaattccgcacattccttaaacaatcaatataatccaaactcttaatctgatgctgaagcggattaggctcctttctcgctttattgaatgactcgcgaaatttccgatcaaaataaggttttatcttttttgatctgtaaatgagaatgtcctcgaatgaactttgtgtagtagcatccctgtattgtgcataatgacccgtaccctgactgttataagccgcagcatacattaaacagcatataagggtattatacatcggactctctctgtaatcttcaattgctttacgataagagtctatccaagtacattgttccacactccaccaagtcccggaataaaacttggtaaaaagatgccactcattatcaaaattctcatttatcaacaaccgactacgttcttcgatctcattaaatttttccaacgtaatatctttgggataccgatagctcgcaactaatcttctgtaatgctctctgtgataatcagaggcaatctttcttatttcggttattttgatattgttgtcattccaatctgttaaatagcttttggccaaaacagatgaatacacttgtatatcattagacaatattggaacctgatcgcttaaagctcccgacagcgagcaagaccctgcaaataggtcacagacgatcccctctcgatacacagccttaatcccatctatgacaaaaggtaaaatctttgtcttagaacccatatatttaatataatggactgacgctgaattatataaatcttttttaggcatattcaaatttaagcaaagcaaaagtaatcaaaaataacataggaatttgaagaaataatcgttatttttgatatgactgatttacaaatcaatatggggcaaggtttaagaattaagtttttaacagtattgtaccttatttgtacctaacacaacataatatattggttgtaaactaattatattttctatatcggaggttatcatttgattgccgatgcgaacttccgattcttttcgttgctcgtttttatgcggaatggccagaaaacttggtttaagattcgtttacgggatttattcctgctccggatctgtattcttgccaaggaaaattcccgtcaccgaagctgcttcgccgtagcgggtcaacacgtcggccaattggttgaatccggtgcctgtgttgcatatatcatcgaacagaaacacatgctacgtatatgaacatgaagaggtggaaactatccgctgccctcaaatacaggacaccgtacggattccggactgggagccggaggaataggcataagtggctgcgatcattcaatcgcagccactttaggtttctgcggcaaaggccggcaatacgatttgtttacgacacggtcgcgcatcaactgcatggagttgaaattgcgtgaaatattctggatgatctcgatataattatcgccatgtcctccttcttcgtcagtccattcgtaataataaggttttatcgacacacagtttttatgctcgaataaagtgttgagcagcgtgcggcccgaattgccgcacgagtgccccatgatgtagatctgatacggtgccgaaccgataaaccgaagcaactgacggtaattgtccgtttccagatagcggatagatttgatattggttaggtagctgttatcattcagattcgaaatagtcttataatcctcgtccagttcgtccccataaccgaaaatgacggaattcttatcgttatccaattctccgtgaatatggtttatcttgaaatcggagcttttcgaaatatataagtccgcggttttcgtataattgaaattcaggaacagaacctcggacggcaggaggaaataatcgtgaattcctgccgctccgttatatatccgttcaatgtgtttgggaacatcataagactcgacatgcttctgtatgtcataagtatcgaattgccagttatagccgaatttatgaagtaaactcttacattcgatgctttcggcatcatgagcttttctccagcgttctgtcaggaattcatcgaaagcactacgcccgttaaccgatatgtcttttgctttgaacggcgcgtagattgccttgcgaatatcttcgttttttagttccggaacaattcggtatttttgtattttagacagataagcgactaatttagattttattgtatcgagctccgcatccaaccctcggggattttcgtaaagtttggtgtcttttttcactattcgttttaaaaactgatagtattcattctcgatatcgacccatttttttgtttcaatagcattgtcgatatgttggaaaaacggttttttatcaatgatgaatttatcgggttgactttttacgtcttctatggcattttggggtggaattatcattcctttttggacatctgctgtagggaaaagccaataccatggagacggttctcccttttgagagatcgagcatagattatccgttagttcattacccaaatagctttgttgtaatcttttaccccattgcttccaataataatctataaaatccgcataactcttcggcagtccgtgcaccaaatcgaatccgttgccgatcaaaataattctgttcatcatttgcctgtcgtttcgtttgggagcagtccataacaaagataattatttatcccgcagcgaacaaaagtctgaaggtaactctttctccgcagcccccccccgtccagcaagatagccgcctcaggcgacaaaggcaaggcgacgccttgcctttgtcgcctgaggcggctattcggcccttgctgtccgggcgttccaggcagactaaatattatttcacatgaaactgctcacgaaagaaattatctcgaaattcgagaagcatcccatcggttcgcaggatgggaaaggaatggacgcggaagtgctcgtcaaatatttcaatccctgcgatgcggggacatggctcattaccgaagcagaacgcgagggcgacgattggaggctgttcggcttctgccatattcatgaatgggagtggggctatctgatgctttcggaactggagtccatacgcctgcccttcggactcgctatcgaacaggacatttattccgccggaaaaaccgttcgggaattcctgctctaaacgagacaatgacaatcggaaatgttattcataaattgatactatggcaacggtagaagataaaatacgccaactcaaagacgaattggataaattgcttgcagatgagcgttacaaaaatgtagtgttcatagccggaggcagcatgacttcgggcggcaggaactttctgcggtagcacaccgaaaagattcggcgcttgcaacaggaatatgaccgatggatacgcttgaaacggatcatcgacggagaggttttcacgctcgatgacattgacaaatgccgcatggagatcatgcgggaatatccggaatacgagcggccgatcaccgcgcattcgggcatcctccttgcagcagaggccattcgaaaatcattcggccgcaaatactatctgccgctatataaatatccgatccggatcgatttcggaacgcaaaacggacggatatgcatcgtgcatcccagcaatttcatcgaatacgaagacaagaacgggcaggaggtcattcctcctgcccgtccattatctaagagctctgacgtagcggctctctagcagtttatagatcgccgacaggggataaagaatcttgccgccgatggaagtatagggtatttggcggttgtctcggtagttctgtaaggagcgtttgctgataccgaagatgctgcacatctcctcgctcgtaagatagatctcattaccgattgccggacggtgcgtgtcgatcaggatatcgacggcctgaatggcgcggaggatgttgcggcgcagttccttgaacgcgctgctgtcacgggtgatgatctcttctgtcatagagttatgcattatgaatcaggttcttttccagcaaacggcggacatcgtcttcccggaacagcactttattccccatggaggtataggggataataccgcatgagcggtaatactgcaaggcgcgtttggtgatgctcaaagccttgcagacatcatccgttgtaagccaacgaacactgcggggcttatcggaaagttgttgtaatgcagaaacacgttccaacaaacattgaatatgcgcctgcaaatcattgtaggcgctcgtttcaatcagaatgcaatccataagaatataagtttaggtctgtttaactgtggagaccgcaagataatatcatacggaagattctcgtgcaaatgtccgataccgaccgctccagtctgcatcagacaaaaagccaacgaattggatatttgcctgtttgacgaatatttcgtatttttgcaacagagtctttgacaagttgaagaactggctgagaaacggggaacctccgttgccaaatcattacctataaaataatcatcgccataacttattaagttacagcgatgatttaaaaaactccgaagcctatatataagtgccgggattttgtttcctctcgggatggggcttagaacctgtacgtcgcgccgatattgataacgatggggttcctgcgcttcacaaagccgggtacataatccttggcggtctggatcatccatttgaagccggccgaaacgtcccagttgcgggtgatcgagaagtccgcgccgccgccgaggttgataccgcacgaccagtcgccgatgtcgttggcgctgatacctgccagcggatagatatgccagtcgggggcgatgttgaacaggtattgtacgtcggcgctgatatccaccgagcaacccgtcttgcaaagggccaggatactgggagctacacgccagttgtcggtgatgctgtactgtccggccgcaccgataccgaagatggctccgtcggcacccgcattcgtgtataccccgattttggggccaactccccagtcgcccttgtactgtgccgaaaccgtcgttactgctaaaagcacgacgatcaccgtaagaaaaatctttttcatgtctgttgctttaatttaacaaaagttgcgaataatactgtttgctagaacaaatatacaaaatttatccgccacggcaaaaatttttcaacgaaccggacttttttgtcgctaaaaacgaaagcccgcggcatgcacgccgcaggctttcgctggtatgggggttccggcggttgccgggtgaaggcttatttctccttgagggctgcgtgggcggccgccaggcgtgcgatgggcacgcggaacggcgagcagctcacgtagttcaggcccgcgtagtggcagaattcgaccgacgaaggttcgccgccgtgctcgccgcagatgccgcacttgagcatcgggcgcttgccgcggcccttgaatacggcctcgcgaatcagctgtcccacgccgttctggtcgaggatctggaacgggtcgttcttcaggatgcccttgtcgaggtagatcggcaggaacttgccgatgtcgtcgcgcgagaagcccagcgtcatctgcgtcaggtcgttggtgccgaacgagaagaactcggcgacctcggcaatttggtgagcggtcacggctgcgcggggaacctcgatcatcgtgccgaccatgtagtcgatcttgtcgttgcgctccgagaatacctgttcggccgtcgagtcgatgatgcctttctggtagcgcagttccttgtggttgcccacgagcggaaccatgatctcgacgtgcacggggatgccctgcgcacggacattcatggccgcctcgatgatggcgcgtgcctgcatctcggtgatctcggggtaggtgttgcccaggcggcagccgcggtgtcccagcatggggttgaactcggccagcgactcgaccttggcgacgatcttctggagggggacgtccatctctcgggccatctccttctggcctttctcgtcgtgcggcacgaactcgtgcaggggcgggtcgagcaggcggacggtcacggggaagccgttcatggccttgaacaggccttcgaagtctccgcgctggatgggcagcaacttggccagtgccacgcggcgtccggcctcgtcgtcggcgaggatcatctcgcggaaagccttgatgcggtcgccctcgaagaacatgtgctccgtgcggcagaggccgatgccctcggcgccgaatccgaatgcctgtgcggcatccttcggcgtgtcggcgttggcgcggactttcagcacggcgtatttgcctgccagatccatcagctggccgaagtctccgctcaggtcggcggccatcgtggctacctgtcccaggtaaacttcgcccgtcgaaccgttgagcgagatccagtcgccctccttgacggtgaagccgttgactttgatcgtgcgggttttatagtctatctccagctccccggcgcccgatacgcagcacttgcccatgccgcgggcaacgacggccgcatgcgaggtcataccgccgcgggcggtgaggatgccggcggcgtcgagcatgcctttgaggtcttcgggagaagtttcgatgcgcacgaggatcgctttctgaccggtttgggcgagggttttctcggcatcttcggcgaagaataccacggggcccgtcgcggcgcccggcgatgcgggaaggcccttggtgatgacctgtgcattggtgatggccttcttgtcgaatacggggtggagcagctcgtcgagtttcgcgggctcgcagcgaagcacggccgtgcgttcgtcgatcagcccttcgcggagcatgtccatcgcgatcttgaccatggccgcgccggtgcgtttgccgttgcggcactggagcatccacaacttgccgtcctggatcgtgaactcgatgtcctgcatgtccttgaaatactgctccaggtggtgctggatctcatcgagttccttgtaaaccaccggcatgacctcttcgagcgaggggtatttcgtgcggcggtcttcctcggagatgttctgtgcggccgcccagcgcttcgacccttcgagggtgatctgctgcggggtgcggatgccggccacgacgtcctcgccctgggcattgattaggtattcgccgttgaagaggttttcacccgtcgcggcgtcgcgcgagaaggctacgcccgtggccgagttgctgcccatgttgccgaataccatggcctgtaccgttacggccgttccccattcggcggggatgttgttgagcttgcggtagaggatggcacggtcgttcatccacgaaccgaatacggcgcatacggcgccccagagctgatcccacgggcatgccgggaaatcctcgccggtctgcttcttgacggcagccttgaagttcctgaccagctccttcaggtcgtcggtcgtcaggtcggtgtcgttcttcacgccgcgcttgtgcttctgctcctcgatgagtacctcgaacgggtcgtggtcttcttttgattcgggtttcatgcccagcaccacgtcgccgtacatctgtacgaaacggcggtacgagtcccatgcgaaacgggggttgcccgtacgcttggcgacggcttccacggcctggtcgttcatacccaggttgaggatcgtgtccatcatgccgggcatcgaagcgcgggcacccgagcgtactgacaccagcagcggcatctccttgtcgccgaatttcatcccggtgagcttttcgatatttttcatcgccttctccacttcgggacggagcatctggatcacggcctccttgccgtgggcgtaatattcggaacatacttccgtggtgatcgtgaagcccggggggacggggatgccgatgaggttcatctccgcgaggttcgcacccttgccgccgagcagctcacgcattttgccgttgccttcggcttccttgttgccgaaggtgtagactcgtttaacgtctgccataatttttcctggttaatttaattggtatataaatttataaattttttgtcaactcgctgcttttcacagacgaaaattgcggtgacattcctgttaccgcctcgtcaaagaattcatattcgccgttgggaatgcgaatatataaaaacttttccggaattccaaaaaaatctactccaagtaaacgaataccggcagggcgtagccgtagccgcccctgtaccgccttttttcgtaggtcggaagcggggtacccgtcttggggtcaatcagataacggcgcgcatagacatcgcccgccgaggtgcggagcgccgtgtcggccagaatgcggtcgcgcatctgccagccgccccggcggcggacgttgccccgcccgagccgtgccgggcgctccagtgcgtcgcgcagcccgaaggctccgggggcgagcgacgaggtgcgtcccgcgacgagcagcttcaccccggggcgctcttcgcgcaggtcgcggacgacccattcggccatgcgggtgtcgctgcacagcacgagccctatggtgtcggtgcgcgtggggcggacgacgcggccggatccccgtcgcatgggtttgccgcggcggtagaggaggccctcgatgtagaggtagcggcgccccggctcgtcgtagtggggctcgaagaggtcgccgtaatagagcagtgcgaaatccatgccgtcgagggagttgagcgtgcggtgcaggtagctgtaatcgccctcgcaggcggctgcgatgtcgcggacgacggattcgttctcgacgccccacagcgccacgagcggcatgcgcatcgagtcgatgacggccgccgtatggcgtatcttgcggcggtagcgctccgtgtcccacgccaggcgtcccgagggcgtgtagtcggtgtcattgtagaacagggcggggacagtgtcgtagaggtggtcgagatcccagtagacgatgcccgtgcgcggctgtgcatgagcggggatgcctgccaggaagagcagcagggcggttatgatgcgtggcagccgttgcaaggcgcgtaaagtccggctgcccgggacggagcgtgcgtggccggttgcggcgagggcggttatgatgcggcgcagcgacataggccggggttataacggctcctcgggcaggaacttgcgcggcgagcagcccaggaaccgggcgatctcgttgatatggttgaggttgtatttgatctcgtacttcgggctttccgccatgccgataaaacttttcgatacgccgatgccgaaagccagcatggcctgcgacacacgctgggccatgcgctcccggcggacggcttcaattacatatatatcgacaggcgttttcatgcggcggcgtttttcgatacaaaactaaaaaacgtgccacttgtgttggtctgttatacatgagtgttgctcagttatgacagagtgctgtgcttcctgcttccttttgcggaaaagatatattggtaccgtttggtggcaaaaggtacccaaaaccatccgcaaaccgttttcacgggagcagccacggctcctcgctgaacggacacgaaagaccgagccttttcgcacgcccgttccgggcgcgcggagccgcggccgctctttctccgctgcaaacggaatgcggaaaatacgcctgtccggaattttcgcggtacggctaaaagcggggagacgcgacagcagggattccgactcgatggcggagccgtcggcggacggcggactaaaagcgcgagaaacggggcaggtttgcttgcaaacccgcggttaggcgcccgtttccagcgttagggcgccggaagcaggcgaggcatccgtcggagagtttttggtactttttgcggaaaaaagtacatggcggaattcgcaaaaaaagtttttgccaccaaaaggtacatgactgcgttgctgaaagcaacccgacttttcctgaaatacggattattggcgtttcaggtgaaaatccgggctggagcgggattattccgagatcacccccgaaccgaccagctcgtcgccgtcgtaccatgcggcgaactgccccggtgtgatgccccgctggggggcgtcgaagaggatgtagcctccctggtcgcggacgaagagcgtggcctcctgcaaaggctggcggtagcggatgcggacgctgaagcgggcgctttggcctgccggcatcgtgcgcgcggggttgacccagtgtatctcgcggggggcgatatgcagtgcctgtcgccacaggccggggtggctgtcgccctcgccgacatagatgacgttctgcacggtgtcggtggcgaggatgaacaacgattccttgcgcccgccgatgccgagccccttgcgctggccgatggtgtagaagtgcgccccgctgtgctcgccgattttcttgccgtcgcggacggtgtagcgccatggggcggccagtgccgcgagctgttcggtcgtagggggtacgtcggccgcgtgctgtccgcccggggagtggggatcgccgtccgggcgttcggcggcggagatcggctttgacgccggggacgtgacggtctgtccgatgccggcgggcgtgtttgcggcgggcgtatttgcagaggacatgggggcggaatgcccggcggccggggatgccggggcggggattgcctgtccggcatcgggtgtgcccgccgggattcgggccttggggccgtatttcggccacgtggggagtatctcgtggacgttaccccttttcgaggccagcttctgttgcaggaaggccggaaggtcgatcttgcccacgaagcagatgccctgcgagtccttgcgcttggccgtggccaatccctgctcggcggcgatgcgccgcacctcgggtttgagcagggcgccgacggggaacagggcgtagcgcaactgctcctgcgagagctggcagaggaagtagctctgatccttgttggggtcggtgcccgcgaggagtttatagattgtccgtccgtcgggcagcgtctcctcggccttgcggcagtagtgccccgtggcgacgaaatcggcgcccagccggagcgcttcgcgcaggaagacgtcgaatttgatttcgcggttgcacagcacgtcggggttgggcgtgcgtcccttttcgtattccgagaacatgtaatcgaccacgcgggtgcggtagtccgccgagaggtcgacgacgtgcagcgggatgtccagttttttggcgaccagttcggcgaagacgcggtcgtcgtgccacgggcagtcgccctcgagcgttcccgtcgtatcgtgccagttgatcatgaacaaccccacgacgtcatgcccctgctgtttgagcaggtatgcggcgaccgatgaatccacgccgcccgaaagtccgattacgacacgtgccatagtaatattgttatttacaggtcgagcagcccttcgggcagcaccagtttcatcgtgcgccccccgaagtcgatatgggcgatgaactcctcggcggcggggacgagcaccgtgcggccgccgatctccagctcgaaaagcgggttggcgtcgctgtcgtagtagtccgtgaccgaacccgtgaaggcggccgctccctttgcgccgtccgcgcccgcttcggtgcaggtcacggcgaagccgatcaggtcttccaggtagaattcgtcgtcttcgtcctcgtcgcattcgatacggaattcaagcccgacgagttcctgagcccggcgctcggtgtcgaaatcggcgaatgaggccacggcgcccgaggtgccgcggcgttcgaagcgcttgcagtagagcggcacctcgagggcgtcgatcgtgaccagcagcggggtgccggtatcgaattcctccgggaaatcggcatagagcgacagcatcacaccgccgtcggtgccgaaaagcctgttgatcctgcctgcgggaatagtaacgctcatatcggttcgttttttttctcttatgtccgtatcgcggtgcggaacgggggacgcgggtatcccggccgctccgttacacccggccccgctgtgctgccgcctcgtcgtgccgtgcagcgcctcgctgtgccttgccggacgattcccgcacgggatgcgcccgcgtgggaactatctgcaaaagtaatgaaaaaaaccggtaaacctcccgttgcgggaaatttaccgggattccggaaagaagctttcctggtgttattctgcggcaggagcctctgctgcgccctctgcgggagcctcggcagcttcggcggcggcagcctcctcggcctctttggcggcagctgcggcagcggcctgcttctcggcgatggcctttgcgcgctcctccttgattttggcttcggcagccaggcgtgctttctcggccgacttggcatccgtggcgagcttgttgctcttggcctcgatcttaccggccttctcgcccagccatttgttgaagcgggcttcggcttcggtctccgagaatgctcccttggcgacaccgcctaacaggtgcttcttgtataatacgcccttgtacgagaggatggcccgacaagtatccgtaggttgtgcgcctttctgtaaccaacccaatgctttctcgaagtcgaggtcgatcgtagcaggattcgtgttggggttgtaggttcccaacttttcgatgaatttaccatcacgtggcgctctgctatctgcggcaacgatgtggtagaaagcaaaacctttcttaccgtggcgtgccagacgaattttaacagccatttgctataaaattttgttgtaattaattaaaaaacgctcacccactttgggcttttaagcctgcaaatgtagacaaaatattccgcccggcaaaataattcgccgaaaaatcggtgcgacaggctgtttttttgccggatacggtgcatggcgggccgcggcgggaactgccggaaaaagggcgggcttgtggcggtgcagggccgtgcccctaaccgggtttccgtggggttgcaagccgttgcatccctgcggaaagcgatatttttcgttcagccggggactgttgtgaaaaaaattcctatctttgcggcgcaaatcgtcaccgcagggtgcggttttgccgatggttccgtagctcagttggatagagcagcagccttctaagctgcgggtcgcgcgttcgaaccgcgccggaatcacccggaaaagggagcgctggaatcgaatccgggctcccttttcgttttcccgcccgcatcttccttcgccgggtttggcctcctgcggactttttcgtaaatttgggtcgaatctgatattttcaggcatggaaccgctaccgggctgcaacataaagtatctcaacatcagccgcaacgacgaggcgtgggggctggtcgtcacgacggccgggtaccaggcggtcgcggcgcacagctcctacccgcaggcgcagcatcccgaatcccatattttcgaccccggcaaggggcgcgtcctgaaggagtaccagttggtctacatatcgcgcggggagggctatttcgagtcccgttcgtgccgccgccagcggatcagggccgggacgatgatcctgctcttccccggggagtggcatacctacgagcccgacagggctaccgggtggttcgaacattgggtgggattccggggcggcagcgtcgatgcgcaggtcgccaacgggttcttttcgccgcgcagcccggtattcgacttggggttcagccagacgatcatcggcatgtacgaggagatcgtcggctatgcgctccgggaacaggccggttaccagcaggtcgcggcggggatcgtgcagttcctgctggggtcggtctactacaagcaccggaatattctgttcgacgattcgctggccatccgcaagatcgacgaggcgcgcgcgatcatgaagcgcgaggtcgaggacggcctcacgccgcaggggatcgccgaacgcctgtcggtcagctattcgtggttccgcaagatgttccggcagtatgccgatacctcgcctgcgcaatatctctcgcagatccggttcctgcgtgccaaagagctgctcgatacgacggagctcaccgtcgcggagatcgcatacaggctccggttcgagaccccgagccacttttccaccttcttccgcaaaagggagggcgtcccgccccagcagtaccgccgcgagcggaggcagcccgggcggtaaccccctcagcagacgaccgtcaccgggattccgagcagcgcggcgtatttgcggatcgctccggcgacatgtcccacaccgatggcgcagtggtgcgaaggccccgccttgctccagcggtcgatgaattcccgtgtgggaagcgggaacctgtaacggctgttgatgttgccgatgttcagcacggggcccggcaccgattcgccttcggccagcaggaacgaaatcccgtcgcgtccttcgaccaccgacaggagcgtcaccgggccgtgtttcacggacatctggatcgacagccccttgccgggtttgccgtggtaaacgggaagcggcaccaggcgggccttctcttcgccgagcaggaagtgcgccgggccgtcgtgccccagcaggatgacgtcgtcggtgaagtccatgccgtagaattccgagaaacaacccccggcgcccagcagtgacatgattttcatggcctgcacgtttttcacctcgtattcgcccgccacggggatgccgcgccccgtcagcagcgtgttgccggcgatgaccgacgtgacgatgtcttcgtaggcgttgcccgccgcccccgcgtagtagtaggccagggaacccagccggtgcgcctctgcgagcttgtccagcgccacggatgtgcgtgcggcgcgctcgagttcctcccgcgtgcagccctcgtcgatgacgaacgcctcgccgaacgcggcgaccctcgcgtcggcctcgcgctgcgtcaccgagcggcggaattcgtgcagttcgcacatctccaggatttcggcatgggtgccgaagacggtgctctgcagcctgaggtcggagtagacgtcgaccatgccgccgtagtagttgcccagcagccccatgcggttgcggcgcatgccggaggcgaccttcgccgcgtcgatccacccgtagatctcggcccaggcctgcgcgtcgtcgaggtagcccgtcaccacgtcgtatttggtgccggcgcggttgaataccgaacagaattcgggcagcgaacaggcctggcagttggcaagccactcgcccgtcatctccccgcggtcggacatgccgttgagccgggcgtagtcgatggccggggcgggttgcaggttgagcagcacgaccgggatgccctccccgaggaaggggatgagcgtggacgaaagggcgtaggtcgagatgaagatgaacagcacttcggcttcgtcgcgcctgaaaagggccgcggctgcgtgagccttgtccacgtcgtcgaccatgcctgcgtcggcgacgatctgcccgccgtaggcttccattttttcctttatggcgttgcggtagccgtcgagcctttcgcgcagtccgccgaactggtgccagtaggtgttcagccctactgcgatcaatcctattttcatggtttgtgatccgttattttgtcatgacgatttcgaaatcttccagcaggccgtagtcccgctggtcgtagtcgctgccgggcagctgtttgggcacgttgttccagtgccacgggcctgcgatacccttgtcggcgctgtaatgggggccgaagaggtttttcaggctgcccaccacctgcacttcgacgcggttgcgtcccttgtgcaggtagggcgtgaggtcgaacgcatagggctgccaggcgatgatgcccgctttgcggccgttcacgcagacccgtgcgagcgtcccttcccaggctctcagccggagcgtgtaaccggccgcggggtcgtcgatgtcgtagtctcggccgtaggccatgtcccacgaatagaaggggagcccctgccgtttccagcttcccaaggccggcttcccggcgggtttgcggacgatccatcccgcctcggccgattcgagcgcgaagtcgccgaaaaggtagacgggggctatttcggcatagatgctcatgggcgagacgctcagttcgacggtgttcgtcccccgccgcaccagattgcctacggggtagatcccgaagcggctgtcgagcagcgtgtcgggcgccgcggcttcgacgggcgtgccgttgaacttcatgttccagatgccgggttgttcggcgaccagtttcatgccgcgcgtgtcgaagtccccggccacgacgaagtggtagcttacgcggatgtcgcccgtggtcagcgtgtcgcgttcgacgatagtttgcctgtactggatggccgagtcccacgggttgcctgtcccgtagcaatggttgaagagtttgttgcatgcctcgaacgtgtagaggttgcgctcggtgcgcccgtcgaccgtcaggtcgcagaaatcgaggttgaggacgttgtccttcaggcgggtgacctccagcgggccggcgggcttcagtttgacgctctctgccgtgggacgctcggtgccggatgccgcccgggaggtacgtgcaagggcgctccggcccgaagccggggcgaagagcaggagactcccggcgggcggcaggctgaagtccgcgctgacgctcttcccgtcggcggtgtgcgggtagggacgcatgtcgcccgtgacggcgtccagttcgaccagctccccggccgggaggccgacgctgcccgtggcggtgtcgcttagcgaggagttgaccaggaacaggagctccccgtcctcgtaggtgcgccgctggtggtagaggtcgttgcccctgacgttgcaaaaacggatcctgtcgtccgcgaacgattcggcgatcgccttaccgtccagagccgtgtaacggcgtatccgggaggcgttgcggtcgaggaaatccgccagttcggggctgggccgcccgtcgacgagcgtcggttgggcaaagagcaccagttgcccgcccgcctcgacgaattggcggatgaggctgaaagtcccggcgttgaggttctcggtcatgggcgggatcacgaccttcgcataggcgcgttttccgacgacgaatttaccgcccctgaccgagccgcgatccttgatgatgttctccgagcccaggtcgtattccgcctgcgccttttcgagcgtggtgacgaaacgctggaatgcgctgccgatctccatgcagcgggggtcgttcatgacataggagtagtagagccagatcgtcgtggtcggttccaggacgaggatgtcgttcatctgttcgccctggctgagcacgagtgacaggcgggcgaagtagtcgttcagcaccttgtagtcctcccaccacggcgagaggcgggtgaagaccggcggatagtcgtatttgcgggcgcctacgatggtcatgtgcgagaggtgctggttcatgaaattcacgcccagcgcatattcccagtcgcccagccgcttgaaatcgcggaacgtctcgtcccagcccccgccgccgtaggtttcgctcagcgtgcgtacgctgccggtctggttggcggcgctgcgcagctccttcacggcgcggacgttgccgaactgcgcctgcgggctgtcgtcgttgtactggttgaagagcatgtcgatggcgggcatctggtgccacgcgtacatggccatattgtcgccgccctggtacatgctcggccagtcgtgttcccagtagtgccccgtccagagcatgcccttgcggtcgcagtaggccgacatgggcttcgcccagcggtctacgaacatttgcgtcagcgtttcgaggtagttgtggcgcacccgtttccagtcgcccgtctgctcggagagcaggggcagcgaagttaccaggtcgtagccccactgtttgcggaacacttcgaacaggtcgggcgtccagcgcacgccgcccgaactgggaatgcacggttcgtcggagaaaagccccttgatgaccgggcccagctccttgccgaaggtcttttcgtaaccttccatggtgatgccgaggaatttttcggtgacgccctcgaccagcaggtcgacgtacgagtaactcccgtgccagcccgaacggccgtaataggtcttttcgtaaaggtagtattcgcccgggacgtctttgtagcggcccgtgtcggcggtgatgtcgcggaacgtgccgccctcctttttcaggcagaggaagtattttcccgcatcggccgggggcagtgcggttttggtgagcgcgagcccctgtccctggtcgtaggattcgggcatctgcgcgggaacatgtccgcctgcgaagccgctcgggtaggagttttcgtcgtagatccagatgtcgagccccagttctttccccttttccacactgtatttataaaggtcgaaccactcgtcggagaggtattcggtgaccagccccggccgcgggtggacgaaggcgccgccgaagccctgcgccttgaagtcgcccagcatccggtcgatgtcggcgcgggtgacctgtgtgttccagacccacaggggcgccgggcggaatgcccgcgggggatcggcgaattcctttcggagcttctcgaatttcatttcccgtttctggggggctgcggcgtagctggcgaggcacgatgccgccagggcggccgccagcaggcttttgattacggagggtttggttttcatgatcgttccgggttgtgtttgctttacaaaggtaaaggttatgcgcttcgggcggtaacgaatcctgataaacgacttttcatttctgataaagcgtgcggaggatggcgtgggcgaaccgggcgaaccgggaggttcggggcgggatgcggagcagggagtagggagtagggagtagggagtagggagtagggagtagggagtagggagtagggagtagggagtagggagtagggagtgacggtatggacggggatgctgccgggccgggcaggcgggaacgttaggaacgggggctatggaatcggggaatcggaggatcggagggccgggtaaccgggagaacggtggggcgctgaaagccggcggaaaaaacacggcgagccggggacgggtgcccagcacggccgggcagcggatgcaggcggggttacctgcgcggcaggatggcgacgatgcgcgtcccgcccgtgtatccggagtcgatgtatatctccccgtgcaggtgggtgacgatcaggcggcagaggtagagcccgaggccgttgccctggctgaaggggtcgagtttggtgaaacgctcgaagacatagccgtgcttctcgggcgggatgccgcagcccgtgtcggcgacggcgacgaagacgcggtcgtcgcccagacggtcgcattcgaggctgatcgtgccttcctgcgtgaatttataggcgttgccgagcagtgccgagatgagtatcgtcaggtatttgtcgctggtgttgagcgcgatctccgcgaccgggattgcgcctttgtaaacgatgcccggcttggggtacttcaccttcatgatccgcagttgtgcctggcatacggcgcagaggttcgtatactggtacggcagcggtgcgtgcaggttttcgaggtaggccacttcgagcatgtcgtcgaacaggaaacgcagctggcggcggttgtcccggatgatttcgcagtattggacgcgggattccggggtgacctcctcggcgcagagcaactcggagaaccccaagatgcagttgagcggcgtacgcacttcgtggcagacggagttgacgaatgcggcctttttaagctcgctttcgtgggcgtgcttcatttgcaggagtaactccttctgcagtcgccgggtgcggcggttgccgacatagatcgcaccgacgaccgcggcgatcaccagcagtgcgagcgagacgtagaccagggtcgttttgtggtggtgggccgtgagcagcgccgcgtcgagcgccatccggtcgagttcgtacgactcctgcttctcgcggatgactttgctctgttcgagccgcagcagcgaatcccgtaccttcacggcacgggcataggccatgcaggcctcggagtcgcggtgcagcctgcggaacatgtccgcccgttccttgtagcaatccgtgaagtgcacgccggccacggggtggcgttcggcggtgcggatcagcgaatccgagaaggccagggccctggcgtactccccgtgcccgacggcatcgagataaccttcgcggtagtggcgcatgcgggcgaagtggagccggtcggcctggtgcgtacggatgaacctgctttgcaggaaaaggtgcatgccgggcgtacccccgaattcgttgtcgccctcgggttgcagcggctgcgccgttgcggcgcagaaaaccgcgagcgccaggcatattgccgggaagagtatcggtcggcgcgtgctcatggcttggcggggattgtgaagatgaaacgtgcaccggcggtatatgcctcgtcgagggatatgttgcccgagaggtgccgggcgatcaggcggcataaagcgaggctcagccccggcgtcgccttcgaatcgtcggagggcatgccgaagatgtcgttgcgtttttcgggcgggatgccgcagcccgtgtcggtcaccgtaacccgcagttggttgtggcgcgggtctatttcatagcggagcgtgacggagccttcccgggtgaatttgcgggcgttgtcgagcagcgcgcgcaccacgaacgaaaagtatttggcgtgtgtacggacggtggccgggttctccggggcttcgatcgtgaaggccaccccgggattgcagctaagccgcgaagcggcgagcagttcggcgcggcacacttcgtcgatgttggtttcctccagccgcagggcctcggtcaggctgtcgaggttggcggcttcgagcatgttgtcgagcgccgaaagcagcaggtcggcgttgacgcggatggattcgcagcaggcgttccgctcggcagcgtcgatgtccgacagcatcagacgcgaggctgcggtgtcgatggcgtcgaatgcggggccgatgccgcggcagatcgtgtttacgaagaccgatttcatgtgttcgctctcctgggccttgcggctgtggcggaggatgtcggccttcagcctgcggttgcgcagcagcgaccgcaggaggtagatccccgtgccggacatcagcagcacgatgaccacgatcgagaggctcgtggcggcgcggttacggatcagggcccgcgtttcggccagcttgcgcttgtccaggtcgtgttgccggcggatcgtttcgaggcgttcgcggcgttcggcggtgaggatcgaatcctgcacctgcatcgtgtgctcgaaggcctcgaaagcctccgggtaacgcttggccttggtgagcaggatgctgcggtcgcggtaggcctggtagaccttgttgggcagcatgctgaaatagcccttgccactctcgatcaggcggatcagcgaatcggaatactggatgctttcggcataggcgccggtgttggctttccagaggtagcccatttcgtagaggtaacttttgttgcgcagcaggttttccccttcggccgtgagcatacggctgcggaactcgttgaagtaccgggcggcgtagtcgttgcggcggatgttgagcgcacattgcagcaattgctggtaaggccgcacgtagctgttgtccttatagaggtaggggcgccgcccgagggtgctgtcggcggaatagtagcggtcgagcagtgcgatctggtcgttggtgagcgcgacctggtcatcgtggcggtagctctggttgtaggcgccgctcagcacgtagtaaatgatgttggcgaagcacctgcggatattgaggttcggcatttgcctcgtcagttcgtaggcttcgcgccacgtgtcggtctgcgggatgtaggcccgccggtttccgccctcgtagtagcagagcgtgatgttggcatagccgcgcagaaacaggcgtttggtgcgctggtagatgttctcgggttcttcgggcggggtattgctccagtcgtaaacctcgtgtgccagcctgaggttctccgcaaggtcgtactggtgccccaggcggtagaacccgatgcacatttctgcataggcgtcggcaccctcttcgggtgtgccgggagtcaggtcgcggagcgcctgtaggtaatagcggagcgtatctttcttttcggtgtaaatcgaataccggctgaggatcgggatgatggacacggacatggcgtaggtgtcgcggatggccgccgcttcgcggaaaagctggatggaataaggcaggttgaggtgcgtgtcctcgttcaggtctttgaggttgagcagcagttgcacccgttcgcggggatcggacgtatgcgccagtctgccctggaggctgtccgtgacggaggacggtgcggccataagggatactcctgtgccgaagacgacgcagtagatgcatgtaagcaggcggacaggggacatgtgggtgtaacgcaaaattgggactaaggtagtaaaaaaaacgggccggacaaaaagtccggctccgttctatggaaaattatggggatcttatgcctttttcaggctcatatccagatacattttcaactcccggggcattaccggcttggtaataaagccgttgcatcctgcttcctcggcgatgcggcgatccgtgtcgaaggcataggcggtctgcatgataacgggtaattgggtggtatgccggcgtatctccttgagtgcctcgataccgtccattacaggcattttgatgtccatcaacacggcatcgggatgatgctccaatgcatagtcgacggcctctctgccatttttcgcccatagcagctcatactcttttttgagtattatttccagcaatttgtaattgctttcaacgtcttccgcaataagtatcagcggtttacgtgcatctggattgttgtatgtcattgtttttacagttgggacgagtgcaaatataaaaaaattttccggaaaacaaataggattaccggcgaattgttccttcccagcaggccgtattgccgcatgcgtcggtcagggtgagccggacgctgtggcttttgcgggccgggggttcctcgaacaggtggatcagcgtgccctgcatcgggagacggtcgcagggaagccatttgccgtcgatgaacagggtgcacgaggcgatgcccgagaagttgtcgcccacgcggaagcgcatggccggggcgcgtgtgaggtctgccccgtcggtgaagagcgggcgtatgcgcggcgggatggtgtcggccacgacaaacagttcgccggtggtgcgagtcgtggccgtgacggcgccgtcggcgtatttcccgcctatgcaggtgagccgtcccttggcgttgcgggcggccagcaccgtgtggggatgcaggttttcggggacgaacgcccgcacgctgaccgtcattgcccggtgcagcggcgtggtgaccgggaggatgcggtagccggacgtgaggacgaggagcgtcgaatcggacgccggggcggggcagcgttcagcgcggcagaaaaccggttcgtagagcgctccggcggggatgcgtgccgtgacttcgcgcccgaggcggacgatgcccgtccgcccgggggtgagcaccgtggcggcgctgtcggctttggcacggaaactctccgtccggccgaggatgtcgaattccagctgtgagcgattgccgcagtcgtcccatgcctcgatgcggatgcggcgggtctgtcccgcttcggtgcggatgattccgcgctcctccatgacggggtagaaacaggcgggggattgggccagctgcgcagcgcggatcacctcgttgcgcgaggtgagttgcagcgggtagtagctcacggcgtcgcagcagcgcgaattcgcctgctcgaagccgtccatgcggtattcgaaaaggggcttgccgtcggccgatagggcgaggcgccacaggccgaaggtgttgcccacgccgttgcggcggtcgctggcctcgacgacgaagtagcctttgcgccccgcgccgacgggctcttcgcgcgtcaggcggtagttgcccccggcgctgcggacgacggcatagctctccgggcggctgtgcacggggatgccctgcacggtgtcgacctcgatgtagtggatccgcatgatgcgcggcgggaggtcgtcatgggggcggatgatcccggcgcttacgacgttgtaaagccgctgcgtgcgggtgtcgcgcagttcgtagtggaggtgcggccccatcgacgagccgctgttgcccgaataaccgatcacgtcgccctgcttcacgggccaggtgtcggggccgaaccagaggtttacgctgttcgagcggcgggcgtggcgctcttcgcgcacgcgctcctcgatgtccttgcggaagcgttgcaggtggccgtatacggccgtcgtgccgttgtgcagcgtgaggtagacggcgcgcccgtagccgtaggcgcccaggcttacgcgcgagacgtagccgtcggccacggccacgaggggtttgccttcggcgccgtcggtcttgatgtcgatgcccgcgtggaaatgcccggggcgcatctcgccgaaattggccgagtagagcccttcgacgtcgcagatcgggtatatgtactcctccggggcggggtgttgtccccgggccccgacgcaggcggcagtcgatatgagcagtatcagaattcgtcgcatgtctccgtgtccgtcacgagccccgaggcggcctccacgaccgtttcgtagtcgtatcccagcgaaagcccgtaacgtatcagtttggttttcagttcgtattgtgtcgaatatttcgccgttcgtgccttgcgttccagttgccggcgcaggcgttcgtccatgccggaacggtcggcttcggcgagtgccgcgtcgatcagcgcccggtcgatgcgcttgcgttgcagggccgtgcggatcttgtattcgccccagccgctcagccgcagtttttcgcgcacgaaagccccggcgtaacgggcatcgtcgatgaagcggtcgcggacgagtttggccagcaccccctcggcgtcgcgttccgcgagtccccagccgcgcatcagccgccgggcgtcctcctgcgatttttcggcgcgggcgcagagccgcatgagcgcagcgagtgcctgctcgggtgtcttgaccttctttttccttatttcatccggctgcataccatgcggggttttccgttgaggtcttcgcgcacctcggtgtccgtatatccctcctcgccgagcaggaggcgcatctgcccggccgagcgttcgtagatctcgaaatagagcttcccgccgggacggagcatccgccgcccggcgcgggcgatggcgcggtagaattgcagcgcgtcgtcgtcggggacgaacagcgcctcgcggggttcgtactcccggacattggcgtgcattgccgcaaggtcgctttgcgggacgtagggcgggttcgagacgatggtgtcgaacggccccgggaagatttcgtccaggccgccgagcgcatccgccttgcggagcgtgacccgggcgccgagcgtgcggcagttctcggcggcgatcgccagcgccgcgtccgacaggtcggccgcgcaaacctcggccccgggcagcgcgagcgccaggctcgcggcgatgcagccgctgccggtgcccacgtcgagcagggcacgggccctgcgttcgtcgtgtaccacccaggagaccagctcctcggtttcggggcgggggatcagcaccccttcgcgtacggcgaagcggtgcccgtagaattccgtgtgccccaccacgtattgcacgggacggccggcggcgagttgtgcggccatcgcctcgaacccgtcggctgccatcggtgcgccggggtcggtcagcaaggccgataggggaagccccgacgattcggcgagggcgaccagggcgatgctccgcgcctcacgggcgtcgtaaagtcccgtgagacgggctgtgagccggtcgaggagcccgcggcgggtggtgacctccggggcgccctgcggctgcggggcgtatggggctgaggtttcggggacagacatcagtgccggatcaagttggccagcgcgatggccacggcggcttcgacgaccacggccccgcgcagggcgacgcagacatcgtggcggccgcggatcgtgagcggctcgactttgttcgtcgccaggttgtaggtattctgttcgcgtccgatgctcggggtcggcttgaccgccgcgcgtaccacgatctcgttgccgttggtgattccgccgttgatgccgcccgcgttgttggtcgcagtggtgccttcgacgtcgagcagtgggtcgttgttctgcgaaccgcgcatgcgcgccccggcgaagccgctgccgaattcgacccccttgacggccgggacggcgaacaacaggtgggcgatcaggctttcggccgaatcgaagaagggttgtcccagtcccagtgggacgccctgtacgcggcattcgatgattccgccgaccgaatcccggtcggctgccgctgtgcgcagcacctcgtcgaagcgcgcggggtcggtgcatccgccgatctcggtgatgcgcgtgtcgaaggcgatgcccggcgggagcaccttcttggcgacgacgcccgcggcgacgaacgccacggtcaggcgtgccgagaaatggccgccgccccgcgggtcgttgaacccgttgaagcggtggtaggccaccaggtcggcgtgcgaaggccggtagtggcgggctacggtggcgtagtcctgcgaatgggtgtcggtgttggcgaattcgatggtgagcggcgcccccgtcgtcatgccgttataaagccccgatacgatctgcgggatgtccggctcgcggcgcggcgtggtgccgcgggccccgctgcggcggcgtgcgaggtcggcttcgaaatcttccgccgagagcggaatacctgcgggaaccccgtcgatcgagatgccgatctgcgggccgtgcgactcgccccagatggcgagcctgaaattgtgtccgaaaatattcatggcgttcagattctgattttttccaggtcttcgaagaatccggggtagctcttggctacgcattcggcgccttcgatggtcatttccccgtcgcagagcagtcctgcgacggccatcgacatggccatgcggtggtcgccgtggctctgcacgcgggcctggcggattctgccgccgcggatgcgcatgatgtcctcctgggaggtgtccacctcgatgcccgccttggcgtactcttcgcggatggcgtccgcacggttgcactccttgtgttcgagccgcgaggtaccgcggatgacgctctcgccctgggccgccgccgcgagtgccgcgagtgccgggaaaaggtcggggcagtgcgtggcgtcgaattcgaaggcgcgcaggggacggtgcgaggccgtcacggagtcctcgtcgttgatgaccgcggccccggcccgcacgagtgccgtgcagatggccgtgtcggcctgcttcgaaagcatggagacgttcttcacggtgacttcgcccgcgacggcgcccgccacgagcagcatggccgcggcgctccagtccccctcgatgctgaaaaaggccgggcggtagcgctgtccgccctcgatgtagaactccttgtagtcgttgtggcagatctccacgccgaaacgtgccgccgtgtcgacggtcatgtccagatagggggtcgagacggcgctgcggacgtggagcgtggtgtcgtgctgcgagagcgggagcgccagcagcagccccgtgatgaactgcgacgaaacggaaccgtcgacgtcgatttccccgccccggatcgggccgcacacttcgaagggcaggtagccgtcgttgtcccgtacccggacgccgaggcggcgcagcggttcgatcatcatgtgcatggggcgccgtagcagggtaccctggccttcgatggtgacgggcatcccgcagagcgatgcgatgggggtgaaaagccgtgtggcgagccccgattcgccgacgtgcagcactttcccgcggggatgcagcccgccttcgatcgaaagggtcgaggcgtccacgtgtttcacgcgggcgccgagcgtctcgatgcaccgcagcgccgagcgcgtgtcgtcgcagaattccagattgcgcagcaccgaggtctccccgcagaggagcgatgccgccagggcacgctgtgcatagcttttcgaacagggcggcgtcagcgtgcctttaacgcggcccaatggaaccgtcttgtccattgtgtaggttatatgcttttatgggcaccggggttggccggcaccctgaaattaaaatcctcgcctctattcctgtgtttcggtctcctccccggcctgctgcgcctgctgtcccttgcggttcttcatctgctgggtcagctggtggctcttcttgagctcgaaatgctggccgaggtagaccttgcgaaccatcgggtcggcggccagttcctcggccgtacccgtcttgaggatcttgccctcgtagagcaggtaggtgcggtcggtgatggccagtgtctcgtcgacgttgtggtcggtgatgatgacgccgatgttcttgtgcttgagcgtcgccacgatcgactggatgtcctccacggcgatggggtcgacgcccgcgaagggctcgtcgagcaggatgaacgccgggttgatggccaccgcgcgcgcgatctccgtacggcgccgttcgccgcccgaaagctggatgccgaggctcttgcgaaccttttgcaggcggaactcctcgatcagcgactcgacgcgctcggtctggtactccttcgagaaatcggtcatttcgagtacggcgcggatgttgtcctcgaccgacaggcggcggaagaccgatgcctcctgtgccaggtagcccacgcccatctgggcgcgtttgtagaccggctccttggtcagttcggcgaccttgccttcgtcgtcctcgaggaagatgcgcccttcgttgggcttgataagccccacgatcatgtagaaagtcgtggtcttgccggctccgttggggccgagcagtccgacgatctccccctggttgacgtcgatcgagacgtggtcgacgacggtacgggccttatattttttgacaagttcgctggtgtataggcgcattgcgttctcttgctataaaatttttacaaagttatgcttttttccgaaaagttttttaactttacattgaattttctgattttagagtagaaacggcgaaatgaaacaatttgaatcgtccctgttgcatgacaagctgaaggagtacttcggcttttcgtcgttcaaagggaaccaggaagcggtgatccgcaatgtgctggaagggaaggatacgttcgtgctgatgcctacgggcggcgggaaatccctctgttatcagcttccggccatgctcatggagggcgtggcgatcgtcatttcccccctgattgcgctgatgaagaaccaggtggacgccatgcgcaccttctcggccgagtcgggaatcgcccatttcctcaattcgtcgctcaacaagacggccgtcgcgcaggtgcgtgccgacgtgctggccgggaagacgaagctgctctatttcgcccccgaatcgctgaccaaggaggacaacgtggccttcctgcataagataaaggtatcgttctacgccatcgacgaggcgcactgcatttcggagtggggacacgacttccggcccgagtaccgccgcatccgcccgatcatcaacgagatcggcgctgcgccgctgatcgccctgacggcgacggctacgcccaaggtgcagctggacattcagaagaacctcggcatgtccgacgcctcggtgttcaagtcgtcgttcaaccggccgaacctctattacgagatacgccccaagggggacgtcgaccgcgatatcatccgcttcatcaagcagaacgagggaaagagcggcatcatctactgcctgagccgcaagaaggtcgaggagctgaccgaactgctcgtggccaacggcatccgcgcgctggcctaccatgcgggcatggacgccgcgacgcgcgccgccaaccaggacgacttcctgatggagcgggtcgaggtgatcgtcgccacgatcgctttcggcatgggcatcgataagcccgacgtgcgctatgtcatccattacgacatccccaagtcgctcgaaggctattaccaggagacggggcgtgccggccgcgacggcggcgaaggttactgcctgacgttttacagttacaaggacattcagaaactggagaaattcatgcagggcaaacccatcgccgagcaggagatcggcaagctgctgctgctggaaacggtgtcctatgccgagagttcgatgtgccgccgcaagacgctgctgcactatttcggcgaggagtataccgaggagaactgcggcaactgtgacaattgccggaatcccaagccgaagatcgacgcgcgggcggcgctcaagatggcgctcgaggcgctgcgcgatatcggcgacaagttcaaggccgactacctgataaacgtgctcacgggcaagaccacggcgctcatcaagagctacggccacaacaagagcaagtggttcggggcgggtgccgagcacgacgtgcgtttctggggcgccgtgctgcgccaagcgctgatcctggggctggtggacaagaatatcgagaattacgggctgatctcggtgaaccgcaagggcgagaatttcatcgccatgcctttccccgtcaccgtgacgctcgaccacgactatgacgaggaggagaaggaggccgaggccgtcgtcccgatgggcaagggcggcgcggcggacgaggaactctttgcgatgctcaaggatttgcgtaagaaagtggccaagcagcacgggctgccgccgttcgtcatcttccaggatccgtcgctcgaggacatggccgtgcagtacccgatcaccatcgaggagatgcagaacatcaccggcgtgggagtgggcaaggcccgcaagtttggcgaggagttcgtcaagctcatcaaggcctatgtcgaggagaaggagatcatccgtccgcaggacatgatcgtcaagtcggtcggcaacaagtcgggcaacaagatcttcatcatccagtccatcgaccggaagatggatttcgaggatatcgcccgcgccaaagacctcgatttcgacgaactgctgaccgagatcgaaggcatcgtcaactcgggtacgaagctcgacatctcgtactatctgagggactttatggacgaggacaagatcgaggacatttacctctatttcaaggaggacgccgagagcgattcgctcgatgcggccatcgacgaactgggggccgactatacggaggaggagatacgtctggtgcgtatcaaattcatctgcgagcagggcaactgacgccctggacacctgccatcccacggctgttgcgtcactgttccgaggattgacactaacttaataatacgcctatgaacaaaaagacttttactgttgccgtgattttcctgatcgtgacactcgtgtggctcggagtcaatatattctgggccttgtcgaacagcaattgtatattcgaccttgtcgtggccgtattgttcgtgcttgcaggcgtcgggatggtgtacaacgaatgccacaagcgcaaacgcaagcacctcgacgaggtgaacaaatacaaaataccgtaacctatgtgtgccatgcaacggttcctgacgatcatgtccgtgtttttcttcgtgtgcggcgtcgtttcgctgtggcggatcctgtccgacgacgggcgggatatctggtacgtgccgctcgtactgatcggtgcgtcggggattttggccgtccgcgcccggagcatgggccgcaaaaatacgcaaaacgaagactgatatgaaaaccaatgtgatgcagatagtccgcctcgtgatgatgatcgtggcggtggccgggataatctacgccctggagtatatggagcgcggcattgctgtgtggttctggatcacgctgctcggcgtgggtttcgtggggctgctctatacgttccgcctcacgcagcgccgcgtgcggctcgaacgccgtgcccgggagcggcaggaaaagaaaaaatcccgccggtcgaaacgctgaccttcatccgccggacatcgttgcccggcggttcggtttccgggcggaggcttgcggtttccgatggggcggttttcccggggcggcagttttattccggaagagcgggcttgtttcctgccgctggatttcgccgtcgtggcaggcggcaaggccgtgggcggcgtggggttcgtgctcgggacggatgtcgagcgcttcggcgccaaaatcggcttctggctctcaagccgctgccgggggcggggcatgatgacggcggccgtccggcaggccgtggagtggatgttcgcaaataccccgataattcgtatctttgccgcggcttatgccaccaattccgtatcgcagcgggtgttggtgaaagccgggttccgacatgtcgggacgttccgtaaggcttttttcaagaacggggcgttcgtggacggctgttattacgaattactgaaagacgaaaatgagtgaagtaagggcaaaaaaggcgctgggacagcatttcctggtcgacctcaatatcgcgcgcaagatttgcgatgcgctttcggggggcgtaagaccggaggccggggcggaaacccgggcggtggcggctggaagtgccgatgccgatgcggaaatccggacgagggtggctggatatgccggagctggggcggaagcccggacgatggcggtaggaagtgccgatgccggggcagaagcccggacgaaggcgacaggaactgccgatgccgatgcggaaacccggaggggtgtagttgcaagtgccgatgcccggctcgcggcggatacgaccgctgccggtgcgccggcggccgcggaagaggaacggggcggcgcagtcccctgcgacgtgctggaggtcggctgcgggatgggggtgctgacgcagttcctgctcaggcgcggcgacatcaccacctacggcgccgagatcgacccggagagcgtcgggtacctccatgcgcatttccccgagttcgcaccgcggctgatcgagggcgatttcctgaagatgaacctgcgcgagcgttttccgcggggactgaagatcatcgggaatttcccctacaacatctcctcgcagatatttttcaaggtgctcgagcaccgcgacctggtgcccgaatgcgtcggtatgatccagaaggaggtcgccgtacggatcgcggagcccccggggtcgaaggagtacggcatcctgagcgtgttgttgcaggcttggtacgacatcgaatacctctttacggtcaacgaaacggttttcaacccgcctcccaaggtcaaaagcgccgttatccgcctgcgccgcaacagcgtcggacggctcggctgcgacgaggcgctgttcgtgaaggtggtgaaagcgtcattcggccaacgccgcaagatgatccgcaactcgctgcgggcggtattcggcgatttcggcggcgcagaacatcccttttttacgcagcgcgccgagcagctctcggtcgccgatttcgtgcagctgaccaactgggtcgcggccaaccggaaataatcgcggcgggtcgtggttgccggatgcaggagtcaggcgacagactctggatgccgggccggaagggcggacagtgtgtaccgaaggcggaaatgggaaagcaccgggggagcccggtgcttttttcatgccgtttggcgggcggagcattgctccgcagccgcaatgcgcaggcgtctattttcgcaggtctcccgcaatgaccgtcaccagttcttcgcgggagaggtatttccgagtcagccgctgcacgtcggccggcgtcatggcctgtatgcggcggatgttctcgttgatgacggtatggtcgcggccgcagaggatgttctcgattgtgacgtcggcaatgccgaacggcccgtcgaggatgcgcatcatctcgccgaccatgatgttcttcacgagcgaaagttcgccctcggtcatcggctcggcgcgcaaccgttcgatttcggcgtaaatctcgcgcagggcctcctgcgtgacctccgtcccgacctgtgccgctacggcgaaatagccctcccgttcgaagttgaccatggcggccaccacgccgtatgtatagccgtgctcctcgcgcaggttctgcatcaggcgcgaaccgaaataaccgcccagggcggatgccacgacctgcatgccgaggaaatcgggatgctggcgcgggaaaagcagccttccgatgcggatcgacgactgtacggcgcccggatggtcgacccgcgcttcgtgctgcgtcacgggtgccgggaacgggatgccggcctggggttcgcgtcgcggcaaccgttccgccagcgccgcgacggcctgccgttcgtggtcgccgatgcgcccgctgcatatcgtgaacccgttgtctgccgtatagtggcttttataaaacgccgctacatccccgcgcgtgagtttatcgtattgggcttcgtctgccgagatgccgtagggatgcgaggccccgaagagggcgcgggcgaaagcctcgcgggcctgggtgtcgacctttgtgcgttctacggccagccgctgcttgcgcttggcgcaataggtgcgcagttcctcttcgggaaaaacggggtgcaggagtatctgttctgctacggcgagcgtttcgtcgaagaatttggagagcatgcagaaactgatgtaggcatagtcgcggtcgatgttgacgtcgtagtacgagccgtaatagtcgagccgttcggcgatctggtgcgccgtcatgtcgcgtgtcccctcggcgagcatgttggcggcggccgacgccgagaaaggaacccgttgcatggccgatccggcgcggaacacgaaggtgacgcgcagcacttcgaagtcgtcagaggcgagcgtgtagagcgccgagccgtttgccagcaggctcttcccggcttgtgcgacctcgacgtcggagggtattacgaggggtggttgtgtcattttttcgctttgtaaataagggtggaacagttttcggggcggaaggtgcggcggctgaaggcgaggatgtcgccggtcgtgacggcacggtaggccgccacctcgccgttgatgagcggcaggtcgcccagcatctcgtagaagcccaggttcatcgccttgttcatcacgttcagctcgccgaagagcgtgttggcctcgaacttgtttttgaccttctcgacctcgtagtccgatgccgggacactctgcaatgcctcgatttcggcgcggaaagccgcttcggcctgttcgggagtggtatccggcagcagttgccccgtaaagacgaacaaccccgggtcgacgtcgcccgaaatgtaggcgttgaccgaggccagcaggcgctgttcctgcaccaggtgtttgtagagacgcgacgagtcgccgcccgacaggaggtcggagaccaggtcggcggtatagaaatcctgcgaggtacggccgcccatgtggaatgccagtgacagggtcgtggcgggtacgtcgcgttcgaccgtctcccggcggggcgcctcctgctgcggttcccgggggatgggctggggagtcacggtgcggtcggcgagcggggcgaaccatttttcggcaaggtcgagcatgcgctcctcgtcgaagtcggccgagacggacaggatggcgttcgaagggtggtagtgggtgcggtagaaggcctgtacgtcgtcgagtgtcgctccggcgatgtggtcgggcgtgagcccgatggtcgcccagcggtaggggtggactttgtaggccagtgcccgcagcagcatcggctggtcgccgtagggctggttgaggtagcgctggcggaactcctcgatcaccacgcgtttctccgcctcgagtttttcgggggtgatgtccagcccctccatgcggtcgctttcgagccacagtgcggtctcgatgttgtccttcgggagggtgatgtagaaatccgtatagtcgttgttggtgaaggcgttgttgtcgccgcaggccatctgcacgggcaggtcgaaattcgggatttcgcgcgtgccgcggaacatcaggtgttcgaacagatgggcgaaacccgtgcgcgcggggttctcgttgcgcgccccgaccttatataatatgtttactgcggcgagtttcgaagccttatcccggttgacgacgaccgtcaggccgttcgccagtgttctcttcttgtattcgatcatggatgcaaagatagtaaaaaagcagcggcaggaaaatttagtgacgcctcatttgaagatggattcgaagactatgaagtttggggattggaatccattaccctgccgctgcgtgtggaaaacgcttcggcagaaaacgggaagagtggtgccgaacctgtggcccatggctctggtcagcctctatcccacaaatcacagcacgcacccttctgggtacgatctgtattgtgggataacaaaaaatttaccagattttagggccccaatactatcgtttatacacgatgatatgtaaagaacgaattatggaacaaaattaggaaaaaaatcccgatttgcaatcgccgcgcccgaacaacctatttatcggcctttatttcccagtgtttcgccgcgtaaaatttgttgacggccaaaaaattatctgttttctcaaccgccaatgtgcctgtgaaaaaattccgcagctttttccggcccgggatttgccttgccggcaggggtggcgctccggccccgtgcacgcacagcccggactgtgcccgcgagggcgtggcaggtaatccgctatcggataataagttcggcaagtcggtgattatccgcgagttcgctgttaaataaataacaaccccgttgttattccaataacatcctgcgtagtgaaaaaaccggatgatttgtcagaaaatcggactgatttttccgccggaattgttatctttgcaacgcattttgtcccgaatccaggaaaaacacacaatatcatctaaaatttcaacaaaatggcagaaaagaaatttatcacttgtgatggtaactacgctgcggcacatgttgcatacatgttctcggaagttgcggcgatctatcccatcacgccgtcgtcgaccatggccgaactcgtggacgagtgggccgcacagggtcgcaaaaatattttcggcgaaacggtgaaagttgtcgagatgcagtccgaagccggtgctgcaggcgccgtacacggttcgttgcagagcggtgccctgacgtcgacgttcaccgcgtcgcagggtttgctgctgatgatccccaatatgtataagatctccggcgaattgctgccgggcgtgttccacgtttcggcgcgtgcgctggccgcacagtcgctgtcgattttcggagaccaccaggacgtcatggccacccgccagacgggattcgccatgctggcgacttcgtcggtgcaggaggtgatggatctggcgggcgtggcgcacatcgtgtcgctcaaatcgcgcgtgccgttcctgcacttcttcgacggcttccgtacctcgcacgagatccagaagattgagctgatcgacgaggccgctctgacggcgatgcttgaccgcgatgcgctggctgagttccgccggcgggcgctcaaccccgagcaccccgtcacccgcggtacggcgcagaaccccgacatctatttccagacccgcgaggccgccaaccgcttctacgacgccgtgcccgacatggttgctgaggcgatgcgcgagatttcgaagatcaccggccgcgagtacaagccgttcgtatattacggagctgcggacgccgagaacatcgtgatcgcgatggggtcggtgaccgaaaccctccgggagacggtcgactacctgaacgcccgtggcgggaaggtgggcgtcgtgaccgttcacctctatcgtcccttctcggtgaaatatctgggcgaggtgctgcccgaaacggtgaagcgcatctgtgtgctcgaccgtactaaggaaccgggtgcaaacggcgacccgctctacctggatgtcgtcgaggcatttgccaactgcaaggatattccggccgaccgcaaaccgctcatcatcggtggccgctacggcctttcgtccaaggataccacgccggcgcagatgctggccgtgttcgccaacctcggggccaacgagcccaagaaccagttcacggtgggcatcgtggacgacgtgaccttccgctcgctgcccgtgggcgaggagatttcgctcgccaagcccggtacgttcgaggcgctcttcttcggcctgggtgccgacggtacggtaggcgccaacaagaactcgatcaagatcatcggcggcacgacgaacaaatattgccaggcatacttctcgtacgactcgaagaagtcgggcggttacacctcgtcgcacctgcgtttcggcgacctgccgatcacttcgccctatctggtcaccacgcccgacttcgtggcgtgccacgtgccttcgtacgtcgacaagtacgacgtgctgaaagggctgaaagccggcggttcgttcctgctcaactcggtgcacgacgcggctacgacctgcgccacgctgcccgaccacatgaaagcctatctggccaagaacaagatcaatttctatatcatcaacgctacgaagatcgccgcagaactcggactgggctcgcgtacgaataccatcatgcagtcggcattcttcaagatcgccaacgttatcccgttcgacaaggctgtcgacgagatgaagcatgccatcctgaaatcctacggcaagaagggcgaggacatcgtcaacatgaactatgcggccgtcgacgccggcggcaacgccgtggtgaaggtcgaggtgccggccgaatgggcgcagatcgacgacaacggcttcgcacatgtttcggatgcgtcgtatcccgagtttgtgcgcaagatcgtcgagccgatcaacgggctgaagggcgatgacctgccggtatcggctttcacgggccgtgaggacggtacgtgggagaacggcacggccgcctacgagaagcgcggcatcgccgtgaatgtccccgagtggaagatcgagaactgtatccagtgcaaccagtgcgcctatgtctgcccgcacgccgtgatccgtccgttcctcgcgacggaggccgaggccgccgcatcgggcgtggaatggaagcaggggctgggcgagaccaaggagtacaagttccgcatccagatctcgccgctcgactgtacgggctgctcgaactgcgtcgacgtctgcccggccaaggagaaggcgctggtaatgcgtcctctggaggagcagatgccccagcagaagaactgggactacatcaccaagcatatcggctacaagcaggtcgtcgacaagaccaagtcggtgaagaacctccagttcgcacagccgctgttcgagttctcgggcgcctgcgccggttgcggcgagaccccctatatcaaggctatctcgcagctgttcggcgacaagatgatggttgccaacgccacgggctgtacctcgatctattcgggttcggcaccgtcgaccccgtactgcaccaacgacaagggccagggcccggcatgggcgaactcgcttttcgaggacaacgccgaattcggcctgggtatgcacctcggtgtcgagaaactccgcgaccgtatccagaatacgatggagcaggctattgccaactgtacgaaatgctccgacgagctgaagggcgtcatgcaggagtggatcgcttcgcgcggttcgtcggccaaatcggccgaggtctcggcgcgcctcgtcccgatgatggaggcctgcggctgcgattactgcaaggatatcctggagatgaaggactggctggtgaagaagtcgcagtggatcatcggtggcgacggctgggggtacgatatcggcttcggcggtgtcgatcacgtgctggcatcgggccaggatgtgaacattctggtcgtggataccgaggtttactcgaataccggcggacagtcgtcgaaatcgacgcccgtgggtgccgtcgccaagttcgcttcggccggcaagcgtatccgcaagaaagacctcggcgccatcgccatgacctacggctacgtatacgtggcgcaggtttcgatcggcgcttcgcagatgcagttgttcaacgtgctcaaggaggccgaggcctatcccggcccgtcgctcgtgatcgcctatgctccgtgtatcaaccacggcatcaagggcggcatgacgcgcacgcagaccgtgggcaaggaggccgtagcctgcggttactggcacctgtggcactacaacccgcagctcgaggagcagggcaagaacccgttcgtgatggactcgaaggagcccgactggtcgaagttccgcgacttcctgatgaaggaggtgcgttacacttcgcttaaaaagtcgttcccggccgaggccgacgagctgttcgcagccgccgaggagaacgccaaatggcgttacaacggctaccagcgccttgcgaagatggaatattaattatattatacgttatgcggagggccgcggcattgtgccgcggccctttttgtatatccggaaaatgcttcgtgatgaaaaaacgcgcgttcgtttttgaaatcccccccccgagtgaatttatttgtccatatagacctgagaggataaatttgcacacatttgaattacaaacaagtatctcacttatgaaaaattttgtgcacaaaattacctgtgtgctcgtcatgtgcgctgccacggtagcgtttacggcatgtagcgacagcgacaacaagggcgacggcccggttaccggtaccctcagcgtggaaaccggcgccctgaaatttacgagcggagcctattcgaagggattcgaggtggaaaccgacggtacggtcggcgcgatccaggtcgatgtgaactacaagggtgccgaaaccggatggatcaccgcgaaagtgaacgacggcgacgtggtggtcaccgtggcgcggaatacgggcgatgcacgtacggcggatgtcgtcctgagcgccaagggcgccgagccggtgaccgttgccatcagccagaaggccgtgttctcgtcggatctggtgggccggtatacgccctatgttcccgatcccgaaaatccgatcgctaatttcttcatcaaccccgtatacgctgatatggatccggaaaaggtgccgcagatcgacatgggtttcctttttcccggatttatcatgcccgttaccaccgtcaccggtctggccaaccagctcgtggggatgatgtatggcggcggcctcacctatttcgatttcaaggacgacgggacgatcggcgcgggttaccgcgacatgctcgggttcgacatgaatgccggccctacgtttggctccgaggtcgaattccccaatgccgagacgctggaggtgctgcctgtcgatgcgattacctattacaccaaggacggcaaggtctatttcgccatcgacaaggagtacctgacctatatcggccaggcggagctcgaaatgaacctgccccagatcatcgacgccctgctggcgcagtatccgggtctggggatcgaagcgaccgacgattactatgccatcccgctcaagtacgcggtcaaggacggcgttacgacgctgaaggtcgacaaggagatgatgatgccttacatgccgctgattacttcgctggtcgatgctttcctccccgacggggatatcgaggtgtcgctcgaccccgaatccgacccgatgaagatcccggcaaaggcgctggtcaactcgttgctcgatgcgctcttcaaccagagccaatccatcgagatcggcatcggccttacgaaataggcggacacgataacaaaccctttccaggcaggttgcggaaactccgcaatctgcttttttttcttttgtaatcttgtctgtccgaataatatttcctatttttgctttcggcaacctaaaatgaatcaattatgaagaaaagttttcttttgttggctgcaatgctcctttgctattgcggtacggcattcggctggggcaaatcggggcatgacgccatcgcctatatcgccgagtgcaacctgacgcccaaggccaggaagaacatcgagaaatacctcgacggccgttcgatcgtctattatgcctcgtggatggatgtgtaccgccatacaccggcttacaaggtgacctcgggctggcacggcgatagggtcgacgccgacgggaagtatgtgcccaacgcaaaaggcgacgccttgcaatgcatcgaggaggcgatctccagattgaaggattaccgcagcctggacgattcgacggtgctggtgtcgatcaaatacctcgtgcacctggtgggcgacatgcattgccccgtgcacgtgaaatacccttggtataagaatttcaagttcgacctgaacgggaggcccagcgaattccatagtttttgggacagcggggtgctcgacctgaaccatcgctggggatacgtggagtaccgccaccagttggatcgccttacgaagaaggagatccgtgcagtcaccgccgggacgccccgcgactggctcgaagagagcgcccgggattgccgcgtgatttacgagtggacgaagcccggccagaagtttaccaagaccgaggcccgcgacctgctcaacacggttcatccgttcgccgaggagcaaatcctcaaggcgggctaccgtttggctgccgtacttaaccaactattcggttaattttgtaattttgcagacgtgaggcggttttgtgcgattcttgcaggggccgccatgttattaatttttacaggtacgttatgaaaaagtattttgcagccgctgcgctgcttatgatgatggccgcctgcggaagcgccggccaggacaagaagctcgaaggcacgacatggaaactcgccaagatggaggcaatcccggccgcggccgtcggtaaggaggccgatttcttcaccctggagttcaatgccgccgatacgatggtcgcagggcgtacgaactgcaaccgcttcttcggcaagtatgagctcaaaggcaaggaactcgaactcaagaacctgggcatgacccggatggcctgccccgacatgcagtacgaggatgcctttgtcaagatgctcgacgaggtagaccgtttcgagatcaagggtgcggagctgaccctcttcgacgaccacaaagcgctggccgtgttcaaggccgtcgaaaaagagcctgcgaagcagtaattccgccgacgcggaatatttgcggcagtccccgacggggctgccgttttttttgtataaggcggaatgaaacgacggtttggtggagaactgctcccggtatggatgccgggtaatagccgaacggccggatgcgggagctatgtggcgggaggggggattgttttacggccggatgcgggggcggccggagcgggcaaaaaaagaacggcggcaggaaaaaaagtgacgcaactctctttttgtatgaagaatccggttaccggaaaagtatcctgccgccgcataggattcgattgcatcggcaggagcgcgacaaatggggttcatttgtgcaaaagaagaagagtgccgccgaatctgtgactcctgaggttctggtaaacccgcaaatccaacaaaacagcgcgcacccttccgggagcggactgtatttgaacttgcaaaaaatttaccagatttcaggatgtcaatacaatcgtttataatactcaatatgttaagaacgcatgcaattacggtgtactgcatagcaaaggtagtcaaatttccgcaatctgcaactacttatttgtattggagccgggcaacggaaccgatagctgaaaaacggcatgagggaggcgtatatggccgtatcgtgtctccccgtgtgtttcgcgcatggggattcgccgcatggcttcggggctcaaagaaacaagcggcctcccgaaaggggaagccgcttgtcttgtgtctcttatcggaacgcttactcgctcaggggagttacgctcacataggatttgcctgcgcctttcttgcagaattcgacggtgccgtctacaagggcgaagagcgtgtggtctttaccgatacccacgttttcaccggggttgtgaaccgtgccgcgctgacgaacgataatgttgcccgccttagcgaactggccaccgaataacttgacgccgagtcgcttgctttccgactcgcggccgttcttcgaactacctacacctttcttgtgtgccatttctcttcagttttaaaggttatgcaacaatttcctcgacaagaacctgtgtcagatactgacggtggccgttgcacttctgatatcccgttctgcgctttttcttgaagaccaggactttttcgtccttcagatgcttcaggatcttgcacttcaccgaggcgcctttcactacaggtgcacctactttgacctgaccgtcgttgtctgtgagcaggactttgtcgaaacttacggacgaattttcttcgccctgaagacggtggacataaagtttccgacctttctcagctttaaattgctgacctgcaatctctactataacgtacatttaatgcgatatatgtatttgaacataattcggagtgcaaatatacgcatatttattttataagcaacatcccgcgcgaatttttttcggcacggtcggctctggcatggttttgggcggggttgccgcggacagtgccgcatgacgccgtgccgtccctgcaacagcgggcgccccgcacaggaggttttgtcttgcgccgaagctgcccggggaggttcggcgtgaaatagctgttaaaaatttcacaatgtcataaattcttgttacctttaccatggcaaccgaagttaccgaactcaaaagaagagctacgatgataaacgacaaggtgaggatgtacctgctgccgccgctcatcaatgcggcagtcagggccggagcctcgataatgaatgtctataaaaacctcgacgattacgatataagcctcaaagacgacaagacgccgatcacgctcgccgaccggctggcgcacaaaaccatccgcgaatacctgggcccgacgcgcatccccatcctgagcgaggaggggcgcgagatgctctacgacgagcgccgcaactgggagctctactggctggtcgacccgctcgacgggacggtcgaatttatcaaggggaacaatgaatttacggtcaacatcgccctgatggagaacaatgtctgcatgggggcggtgatttacgtgccctatttcgagaagctgtatatcgcggggcgggatgcaggctcgtatgtcaaggagcatgtggcgcccgattccggggcggaatatacctacgacgagatcgtcaccgggtggacgcgcctgccgttggagtgcgaggccgtgcgtccgcatcctcgcctgcgtgtggccgtgtcgcgctcgcaccagacacccgagaccgccgagcatatcgcccgcctgcgcgcgacgcaccccgacctggagatcgtcgaacagggcagttcgtataagttctgcctgctggccgaggggcgggtcgactattatgtccgcacgacgcatacttacgagtgggacacggcggccggggagctgatcctcgccgaggccggcggtcggacgcgcacgctgcccgacgacggggtgctgcgctacaacgaaaaagacctgcgcaacccgtggttcgtctgccggtcgaagtactgcgtgatataaaacggctcgggcgacggagccgcaggcaattcggatacggccgaacgccgggccggtaatcctgtgcggcatgatgcgttgccaaagagcgcccggcataacggggcgtaccgatatgaaaaagaggagcgtcactcctcttttttcgttgtctgttcgatgtcgcatgccgagcagttgcccgaacagcccgcgtcggcgcagtctgtttgtccggagtcctcgcgcgattcctgcacggcgcaccggatgcccagccgctgcatgttcttgttggtcgatatttccgagtcgatatggtgtcccttgatcatcagcgtcagcgacatgcccacgacgaagagggctacggcgcccagggcgaagaggaaaacgattaaccacgttggcataacggtaaggtatttttatgtgctgaaattttggctttcggtcacaaatgtatacatttgtaagataaattgcaaaaatgctgccttatcctgtcggcgggcggcgcagaaacgaaacgacaacagacgcaatactatgaaaatcgtgatagcgggtgcgggcgagatggggagccatctggcgaaaatgctcagtggcaacggccacgacatcaccatcatcgacgccgaccagaagctgctttccgacgtggggagccttgccgacgtgatttcggtcgagggtgattcgacgacctttgccgtgctccgcaaggcgcaggtgcgcaagtgcgacctgttcatcgccgtgaaccacgtggagaacgacaatgtcgtggcggcgatgctggccaagaagctcggggccaagaaagccatcgcccgcatcgacaacaacgaatacctggaacccaacaacaaggagatgttcatcgacatgggcatcgactacctgttctaccccgagaaggttgcggccagcgaggtcatcaacctcctggggcatacctcgaccacggagttcgtcgatttttcgagcggcaagctctcgctggtggtttttcacctggagccgacctcgcccctggtgggcaagccgctggaggggttcgatgacgacgaggccccgctgagctaccgcacggtggccatcacgcgcggcgggcagacgatcatcccgcgccgcggcgaattgttcatggagggcgatgcgatctatgtgatcgcccgccaggatgccgtgaaacaggtcatggagttttcgggacagtcgaatatcgagatcaagaacatgatgattctgggcgggtcgcgcatcggcatccgcatcgccacggagctgcaggacgaggtgaacatcaagctcatcgactacaacgccgagaaggcctaccggctggcggagatgctcgaaaagaccctcatcatcaacgaggacggccgcaacaccgaggccatgatggaagaggggctttcgaacatggacgccttcgtggccgtgacggggcgcagcgagaccaacatcctcgcggcgatgctcgccaagcgcatgggcgttaagaaggtgatcgccgaggtcgagaacctcaattacatcaacctggccgagtcgatcggcatcgacacgatcatcaacaagaaactggtgacggcgtcgaacatcttccgcttcacgatgtcgaccgacgtgcaggccatcaagtgccttacgggcagcgacgccgaggtgctggaattcatcgtcaagcccaatgcgccggccgtgaagagccgcatcaaagacctggggctgcccgaggacacgatcatcggcggcatcgtgcgcggcgacaaggtcttcattgccgtggacaacatggaaatcaacccctacgaccgcgtggtggtcttcgccatgcctgcgtcggtgggcaaagtgggatacttttttaactgacgacggcgctgtcgggcccggcgtgcgccggggcccgcacaccggcggaatatgaaaccgaacagacaagtgtcgtttagaagcatattattcaaggcctggttttcgcagcgcgagcgggctatcgaccgtttccggcgccgtcctgccgagacgcaggagcgtatcttcaggcagctgctgcgccgcgggcgcgggacggaattcggatggaggtacgacctggggcatgtccgcagcgtggaacagttccagtcgatggtcgagacgttcgattacgaaaccttcaaaccctatatcgaaaagatgctggccggggagcgcaacgtcaccgcgccggggcgggtgaaactctttgcccgctcgtcgggcacgacttccgaccggagcaagtacatccccgtcacggaggagtcgctctggtggaaccacacgctcggcatgcgggacgtggcgacggtattcgcggccaacaacccgaaaacgaaggtcttcgacggcaagacgctgactctcggcgggtcgtgcagccgcgaggggcgcaaccttgtgggcgacctgtcggcggtgctgatccacgaaacgacgttctggagcggctggttccgggcgccgcgcaccgccacggcgatcatccccgatttcgaccgcaaggtcgaggccatctgccgcgagtgcacgggcgaaaatatcacggccttcgccggggtgccgtcgtggaacctggcgatgatgcgccgcgtgctggattatgcggggcgggagaacctgctcgaagtgtggcccaacctctgcatgttcgcccacggaggcgtggagttcgcaccctaccgccgttcgttcgaggcgctgatcccttcggacaggatgcagtacatggagacctacaatgcctcggaagggttcttcgcgctggccgacgacccgtcgcggagcgacatgctgctgatgctcgactacggcaatttcttcgagttccgcagcggggataccgtcgtaccgctcgaaggcgtggaatgcggcaaggtctacgccatgctcatcacgtcgaacaacggcctgtggcgctacgagatcggcgatacggtggaattcacctcgacgaatccttaccgtatccgtttcgcggggcgtacgaggcagtatatcaatgtcttcggtgaggaattgatcgtcgacaacgccgaccgcgcactgctggccgcctgcaacgaaacgggggccgtggtcggggaatataccgtggcgccgtgctacatgtcgctgcgcgagcggggcgcccacgaatggattctggagttcgagcgcgagcccgacagccgcgagcatttcgccgaggcgctcgaccgcgaactgcgggccgtgaattcggactacgacgccaaacgccgcacgacgctcgagcggcagcggctgacggtcgtcagccacggccgtttcctcgcgtggatgcgtgcccggggcaagaacaaggtgccgcggctggtcaacgaccgccgtgtggccgacgagatactggcgttcggcggggaagcgaagtgatggcgcgtgttgctgcggcgtaatgccgtgatgtaccgctgcggagcactccggcggccgtccggagcggccgggtagtatttaggatgtaaaacaaatatcgtataatatgtatatagccattgcaggcaatatcggaagcgggaagaccacgctgacccggattctgaccgagcgttacaacgccaaagcctacctcgaggagtgcaacaacccctacatcggcgatttctacgaggacatgaaccgctggtcgttcaatttgcagatttatttcctcgggagccgcatccagcagacgatggacatgctggccgacaaccgcgattcgggggcgatcttccaggatcgcacgatctacgaggatgcgcatatcttcgcggacaaccttcacgaaatggggctgatggcctcgcgcgacatcgaaacctacatgaaactgttccggctgatgaccacgctcatccccaagcccgacctgctgatctacctcaaggcgagcgtgccgacgctcatttcgcagatccgcaagcgcggccgcgaatacgagatgaacatcgacgaattatacctcaagcgtctgaacgacaagtataacaactggatcgacaacatctacgaaggcgatgtgctggtcgtcgacaaagaccatgaggatttcgtctccgaccctacggtgctggagaagatatgtgcgcgcctcgatgcgctcgaaaacagatagcgacgcatgacgctgcctgagaaattcgccgcacgcgtcctttcggagctggggccggaagagggggcggcgctgtgcgccgcactcgataccgagccgcccgtgtccgtgcggctgaaccctgccaaatgtgccggtgcggccgaacccggagcggtgcaggacggcaccggggcggcaccgggaggatacggatcgccgcaggggagctccgggacggatgtgcccgccccgcttccggttttgcaaaacgccgacggctgtgtaccctggtgcgccgacgggtattacctggcggtgcggccgcagttcaccttcgacagcgatttccatgccggggcatattacgtgcaggaggcgtcgtcgcagttcgtggggcgcctgatgggtggagagggggttgcggggaagcgaatcctcgacctttgcgccgccccgggcggcaagacgacgctctatgcctcgctcgcggggcccgacgggctggtcgtcgccaatgagattgaccgccgccgtgcgcaggtactggcggacaacgtccgcaagtggggtacgggcaatgtcgccgtgacgacctgcgaaccccggcaactgggcgacttcgaggcgtggttcgacatggtggccgtggatgccccctgctcgggcgaagggatgttccgcaaggatgcacaggcccgcgccgaatggagcgagtggaatgtaaagctctgtgctgcaaggcaggacgggatattacgtgaagcatggcgtgcgctcaaacccggtggcaggctgatatacagcacctgcaccttcaaccgcgacgaggacgaaggcgctttggagcgtatgctcgcatgggcgggcgacgaggtcgcagaggcggaagacatggctgtcgacggggcgtgggggatcgtctgcggccgggtgggggctttccgcacctaccggttctatccccaccgggcacgtggcgagggttttttcgccgccgtggcctgcaaggcttatgatgccggcggccgttgccgcaccccgaaggcgcggcgcacggtatttgcgcaggtggacaaggcctcggcggcggagctgcgccgttgggtgcgcacgccggaacggatgtgcttcgcggcggtgggtgatacctgctacggatattacgtcgcgcaggccgaggccgtgaaggcgctcggcgaagcgctgcccgtgatctatgcgggcgtggcgatggggcagctcttcaagggaagccttcggcccgatccggcgctggcgttcttctgcggattgaaccgcgaggcggtgcccgctgcggagctggacgaggcgcaggcgctgtgttacctgcgcaggcaggaggtcgccgccggggcgttttccgaaggggtgaacctggtgtgtgcccgcgggcgggcgctcgggtttgcgaagcggatcggtaaccgggtgaataacatgtaccccaatacattgcgaattattaaacgatagatatggccgagaaacttttttattcgatgggcgaagtggccgagatgttcgacgtcaatgcgtcgctgatccgccactgggagtcgcagttcagcgtcatccgccccaagcgcaacaagaaaggcaaccgtctcttctcgccgcaggatgtggagaacctcaaactgatctaccacctggtcaaggagcggggcatgaccctcgagggcgccaagaaggccctgaaacagaagcctgcgaccgagggcggcgtgcagcgcgatgccgagctgatggagcgcctgcaacgcatccgtgcgctgctggtcgaggtgcgtgaagacctgaaggcgggccagggcgaactcctcgccgacggggatgccgaagtcccggcggcggaggccggggcggcagtgccccgtcgcaaggcgaaacccgtggtgaagatcgtcccggaggatgccgcggcgcagggggctgccgaacccgggcagcccgcgtcgaagcgtccgcgcaagccccgccgcaagaaggaggagccggaacacaaggagctcttcgccttttacgaacagtcgctcttttaggggcacaacgggcgccgcatcccttggggaaggctgcgcagcaaggcggaacgcgcagtgccgcggccgcagggcggatggccccgccggggcggaaaaaatgataaccagacaaatcaggatactatgctaatcagggaagtgaccgatgtcatcgagcgtttcgcaccgctcgcatggcaggaatcgtacgacaacgcaggcttgatcgtggggcgcccggacgacgaggtgcacagggcgctgctggccgtggatgtcacggacgaagtgatggccgaggccgaacgcgaagggtgcgacatggtcatcacgcaccatccgatcgttttccatgcgctcaagcgcttcaattcggcagaccaggtgcagcgctgcgtcgagcgggctatccgcggcggcattgcgctctatgcgtgccacaccaacctggacagcgcccccgaggggatgagctggcggctggcagagatgctgggcgtgggggacttgcgcgtgctccaacccgcgcaggcggacgaaaaggtcgggttcggcgtggtgggcgagctgcctgcggcggtcgccacggtggagttcatgcgccgcatgcagcgcgtgctgggcgttcgggtcgtgcgccacagcgacatcgcttcgcccgaggtgcggcgcgtggcggtctgcaccggtgcgggggcttcgatgatcggcgacgcgcgccgtgcgggagctgacatatacgtcacggcggatatgaagtacaacgacttcatgacgccggataaggccctcaccgtagcggatataggccattttgaaagcgaatattgcgcaattcagattttatttgatattttgtcgaaaaatttgattacctttgcggttcgcaagagtgaaagctctcgcaatccggtgaactatttggtttaagtctaaactatacaagtacattatatggcaacacagaagaaaactgccgacgttgactattcgatgcaggagaagatcatcgcactctatgaattgcagaagatcgacagcaggatcgacgaaatcaacaaggtgaaaggtgaactgcctctcgaggttcaggatctcgaagacgagatgaccggcctgaaaacccggatcgacaacatcaatgccgaaatcgaggagctgaacacgctcaccaagcagcgcaagcgcgaggtcgaccaggccaagattctcatcggcaattacaaggagcagcagaacaacgtgcgcaacaaccgcgagttcgatgccattaccaaggagatcgagtaccaggaactggagatcgaattggccgagaagcgcctcaaggagtacgccgccggtgtgaaagccaagaaactccagctggaggaggccgaagccgtagcggaaggccgtgccgccgacctggctgccaagaagaacgaactggaagggatcgaagccgaaaccgcaccccaggtcgcagagtacgaagtacaggccgaccgggtcaaggccaagatcgacgagcgcctgttgtcggcctatggccgcatccgcagcaatgtgcgcaacgggctggcggtcgtgaccgtgaagcgcgatgcctgcggcggttgcttcaaccggattcccccgcagcgccaggtggagattcgccagggcaagaaacttatcgtctgcgaatattgcggacgtatccttgtggccgatcccgaagaggggctggaatagccctgtggaaaaattaagaaagcaggccggagtgtacactccggcctgctttgcattggggggcaagtcccgggttctatttgggcgttcatgcccctgtgctcctggattatccgcctttgccgtatgcgtggcgcggcggattttcgggattgttgtcttgtcgtgccgggagccgggagcccaggctgcctaccagacgacctggtcggggaggatttcgccgtcggcggcgtcgcccgcgtcgaaggaggcggctttgtactggatgcagatcatcgtcatcgggctgtcgcccgtgttgcgcagcgaacgcctgccggcaggcgaaacccgtatgacgctcccctcgcctacggggaagacctgcccgtcgacctggaactccccgtctccgccgaggatgatgtaaagttcttcgtgggtcttgtgggtgtggaggaacccgacgctgccgcccggtgcgaactgctggaacgacatctcggccccggtggcctgcagatcgccgcctacgaatacttttcccgggatctccacgcccggtgccagcggcagcgcgtactggttcaactcttcggtttttccgaccgtcacggctgcgaaattcgcgcctgaggctactttttctacctttttcatggttaagggttattaaagcgtttatgaattgtgttctctgtattgccgttgcgaaggtaaggagaatgcagcgttcgtgcaagacggtacgctggcgtatgttgctaacatttaggtaactgatgttgtatgtcaggcagaaatccgggtgaaaaaaaagattttttttgcaggcagcatgtgcgcggcgacacgcgcggccgtgatacggggcgttttgccctcccgcgcaaagcctgccgggcagggactcggcgtgtgctggccggctgcgggaatagcggccggacaggcggttttactgggctgggtgggagcttgttgggcgccgggaggttggggaacggtgtctgccgggcggtttgcggccgggacaggtaaaagtgccggggtttcgggatttttaaatttttttgtaaactggagaatgttaatttattaacaccaaaaatccttcctattttataaataatccttaactttgcaaagttgtaatttgcctactaaaattactgatagatgaaaatagcccttgcccagttgaactatacgatcggggatatcgacggcaatacctcgaaaatcatcgattcgatcaacaaagcgaaagcgcagcgtgccgacctggtcatctttgccgaacaggccgtgagcggaaccccggctttcgatctgttgcgtaaaacgaccttcctcgaactgtgcgaggatgcgctggtcgaaatcgcgtcgtgctgcgacggtatcgcggccatcgtgggactcccgatcctgacgcgcgaaggcaccatcagcgccgcggcgctgatccaggatcgcaaagtgctgcgctacgtgggtaagaaatatatcaccgcacgccgcgaaatgggcttcctcgtcccttcgaagggattcgagtacgcgacgatcaagggccacaagtgcgccatcgtcgtgggcgacgacctgagccgcgagcatgacttcgacaagtcggtcgagaccgtcatctcgataaacgcccgcaaatacggccgggggacgatgacctaccgttacgagatgatgcgccacctgtcgttcgtcgaaggcaagaacctcgtgctggtgaaccaggtaggcggttcgacggacatcgtttacgacggtacgtcgggggcgttcaacaaccgcggggagctggtgctgatgatgaagcacttcgaggaggatttccagattttcgacaccaaggcggccggcgagccggtctcgatcccctcgacctacaacgaccgtacgcggatggtctaccaggcggcccggtgcggcctgcgcgactttttcgtgaagaacggctataaaaaggcctgcataggcctttcgggcggcatcgactcggccgtggtggcctgcctggccgccgatgcgctgggacgccaaaatatccgggctttgctcctgccctcgcagttctcttccgaccattcggtcgaagatgcgaagaagctggccgagaacctcggcatcgagtacaacgtaattcctatcacggaaatatacaccagcgtggtgaacaccctcaagccggtcatcggcggccgggagttcgacgccacggaagagaatatccagacccgtatccgcacggtgctgttgatggccgtgcagaacaaagcggattacatcctgctcaactcgtcgaacaagagcgaaaatgcgctggggctctgtacgctctacggcgatacggcgggcgctttcagccctacgggcgacctctacaagagcgagatgtacgatctggcgcgctatatcaaccgtacgcagggcgacccgatcccgggcaatatcctcgacaaggaaccctcgtcggagttgcacccggggcagaaggacagcgacatcctgccgccgtacgaggtggtggacgcgatcctttaccgcatgatcgaggaggggcagcaccgtgaggagatcgtcaatgcgggattcgattccgaggtcgtggagaagatccacgccatgatcatgcgcaacgagaagaagcgctaccagtttccgcccgtactgcgcctgtcgatgtgctcgttcgggcacgagcgccttatgccgcttaccaacaaatacggcgattgaggggcggtggcagcacggattgaacatagcggcgtggtggaacgcacggaacgcgacacggtctatgtgaggatcacctcccacagtgcctgcggtacctgcaaggcccgcgaagcgtgcggcctggccgaggcgcaggacaagatcgtggccgtgaagagtcccgacgcggcgcagttcgccgtcggggaacaggttatggtcggcgtccgtcgtagtgcgggcgctgtcgctgttatactggcctatgtcggggcgctggccgtgctgctggccgtgctggtcgccgccattgcggtgctcggctggagcgaaggccgcggcgcactggccgcactgggagccgtgggtgtctattactgcgtattatggctcttcaggcataaaatcgaacacacaattcatttctcaataaccaaacactactgatggaagtattactttacacaatcctgacgctttgtgcgctgggagtgctttccgcggtgatcctttacttcgtggcccaaaaattcagggtcgaggaagatccccggatcgacgaggtggagaagatgctgccgggcgccaactgcggcggctgcggcttcgccgggtgccgcggcatggccgacgcgctcgtgaaacaggacgacatctcggcgctcttctgccccgtgggcggcggcgactgcatgaaggccgttgcggcctacctcggcaagtcggcaccggaaaaggagccgcaggtggccaccgtgcgctgcggcggcacctgtgacaaacgcccccgtaccaacgagtacaacggtgccaagtcgtgcgccgtggcgtcgtcgctctatgtgggcgagacgggttgcgcattcggctgcctcgggttcggggactgcgtcgtctcgtgtgcgttcgatgcgatccgcatgaatcccgcgacggggcttcccgaagtcgaccccgacaaatgtacggcctgcggggcctgcgtgaaggcgtgtcccaaaatgattatcgaattgcgcaagaagtggccgaagaaccgggcggtgtacgtgtcgtgcgtgtcgaaggacaagggcgccgtggtgatgaaggcctgcaaggcgggttgcatcggatgcggcaaatgccagaaggtctgcgcgttcggtgccatcaccattgaaaacaacctcgcctatatcgacccgcagaagtgcaagctctgccgtaagtgcgtgaacgagtgcccgacgggcgccatcgtgctggcgggtatggatccgctgcccaagacaccgaaggcaccggctgcccctaaagccgcacctgctgctgctaaggaggcttctgccggagtcccgacagcgcccgatgccggggctaccccggctgtgccggctgccgaaactccgaaagccgaataagtaccgtcaaatcagagaaacacaagatatgaagacatttccaataggcggagtccatccgtcggaaaataaactgagcggcgccaaaccgatcgaggtgcttccgctgcccgacgtggtgacgatcccgctcgcacagcacatcggcgcccccgccgtggccaaggtcgccaagggcgacaaggtcgtgacggggcagctcatcgccgaagcgggcagttttatgtcggccaatatccacgccccggtttcggggacggtaacggccgtggacatggtgcccaacgggcaggggctgcgccaggtgatgattacgatcaaacgcgagggcgacgactgggccgaggggatcgaccgctcggagacgatcgtcagggagtgcacgctctccgcacaggagatcgtcgcccggatcaaggacgccggcatcgtcggcatgggcggcgcgacgttccccacgcacgtgaaactctcgatccctcccgggaaaaaggccgaggcgctgattatcaacggtgtagagtgcgaaccttaccttacgtccgaccatcgtacgatgctggagcacggcgaagagctgctcgtgggcgtgacgatactgatgaaggccatcgccgtggagaaagcctatatcgggatcgagaacaacaaacccgacgccattgcgcacctgcgccgtctggcccaagggtataagggcatcgaggtggtgcccctcaaggtgaaatacccgcagggcggtgagaaacagctgatcgcggccattacggggcgcgaggtgccgcccccgcccgcactcccgatcgacgtgggtgccgtggtgtgcaatgcctcgacgacctatgcggtctaccaggccgtgcagaagcacaagccgttgatcgagcgcgtggtgacgatcacgggcaaaggcgtccgggagcccaagaacctgctgactcgcatgggtacgcccgtcgaggcgctgatcgaggcggccggagggcttcccgccgatgcgggcaaggtcatcaacggcggcccgatgatggggcgcgcgatggtcaacctcgcttcgcccgtgacgaaggggtgctcgggcatcaccgtcatgagcggccgcgacgcccagcgccgcgaggcctcgcagtgcatcaagtgcgccaagtgcgtggctgcctgcccgatggggctcgaaccctattatctctcgaagatgactcagaagaaaggctgggaggaagtcgaggcgcagatgatcacttcgtgcatcgagtgcggctgctgccaagcctcgtgccccgcttacctgccgctgctggactgggtgcgcctggggaaacagactgtcatgggcattatccgcgcacgtgccgcggcaccgaaaaagtaaatggaaaaacagaaagatattatggcaaacaaacttgttgttgctcccgcaccgcacgtgcagacttcgcagtcgacggccaggatcatgcgcgacgtcgtgatcgcgctgatgcccgcgctggtcgtctcggcggtggtgttcggggtggacgtgctgcgtgtcacggcgctcagcgtggcgtgttgcgtgttgttcgagtacctcatccagcggttcctcgtcggcggctcgctgacaatcgggaactggtcggccgtggtgacgggcgtgctgctggctttcaacctgcccgcctcgattccctggtggatcgtcgtgatcggcgcattcgtcgccatcgccattgccaagatgaccttcggcgggctgggcaaaaatccgttcaaccccgcgctggtggggcgtgtgttcctgctgatcgcctacccggtgcagatgacttcgttcccgatgccggcgaacggagccttcgacgcactttcgggcgctacgccgctggcggccgtgaaacacggcgccgcccccgacgtgctcggtgtgcaggaactgctgctgggcaatatgcccggctcgctgggcgaggtggcggcattggccctgatctgcggcttcgtatacctgctctggcgccgcgtcatcacgtggcagattcccgtgtcggtgctcggtacgatggccgtattcgcgtttgtcgtggccctcgcttcgggcagtaccggggcggtgctgtggcagctcccgctgttccatgtactggccggcggagccctgctgggcgcgatattcatggcgacggattattcgacctcgccgatgaccgtcagagggggtgtgatcttcggcatcggtatcggcgccatcacgatgtgcatccgcctgtggggcgcctatcccgagggtatgtcgttcgcgatactgatcatgaacgcctgtgtgcccctgatcaacaaatatgtcaaacccaagcgcttcggcgttaaataggaggtgacgcagtatgaaaagtacacttgtgaatatgacggccgtactgttcggcatcacgctcgtggcttcggccggtgtgggcgccgtgaacatgattacggccgaaccgatcgcccaggccgagcaggcggcgaaggtcgaggcgctgaaggtcgtgcttccgccgttcgaccagaccgcacccgaagcgttgacgatcgacgatatgccgatcacggtctacaccgcaaccaagggaggacaggtcgcgggttacgccgtggagtcgatgaccaagaatggtttcggcggcgcgatcagcatgatggtgggcttcacgcccgacggtgaagtggtcaacgtcaacgtgctcaggcaggctgagaccccggggctcgggacgaagatggccgacaaggaaaatgtgctgctggggagcatccagggcaagaaactcgaaacgatgaagctcgtggacggcaagctggccgtgaagaaggacggcggcgacgtcgacgcgctgacggccgcgaccatatcctcgcgcgcctatgtcgatgcgatcaaccgcgcctggatggcttacaagagcgtagcgacgggtacggcgccgacagacgtatcgtcgggagcgacttctgcggccggagattcggcagaggaacaaaccaacgggccggcggctcaggaaggagggcaaaatgaataaactgaacatcattctgagcggcatcgtcaggaacaacccgacgttcgtgctggtgctgggcatgtgtcccacgctgggtacgacgacctcggccggaaacggcatgggcatggggctggcgacgatggccgtgctgatcatgtcgaacctggtgatctcgctcatcaagaacatcattccggacaaggtgcgcatcccggcgttcatcgtcgtgatcgcctcgttcgtgaccgtggtcgaaatgctgatgaaagcctacacgccgcccctgtacgaggcactgggcgtcttcatcccgctgatcgtggtgaactgcattattctggggcgtgccgaggctttcgcctcgaagaatacgccgctggattcggtgctcgacggtgtcgggatcggtttgggctttacgctttccctgacggccgtaggtgccgtgcgcgagatcctgggcagcggcgcgatcttcggcatcagcctcggaacggccgattacatgccgctgatcttcgtcctcgcaccgggggcattcctggtgctggggtacctcatggtattgtttaataaattagccaagaaatagttatggagctttcatatttcgcaatcatcatcggcgccatcttcgtcaacaacgtcgtactggcgcagttcctcggcatctgcccgttcctgggcgtgtcgtcgaaggtcgagacctcgatgggtatgggcgctgccgtaacgttcgtcatggcaatcgccgccgtggtggcctggctgatccaggcttatgtgctcgtgccgctggacatcgtctacatgcagacgatcgttttcattctcgtgatcgccgcgttggtgcagatggtcgagatcatgctcaagaaactttcgccttcgttatatcaggcactgggcatcttcctgcccctgatcacgaccaactgcgccgtgctgggcgtggcgatcctgatgatccagaaagagttcaaccttttgcagagcgtcacctactcggtggctacggcgctgggattcgccctggcgctggtgcttttcgctggtatccgcgagaggctcgaattcgaggacgtgcccaaggctttcaggggcgtgcctatcgcgctgatcacggccggtatcctcgccatggccttcatgggattctcggggctggtataacgacgtcccgcaatgcgaaacagccaccttcggaaatgagggtggctgtttgtcctttgcagtaattgagatgttccgtgaatttctcgatccggcctgctgccggcccggaaacgggcaacagccttggggggattcgcattatttcggattatttttgtcggaatcgttcgtttcttgcaggcaaatagttatttttgcacaaataaccgtaactgaaatggaggatatcatcaaacttcacgacaaaaagttcaggatcatgatccccgccgccaagatcgacgaggccgtggccgccgtagcctgccgcatcaacgaggactaccgtgacaagccgacgccgttgttcgtgggcgtactgaacggctcgttcatgttcatgagcgacctgatcaagaaaatcgagttcaacaacgagctgtcgttcgtgaagctggcttcgtacgaagggacttgctcgacggggtgcgtgaagaacttgatcgggctgaacaacagcatcgaaggccgccatgtgatcatcgtcgaggacatcgtcgacacgggcgagagcatcgagcacatgatcggcgagctgaagtcgcataaccctgcgagcatcgaagtctgcacgctttttttcaaaccgggttcctaccgcaagcaactgccgatcaagtaccgcgccatggagatcggcaacgagttcatcgtgggctacggcctggactacgaccagttgggacgcagcctgaaggatatttacgtggttaccgaatagatggctctgaagaccgatatcgaacagctcgacggcgggcgcaagctgcccctggtcgaagatttctacacgatccagggcgagggcttccatgccgggaaacccgcctatttcatccgcctgggcggatgcgacgtgggatgccgctggtgcgacgccaaatacacgtggaaccccaggctctatcccccgaccgacgtacggacggtgatcgaccgtgctacggcgtgtcccgcgcaggcgatcgtcatcacgggcggcgaaccgctgctttatccgctgggggtgctgaccgaaagactgcacgctaaggggctggagatattcctcgaaacgtcggggacgcaccctttttcggggtgtttcgactgggtgtgcctgtcgcccaagcggcagcaaccgccgctggacgaagcgttcgggaaggcgcacgaactgaaggtgatcgtcggggacgaggccgatttcgaatgggccgagcgcaatgccgcacgggtgggagccgggtgcatcctctacctgcaacccgagtggagcgttgcggaacgcatgatgcccgcgatcgtcgagtatgcgaaggcgcatccgaaatggaatatctcgatccagactcataaatacatgcacataccctaatgggcttcgaagtaggcaaaaagttctggatcgccgccacggcggtcatcgtcgtcgtcacgttgttcgtggtggggcggaaccttttgcatgcggtgaagatcaagcggcagatcaacgccttgaaccgggagcgggagttttaccgggccaggatcgaacaggacagcacgctgctggagcgcctgcgctacgacgactatctggaggagtatgcccgcgaaaactatcacatgcagcgcagcgacgagcatgtgtacatcatcaaggagtgattttacgatccgtatgacttgacggcgacccggcgggctgccgtttttttgtgttacagccgggcctgccgggatgcggccgttttccgcctgctcggtaaatccggggtggtggccgttgccaacacccggtcagtaatgcgtgaacccgtgccagtccagggcccggggccggccgttttcgagccactccaatttgtcgctgtccgtgatgtggccgacggggtggagcggcgtgccgaagcgtgcgcggaaatcggcggcgagcctgtcggcggccgccgtgtcggccgtgagcaggagcttataatcctcgcccccgcaggcggctgtttcgacgtctgccccttgggcgagggggatacggccgatgtcgatcgcggcgcctacccccgagcgctccatgatgtggcggatgtccgaggccagcccgtccgagaggtccatcatggcgtgtacttcggagcgtgcgccgagccagatgccttcggccacttggggctgcgggttacggtgggctgcggcggcgggggtgtcgtagcgtccggcgaggatgtcatgcagtccggcgcccgaaattccgagttctccggcgacgagtatcgcgtcgccggggcgtgccccgctgcggcgcttgatgtgtgcgtcggcgatgcggccgatggccgtgacattgatcgtgatgcctgccgccgagcgggtcgtgtcgcccccggcgagcgtgacgccgaacgcttcggagagttcccggtagccgagcatgaactcttcggcccatataccggccgcgtcggccgggagcgacagcgacagcagggtggccaccgggcgggcgcccatcgaagcgacgtcgctcaggtttacggcaagggatttgcgccccagttcgcggggcgaagttgcggaatgcaggaaatggacgccttcggcgagcatgtcggtcgtgaagaccagcgattcgccctccccgacggggagcacggcgcaatcgtcgccgatcccttcgaacccgttgtcgggcagggcggcgaagagttcttttatgtggtctatgaatccgaattcggtcatggttctcgggtgtgtccggccgcggcgccccgccggccggtgcgggttttcgggtttttcacgtgcggctgccgccccgggggcggagtccccgcctggggacgggaacgaagcctgtgcgaaccgcggcaggggcgtgggcggcgtttgaaatcattatttaacgggcgatgtcgaacaaaggtattaaaaattctttaaaatcactatctttgcctgcggattgcgcccgggtatgccgtgcgtgtcaaacagtctcgaagatgaagatattgattctcaacggcccgaacctcaatttgcaggggcggcgcgataccggggtctacggcacccggactttcgaaacctttttcggggagctcgaagcactctatccggccgtcgggttcggttatttccagtccaacctcgaaggcgagctgatcgacgccgtacagcaggccgacggcacctacgacggtgtggtgctcaatgccggcggatatacccatacgtcggtggcgctgcgcgatgcggtgtcggcggtgtcggtgccggtcgtcgaggtgcacatctcgtcgatcctcgcgcgcgaggagttccgccacgtctcgctcctggctcccgtggccgtgggctcgatcatgggtttcgggttggattcctaccggctgggcgtcgaggccctgttgctccgtggcagggagtaagctccgggttcccggagcggcccattccccggcccggtacgggagggcgtgcggaagttccccggggctgtccgcgcagagcgtgtgcaggagcggcaccgggcgtaacgtaaaatgtcgaaatactaatattttagcatcatacttgtatgtatagaatgaaaaaaaccaagatcgtcgcaacaatgtcggatttccgttgcaccgaagagtttgtgaaaaaccttttcgatgccggtatggacgtggtttgtgtcaattcggcgcatgtctcggaagagggcgctacgcatattgtcgagaccgtacaccgcgttaacccggctatcccgatcatgatagatacgaagggccccgaaatccgtgtcacgacgatcgccgacgagtacggcaacagcatcaatttccggccgggcgaccgtgtcgccgtgcgcggctcggacggcagcgacaagacgacccgcaaggtggtttacatgaacgtccccaacatcgtggatgacatacccgtcggggcgcggatgctcatcgccgacggcgaactggagatccgtgtcgtggaaaagaccgccgaggagctgatctgcgaattcgtcgtgggcggcgccatgcgttcgcgcaagagcgtcaacgtgccgtcggtgtcgatcaacctgccttcggtgacggagaaagaccgccggtttatcgagtgggccgtgaagaacgacgtggatttcatcgcacactcgttcgtgcgcagcgccagggacatcaaagccgtgcaggacatcctcgatgcccacggaagcaagatcaagatcatctcgaagatcgagaaccgcgaggggctcgacaacatcgacgagatcatcgaggcgtcgtacggcatcatggtggcgcgcggcgacctgggcgtggagcttcccgccgaggcgattcccaatacccagcggcgtatcgtcgagaagtgcatttgcgccaagcgtccggtgattatcgccactcagatgctctattcgatggtcaagagcccgcgtccgacgcgcgccgaggtgagcgacgtggcgagtgccatttacgagcgcgtggacgccgtgatgctgagcgacgagacggcgatgggcgactttcccgtggaatcggtggaaacgatggcccgcatcgcccgcgagatcgagcgtgacgagacgcatttcaaaccgatgatcgacatggacatggtctcggtgaaccacgagatcacggcgcagctggcacgttcggccgtgcgtgcctcgaccaacctgccgataaaatatgtggtgctcgacaccaagaccggccgtacgggccgttacctggcggcattccgcgggcagaaaaccgtgatggccgtatgctaccagctgcatgcgcagcgtatcctggccctgtcgtacggcgtggtgccgatcctgcgcaaccaggagctgaaggacaggtaccacttcctgatcgatgcgctggaggtcatcgaacagcaccagaagctcgacgggcaagacctgctggcaatcgtgggcggcagtttcggccccgacggcggtgcgtcgtacgtcgagatcgccaatatcctcaatatccgcaagcgtaacgaagagatcgttgccgcgcaaaaatcttaggcggtggacgggcagctcagggataaggtagccagcggcgtggcgtggagcatggccgagaaagtcggtacgatgcttctccagctggccgtgagccttacgatcctgcggctgctgaaccccgccatcatgggtgtgattgcgatcccgacggccttccttgccgtggcgatcgtgattgccgacagcggcttttcgcaggcgctgattcgcaaggggacacctacggccgacgattacaaatcggtcttcgccttcaacgtcggggttgcgctcgtgctttacggggtgctggtagcgctggcggggagcatcgcgcggttctacgacatgccggaaatcacgcggatagcaccggtattcttcctccaactgccgctgagcgccgcatgtgcgatccagaatacgatttttgtccggacattccgcttcgcactgctctcgaaggtcaccttcgcctcgtggttcatcgccgggatggtggccatcggcctcgcattggccgggttcggaatctggtgcatcgtggtgcagcgcgtattgcaggcctcggtgcgggccttgctgttgtggtggctgagcgactggcgtccctgcgggaagtgcagccggcggtcgctgcgcgaaatggcgccgtacagtttcagcctgctggctaccgattttatctcgaccctctataacaaggtgccccagatatttctcgggaaactctatccgcaggagacactcggctcgtacgaacaggccgtcaagctgaaagaccagccggcgacttcggccatgcaggccgtgcagagcgtgacattcccggcgctggccaagatcaaggacgacgcgccgaaactggccgaaagttaccggcagatcgtcatggtcgtggcctatgccatgttccccgtgatgctcggcctgtcggccatcgccgaggacatgttcgccgtcttcctgggcggggagtggatggcgacggtgccttatttcgaagcggtatgtctggccgggcttttttacccgctgggattggtggcctacaatgtgttgaaagtcaagagcggcggtgcgctgatcgtaaaactggaggtcgccaagaaagtgatgatgtcggtggtgttcgccgtgacgattccggtcagcgtccaggccgtcatttgggggctggtggtgatcgccttctgcgagatggcgatcaacttcttcgccacgacccgtttcacgtcattcggcgcaggacgcttcgtgcgcacggtgctgccgatgctgctcgtggccggggcgatgtacgctcttgtgcgggttacggcgctggcggtgccgggcaatgcgttgttgcggttgctggccgaagtcgccgcgggcgtggtcagctacgtcctgctttctgcactgttccggctcgaagccttccgcgaggtggtcgcactggccaggcgccagttcatccgcaaataggccggctgcccgggctggccgtcgctgccggatatacacaggaaaaacgtccgccggatattgatccggcggacgtttctgttgcggcgcggttccgttttgcagcccggtttctgtttggcgcgcggttcgccgtttcgcacggcgtgtgcggtgtccgggacttgctgccttggcggtcgctgccgctcgggcggctccgtcgcgtgcgcagctcctttgcccgtcaggcgtagaccttcgggacgatggtgccgcggaggatgaccagtgcgttggcgaccagcgattcgagttcgttctcgccggggtagaccgaaacgggggcgatgaacgagcagtgctgttcgatgtaccgcacgacgaactcgttgtgggcgatgcccccggtgaggatgacggcgtcgacccgcccgcacatggcggcggccatggcgccgatctgcttcgagatgccgtagcacatggcctcggccacgagccgggctttttcgtcgccctgcgcgatacgctccgagacctgcatcatggaattggtgcccaggtgcgcaacgagcccgccttggccggccagcattttctggacttcgcggcgcgtgtaacgccccgagaagcagaggtcggcgaattcgcccgcaggcaggctgcccgcccgctcgggggcgaagggaccgtcgccgtcgagcgcgttgttgacgtcgacgacacgtccctgtttgtgcgcggcgacggagatgcccccgcccaggtgcgcgaccaccaggttcgccttttcgtagacgatgccgatgcggtcgcagtgcaggcgtgccgtggctttctggttgagtgcgtggaagatcgacttgcgcgggcagtcgggatggccgctcaggcgtgccacatcctccatctcgtcgacgaccaccgggtcggcgatgtaggctttgacacccgccatggcggcgatctcggcggctagtaacccgccgaggttcgaggcgtgttccatcgtggcgttcgttaggtcgcgccgcatggcttcgttgacttcgtatacgccggccgggatggggcgtacgagcccgccgcgtccgatgacggccgacagctgcatgatgtcgaacccgtgttcggacagcgccgtgaggatcatttcccggcgccagcccaactggtcgatgatgttggtgtaacgtgcgatctgttcggccgtgtggcgcagggtcagatccagcgaaggacgctcctcgtcatagagggcgaccttggtggacgtagagccgggatttatcgctaagattttgaagcccataaattcggttccggttagtagttggtaggttggtgtaggtgtgtgcctattgttttacggccaggcaagccagtgcgatcgagtagagtttggtcttgctcgtgtcgccgcgcgaggtcagtacgcagggcaccttcgtgcctgcgaccatggcggccagttcgcctccgcagaggtgcgtcaccgacttgaagaagacgttggctgactccaggttggggaaaagcaggcagtcggggtcgcccgctacggacgaacctttgactttcttgtgctcggcgacatccttgtagagtgctacgtcgagcgacagggggccgtcgatgatgacgttgcccagctgtccgcggtcgcccattttggccagcagggcgccttcggtcgatgaaatgacgctggggagcagctgctcggagggggcgatgcaggcgatcttgggggtttcgatgcccagcaggttggcgacttttgcaaggtagccgatttgcttgatcttctgtttgaagtcgggcagcgggatgaccgcgacgtcggagatgaccagcagtttgtggtagcagggcatctcgacgatcgacacgtggctcagcacgcccttcggggggaacaacccggcttccttgttgaggatgccgcgcatgtacttgtcggtcgagacaagtcccttcatcagcacgtcggcgttgcccgccacgacggcggccacggcctgctgcacgcatttcacgtcgctggcctcgtcgacgatgttgaatgccttgatgtcgatgtcgttttcggcgcatacctgctcgatgactttcttctcaccgaacagcgtgggctccacgataccttccttgtaggcttcgtagacggcttccagcgtatgcgaatcctggccgtaggctacggccagccgttttttacccctttttctcgcctcgtcgacgatttctgtaagatgttggatcattgtggtgttgtgcttttatttattttaccagattgtacgtgtcggtggcgatgaccagttcctcgtcggtggcgatgacggcgaccttgacccgcgaggagggtttcgaaaggattttgtccatgccgcgggcgcccttgttggctgcgtggtcgaactcgacgcccatgaattcgagccccgtgcagaccgtctcgcgcatctcgcacgaattctcgcccacgccgcccgtgaagacgatcaggtcgacgccgcccatttcggcggcatactccccgacgaatttgcggatgcgcccgtagtgcatgtcgcgggcgaggatggcgcgggggttcccttcgtcgtaggcgcggtcgatgtcgcgcatgtcgctcgaaaggtcggtgagccccaaaacgcccgatttcttgttcatcatctcgttcacctcggcgtaggacatgccctccttttcgccgatgaaggtgatggcgctggggtcgacgttgccgcagcgggtacccatcaccagcccgtccacgggtgagaagcccatcgacgtgtcatgggatttgccgttgagcacggccgtgaccgatgcgccgttgccgatgtggcaggtgatgatcttcgaattctcgaagtcgaggcccgcgagccgggcaccggtctgtgccacgtatttgtggctggtgccgtggaagccgtacttgcgcacgcggtacttgtcataataggcgtggggcaaagcgtacatgtagtttacggccgggatggtctggtggaacgaggtgtcgaagacggtgacctgcgggacgcccggcaggactttctcgatcgacagcacgccttcgaggttggccgggttgtgcagcggtgcgatttcgaacagcgaacggatcttggatttcacctcctcggtcacgatacagctctcggggaagaactctccgccgtgcgccacgcggtggccgacggccttcacctcgtcgagcgagccgatgacgccgtgtgcggggtcggtcagcgcgtcgagcaccagtttgatgccggtggtgtggtcggggatggggcggtgcagctcgaacggttctttgccgacgggcttatgggtgaggtcgccttccggcaggccgatgcgttccacgattccttttgcgagcagtttgctcgatgcggcttccatgtcgatcacctgatacttgatcgacgagctgccgcagttcaataccaaaattaccatttctctttatagttaatttctaaatgtcgttcctatccacatgccggtggctgcaaaaacaatgcatactgccacgctcagccccacgtaggccgccgccgccgtgtaacattccgcacgcagcaggcgcaccgcgtcggccgaaaaggtcgaaaaagtggtgaacccgccgcagaaacccacgatgagcagccatccgagtgtctcggagctggtagcttcgagtagaatgccgatcagcagcgaacccgcggcattgaccgtgaacgtacccgctgggaatcccagcagcgtctgccccgccatgatcccgccggaaagcaggtaacggacgatgctgccggcagcaccgccgcatcctacggccagaagttcacgaatcataagttaaatatacgccaaattttaaggatatgcaaatttacagaaaaaatgcttacggattgttatttttcctgccgttttttcgaggttttttgtcgtatcggggtttaaggttggcggatttgtccgtcgcccgagacgatatacttgtaggtcgtgagctcgggcagtcccatcgggccgcgggcgtggagtttctgcgtcgagatacccacttcggcgccgaagccgaactgcccgccgtcggtgaaggcggtcgagacgttgacgtagacgcaggcggcgtcgacgctgcgcgtgaactgcgtggcggcctgcttgttttcggtgacgatggcctcgctgtggcgcgacgagtagcgggcgatatgcgccagtgccccgtcgagcgacgcgacggtcttgacggccagtttgtagtcgaggaactcggtgccaaagtgctcttcggcggcatgttccagcaacccggcggggtagtgcccgtcgagggcggcgaaagcctcttcgtcggcgtagaccgtcacatgcgccccggccagcggtgcgcacagctccggaaggtcggtgaggcggccgcggtggatgaccaggcagtcgagggcgttgcagacgctcacgcggcgcgtcttggcgttgcagaccacggcacgtcccttttcgaggtcgccgtcgatgtcgaaataggtgtggacgatgccggcgcccgtttcgatgaccgggatgcgggcgttctcgcggacgaagcggatcagccccgccccgccgcgcgggatgactacgtcgacatagcccacggcgctcagcagcgcccccacggcttcgtgccccgcggggagcagcgtgaaggtgttttcgtcgatgccttcggcgccgagcgcttcgtgcagcagcgccgcgatcgcctcgttggagtggcgggcgtcgctgccccctttcaggacgcaggcgttgcccgtcttgacgcagagcgcgaagatgtcggccgtgacattggggcgggcttcgcagaccatgccgaccacgccgaacggtacgcggcgcttgacgatggtcatgccgttggggcgcgtccagcgcgccagttcctcgccctgaggcgagcgcaggtgcgatacggcttccatgtcggaggcgatggagccgattcgctccggggtcagccgcaggcggtcgagcatgggcgacggggcgggcatggcctcgatgtcgcgggcgttggcttcgagcaatgcgggcgtatgcccgcgcaggagccttgcggcgtgttgcaggatgcggccgaggcgttcgggttcgacgtcggccagcgccgtcccggccttccgggcggccttgaacagggattcgtagtccataatcgtttattccaggtagaggtaatcgcagtggacgaggggcttgagtcctttgcgtccgatgttgcggcgggcggtgccgctgtcgcacgagatgcgtcccacggccagttgtgccccgtcgggcgagaggatgcgcaccaggtcgtcgcgctcgaagtcgccctcgacggctgtgacgcccacggcgaggatgctggcggccttgctggcgcggacagctgcggcggcgccctggtcgatgtgcaggatgcccttggcgaagccttcgctgctggcgatccatttcttgacgcccgaggctgccctcggagccggttcgaaccgggtgcagggcacatcctttgcggcaagtacgaggtcggtgaggatgccgtcgcggcggccgttggcgatgatgacctcgatgccttcggccgccgcacgcgacgagacgcggctcttggtggccatgccgccgcggccgcgcgacgagcgtacggggtcgatgtactgcgagaggtcttccgagggtttcacacggcggatgacctgcgatgcggggtcggcgggcgagccgtcgtagatgccgtcgatgttgctcaggataatgagcgcttcggcgttcatcatggccgcgacgagccccgagagctcgtcgttgtcggtgaacatcagttcggtgaccgagatggtgtcgttctcgttgacgatcggcagcacgccgttggcgagcatcgtctccatgcagttgcgctggttgaggtactgccgccgtgtggagaggctctccttggtggtgagcacctgcccgcagacgatgccgtattcgttgaagaggtcgtagtagcggttgagtagcttgacctgccccacggcggagaagagctgccgtgcggagaccgaatcgagcttcccggcgcgttgcccgaggatgctgcgccccgaggccacggctcccgacgaaaccaggatgacctcggtgcccgcgcggtggagccgggccacctggtcgaccagggccgagatgcgggtggtgtcgggacggccgtcgtcgcgcgtcagcacgttgctgcccaccttgatgacgatgcgccggtatttgttctgtgtgtccatatgcgtttcattcgccgggaatggcccggctcagggttcgaatttgtagcccacgcccttgatggtgacgatgcgttcgtcgccgatcttctggcgcagtttgcggatgtgcacgtcgatggtgcggtcgcccacgaccacctcggtgccccagatcttcgtatatatctcttcgcgcgagaaaagcttcccgggcgacgaatagagcaggtcgagcagcgcgaattccttgcgcggaagggctatctcgtggccgtcgcgcgtcacggtgtaatgctcgcggtcgacggcgatgcctgccgcggcaggttccgccggcgcggtttcggcgtcgatccgcttgaggatggcctgcacgcggctgaccagcagcttcatcttgatcggcttggtgaggtagtcgtccgccccgacaccgaagcccgtaagctgctgatcctcctcgcccagcgccgagagaaataccaccatcgtgtcgcgcagctgcggatcctggcggatggcacggcaggtctgcgcaccgtccatgacgggcatcatcatgtccagcaggatcaggtgcggacggcactcggcggcggccttcagcgcctcggcgccgttctgcgccgtgaatacttcgtagccctccttctggaggttgtacctcacgaattcgaggatgtcgatttcatcgtcgacaagcaggatgcggtggctcatggttccggttgacaggttttgtatcgcacgcggcaattgggcgcggttgcgtgccgctcatatctcgggcgaagttagcaaatttccggctaaatcgttcggtagcccgggaaaaatggttatatttgcgagatttatatacttccgtatatatggaaatcaaaaacgtgtactgagatggctactgaaaatccgaatcttcctgctcccgaggagcgagtcagcgatgctgctgaagatgtgcagaccgtaacttccgaagtgacttccgaagtccctgaaaccgaggcctccgcagcagcggaggcggaacccgtcgtggaaacacccgcggcagaagaacccgagacggaaaaatccgttgcgggaacgcccgcggcagaggtgcccgtggctgaagcgcctgcggcggaggagcccgtggcggaacccggggccgcgccgcgtgcgaagcgtgcccgtatcaagcccgttgccgaggcggtggagaccgaatccggcgaggaggccgtgccggccggtgccgaagtggatttcgcggacgaagaggcggcgctcgccgcgcaggatgccgggctggaactggagggcgagacggctgaagaggccgctgccgaccaactggcccaggaagcgccgtccgccgaggacaagtttgccgggaagggcaaggaagagctggtagccctctttatgcgtatgctcgaagagcagcccgtgcagtcgatccgccgggatgtggaggcgctgaagatcgctttctaccgcatccgccgcgccgaggtcgaggccgcacgccgcaagttcgtcgaggaggggggcagcgaagaggatttcgcaccggccgtggacggcgccgaagtacagctcaaggagttgttcaaggagtaccgccatcgccgcgacgagttcatcgcaaacctcgaggccgagaaggagaagaacctccaggtcaagctcgggatcatcgaggagctcaaggaactggtcaattcggacgagacgctcaaccataccttcaataagttccgcgaattgcagcagcgctggaaggagaccggcatcgtgccgcagcagaacgtcaaagacctgtgggagacctacaacctgcatgtcgagaatttctacagcttcatcaaaatcaacaaggagctgcgcgacctcgacctgaagaagaactacgagcagaagatcgccctctgcgagcaggccgaagcgctggtgctggagccttcggttgtggaggcgttccacaagctgcagaagctgcatgacgagtggcgcgagacgggccccgtagccaatgaatataaagaggtgctctgggagcgcttcaaggcggcgtcgagccgtatcaacaaacagcatcaggagcatttcgaatcgctcaagggcgagcaggtcaagaacctcgaactcaagacggagctttgcgccgccaccgaggagctggccgcacagccgctcacgacccgcaaggagtggaaccgtgcgagcgaccgcctgctggagatccagaagacctggaaaaccatcggcttcgcacccaagaaggacaacaaccgtatctacgagcgtttccgcacggcatgcgacaagttcttcgaggccaagcggcagttctatgccggggtgaaaaccgagatggagcacaacctgcagctgaagaccgagatatgcgaggccgccgagtcgctgatgaacagcgaggagtggaagaaggccacggacgagctgatcgccctgcaggcccgctggaaggagatcggtgccgtgtcgcgccgtcattcggatgcgatctggaagcgtttccgtgccgcatgcgacaagttcttcgagcgcaaggcttcgcatttcgccagtgtggacggcgaacacgaggagaacctccggcagaaactcgccctgctcgatgagatggccgcggccgatgtcaaggccggcggatacgacgtgatccgcgagttccagcgccgctggggcgagatcgggttcgtgcccatcaagcagaaggatgccgtacagaagaaatacaaggccgccgtcgatgcgctgttcaacacgctgcgcggttcggagcgcgaccgttcgatgaaccgtttccgcgagaaggtctcgacgctcaaatcggcgggcagcaaccgcctgcgttcggagcgcgagcgcctttacaataaggtgcgccagctcgaacaggagatcggcctgctggagaacaacatcggttttttcgccaagtcgaagaacgccgaggcgctcgtcgccgatgtgaaggccaagatcgaccgcgcccgcgaagagatggccgccgcgatcgagaaggtgaagctcatcgaccgccaggcacaggaggagaaccaggagcacaacgaaaataaatagatatagtcagtaatgaaactttccaaacccaagtacatatttgttacgggcggtgtcgcatcgtcgctcggcaagggtattatttcggcctcgatcgcccgcctgctgcaggcccgaggctattcggtgaccatccagaaactcgacccctacatcaacgtcgaccccggcacgctgaacccctatgaacacggcgaatgctacgtgaccgaggacggcgccgagaccgacctcgacctggggcactacgagcgtttcacgaaccagcccacgtcgaaggccaacaacgtcacgacgggaaagatctacaagagcgtgatcgagaaggagcgcaagggcgagtacctgggcaagaccgtgcaggtcatcccccatatcaccgacgagatcaagcgccgtatccagatgctggcgcagaagaaagtttacgacgtgataatcaccgagatcggcggtacggtgggcgacatcgagtcgctgccgttcatcgaatcggtacgccagctgcgctattcgctgggctacaagagcacggcgctcgtgcacctgacgctgatcccctatatggccgcttcgggcgaactgaagaccaagcccacgcagcattcggtcaaggccctgctcgaaaacgggttgcagcctgacatcctcgtgctgcgcacggagcatccgctgtcgaccaacctgcgccgcaaggtggcgttgttctgcaatgtcgacgccaacgccgtgatggagtcgatcgacgtgccgacgatctacgacgtgccgctgaagatgcacgaacagcacctcgacgaggtggtgctcgacaaactgaacctgccggccgagaaggaacccgacatggcggcgtggacggccttcgtggagaaggtgaagcacccggccaagaagatcgagatcgcgctggtcggcaaatataccgaattgcccgacgcttacaagtcgatctgcgaatcgttcatccacgcaggcgccgtgaacgactgcaaggtcaagttgcgctatgtcaattcggaaaaggttacagccgagaatgtggccgagaagctgggcaggatgtccggtatcctcgtggccccgggcttcggcaaccgcggtatcgaaggtaagatcgtcgctgtgcgctatgcacgtgagaacaagatcccgttcctgggaatctgcctcggtatgcagtgcgccgtgatcgaattcgcacgcaacgtgctgggtctggccgatgcgaattcgagcgaaatggagtctacgccccatccggtgatcgacctgatggaagagcagaagggcgtgacggccaagggcggcacgatgcgtctgggcgcttatccctgtacgctgaagaaaggttcgaaagtcgcggcggcctacggcaagctccatatttcggagcgtcaccgtcaccgttacgaattcaacaatgattacctggctgcgttcgaaggtgccggtatgcaggccgtgggtatcaatcccgacacggggctggtcgaggtcgtcgaggtcgaggggcatccctggttcgtcggtacgcagtaccatcccgagtacaagagtacggtgctgagcccctcgccgctgttcgtggcatttgtgggagcggcactcgaatatgccgggaagaaataatatcaacactcataacagcgaaagaacgaaacaattttaaatggataaaaaaacaattttaggtattgtcgtcgtggcggcgcttttcctggggttcgcctatttcaataccaaacagcaggagaaatatcagcaggaaatggccgcgtatcaggcctaccaggattcggtggcggcagcgacgcgccccgtagtccccgtagccgacagtacggccgtggcagcttcgagtgcggttgcgcccgaggctgaggcgaatgccgccgatgccgtacgccggcagcaggtcgctgcgctgggcgaataccttgccggtgcgcgcgacgcggaggcggaggagtttaccgtcgagaacgatgtgatgatcgtgaccttttcgacccgcggcgggcggatcacgggcgtgacgctcaaggattacaccaagtatgcaccccgcggcaagcgtgaccagctgatcgagctgatggatcccgcgagtgccaggttcgacctttcgttctacgtgaagaacggcttgaataacgtcaaggtcaacacgatggactatgtcttccgggcccagcccgaacaggtcgaaggcgatgcccggagggtggtgatgcgcctgcccgtggctgcggatgcctggctcgaatatgagtaccttatatataataagcaggtgcccgagcgtgattacctcgtggacttcaacgtgcggctggtgaatatggcgccgcagatggccaaccaggcgtcgatcggtatcgactggtcgaacaattcctaccagaacgaaaagggattccagaacgagaacatgtacacgacgatctcgtaccggttcccgggcgagagctcgatcgaggatctggggatgagcgaaaaatccaagtcgaagagcatctccacatcggtcaactgggtggcttttaagcagcagttcttttcgtcggcgttcatcgccccgcaaaatgtcaccaacgccaacctggcgttcgatacggcggctcccggttcggaattactgaagagtttttcggcgcagatgaccgtgccctatacggtgcagaccgaagggtatgacttcgcattctatttcggcccgaacaaatacgccatcctcaagaaggtcgccgctgcggacggcgaggaactgcacatggagcgcctgatcccgctgggatggggtatcttcggctgggtgaaccgctggtgcgtcatcccggtcttcgacttcctacgcaattatatcgccagcttcggcatcatcatcctgatcctggtgatcctggtgaaactcgtcatctctccgcttacgtacaagagttacgtctcgatggcgaagatgcgcctgataaaaccgcaggtggacgagctcaacaagaaataccccaagaaggaggacgccatgaaaaaacagcaggcgacgatggagctctacaagaaagcgggcatcaaccccatgggcggatgtatccccatgctgatccagatgccgatcctgatcgccatgttccgcttcttcccggcttcgatcgagctgcgcgaacagccgttcctctgggccgacgacctttcgtcgtacgacagcatcgtgaacctgccgttctcgatcccgttctacggcgaccatgtgagccttttcgccttgctgatggccgtgtcgctgttcgggtattcgtatttcaactaccagcagacggcttcgtcccagccccagatggccggtatgaagtttatgatggtctacatgatgccgatcatgatgctgttgtggttcaacagctattcgagcggcctttgctactactacctgctgtcgaacctctttaccatcggccagacgttgctgatccgccgcatggtcgacgacgataagatccatgccgtcatgcaggccaatgccgcaaaacggagcaagggtaagaagtcgaagttccagcagcgctacgaggagctcctccgccagcaagaggcgcagcagcgtaccaaacgcaagtaaacggttcgcaccggcgcagggccggcggcggggattgccggatacggtgcaggccaatgcgtgaagcccggtggcccgcgcggttccgcgaagcccgacgatacgcgatatgaataggccggaggcggttcctgcgatgcgggtttccggctccggcctcgtttttgctccgtcaggtttgcgattgtatatcccgactacgcggcggcggccttttcaggtgttgccggacggcgaggcagaagccccctcggggaagcgctccgggaaggatcgggccgcgggcgcagccggggcgctgcacaacagttgccggggcgcgcagccggggatgaaaaaatccgggcagcaaggccgaagttgcctcggggcgggacggagtttcgggcgcggcccgggagggggcacgacagctgcctgggtacgaagccgggtgtgaatccggggcgcaggatttggagcacggaaatccaggggcgcagagtggggaacgaaaatccgggacgtgaggccgggcgtatcaagtatatgattgccaaatagtattgcagataacgatgaaacgaactttttttgtattgctcttgttggcggccggaaccgcactccgggcgcagacattgggcggggagtaccgcctgtcgcgggttttcccggtcgaaggacggcaggggatcgccgccgactcgaactactattatgtttcgggcagtacggtgctctacaagtacgacaagcagggacggctggtcgcccgtaacgggcagccgttcgaagggttgccgctcgccgcgaaccatatcggcgatatcgacgtatggaacggtgagatttatgccggcatcgagactttcgacgacggcaagggtgagaatatccaggtcgccgtgtacgatgccggcgacctgacgtggaagcggtcgatcgactgggaaccggcctcggggcaggtcgaggtgtgcgggctggccgtagaccgcgaccggaatatggtctggatggccgactgggtcgacgggcgctacctgtacggttatgacctggcgacgggcaagtatgtgcgcaaagtccacctgcgtccggtgccgcagtggcagcaagggatatatatggccggcgggcagatgctcatttcggccgacgacggcgatgccgacctggacgagccggacaacctctatattgccgacctgcgcgacgggaaaagctatgccacggtgttgccgttccgcatgatgtccgatttccggcgcgcgggcgagatcgaggggctgaccgtcgatcctgtgacggacgagctgctggtactttcgaaccggggttcgcgcatcgtgctgggaatggtcaggggcttctatccggggtacgacagcgaactgcacgaagtgtatgtctatgaaaaggtaaaataggaaaagtcccggaagggactttttttgttgaggggtatgtgccggatgccgatctcgttgccgccagccgatgcctttgcgggcgcatttccgggggggcgattggctcccgctgtcttgcttgcggggcgcccggttccgcggatgggcgtttcccgttgctcgttgtgggagcgtccttattttgctgtcggctgacaacgttttgccgacggctgacgacagggggctgtccgcaggtatccgcttgatttgccgggcaggccctggccgtcgctatatcttttcccgctcccggtcttcgaggatggcgtcgaaattttcctctgcccacccgataagcgctgtgaggtggggcatgagcgactcgccgcggggcgtgagcgcatattccacgcggggcggcacctcggggtagaccttgcgcgacagcagcccgtcctgttccagcttgcggagtgtcgatgtgagcatcttctgcgagatgtcggccgtccggcggtggatttccgaaaaacgcaggcacccgctcgtatggaggttgtagagtaccagcagcgaccacttgtccccgaagcggtcgacgatatggcggatcgggcagtgggcgtaggtcgggtgtgcggttttttccatgtccgttcggggcggtctttctttccttattctacatacaacaccagtcccttgaggtactcgccttcggggtggtagatgctcaccgggtggtcggcgggctgcgtcagctggtgcaggatgcgcacgttgcggcccgcgatggccgcggccgagaaaatcatcgtgcggaacagctccttcgacaccgcctgcgagcaggagaacgtgaagaggatgccgccggggcgtatctgcgatatggcgcgggcgttgaggcgcttgtagccctgcatggcattacccagcaccttgtggtgcttggcgaaggccggcgggtcgaggatgatcaggtcgtatttgtcttcgatgtccttgaggtactccacggcatcggcggccgtttccgtaaagttggcctgcgggccgaagttgagtttcatgttttccgtggccagcacgacggcgcgttccgaagagtccaccgagcagaccttctcggcgccaccggccatggcatagaccgagaagccccccgtgtagcagaaggtgttgagcaccgtgcgccccttcgagtagcgtttgaccagctcccggttttcgcgctggtcgaggaagaacccggttttctgcccctgctcccagttgacgagaaatttctcgccgttctccgtcaccacgtgcgccgaatggtcggagcttccccacaggtagccgtccacggcacccagcctggcgttgaagggcacggtttgcgaacttttgtcgtagatggccgtgatgcggtcgccgtaggcagccaggatcgcccgcgcaatatcctggcgggcaaggtacatgccgacggagtggcactggacgacggccaccgtgccgtagatgtccaccacgagccccggcagcccgtcgccttcgccgtggacgaggcggtagcagtccgtgtcggggttgtccgtgagtccgagcgtgcgccgtacgtcgtaggccacggcgatgcgccggttccaccaggcctggtcgatcggttccttgtcgaatgtaagcacgcgcacggcgatcgagccgatctgatagtgtcccagggcgatgaaatcgcccgtgcgggtatatatttcgaccagggcaccttccgtgatttccgattcgtcttcggccttgatgtggtcgatggcgcccgagaaaatccacgggtggcggcgcatgagcgattcttccttgcctttgcgcaggtatacttggggtgtcataattcgggatgtttgatttggggtgtgtgaagcagtcggtcgtagatcgccgtgcagacccacgcatcggtcgcggcgtagagtttttgtttgtcggtgaatgtcgcggcctcccagttgctcagccgctgggctttcgatacgcgctgccccagcacgatggccgagagtttgcgcaggctcttctctccgatgccccattggggggctatcgtttgcaggtcgacgaaccctgcgtcgcggaaatggcgtatctggcgcagcgagcgcaggtcgccggcgacgtcggcgccgatcttcaggatctccttgctttcgagcacctgcaggatcggcttggcgaacgggatcttgttcagccggaaaaggaagcatagctgcggcgtggagagttgcagcagcgacacgcggaacgtcaccccgggccggaacgacgggcgggtctcggtgtcgaaaccgatgacgcgttgtttcatcaggaatttgcaggcggggacgatgtcgcgctcattgtcgacgatgcgtatttcgcccctgaattcgatggccggaagcgctgcggcctcctcgttgctgatcttatccgtaaagttgtttgtcgtagtcatgccgtggaacattctcacaaaaatagggaattatttccggaaaacggcatgcggggcgattttttacatccccgcgggcggttgcggccctattttaacccgattttcccgtccctgcccgtgccggcgatgccttcgtcgagcaattcgcgcagcgcccggcctatctgctgtgcctccccggggaattccgcggccagttcgtgcgggtcggctgccccgcgggatagcctttgccgcagtttttcgcgcagcccgccgtcggccgacggcgtggcgcagccctgtgcctgccgcttcccggcacgtttgtgtgcgaggcagatgtcgcatacgccgcatgccgcaggggcgccttcaccgaaatacccttccagaacggcgctgcggcaacgggtctcgttcgcggcgtaggcgagcatgtgttcgaagcgttcgcgcatcagctcctgccgccgtttgtaggtctcgggggcgatgtagaggtcggcgcggggcagccgctcctcgtccatgaagaggatcggcgagcggttggaggggacgtagcggatcacgcgcaactgccagaggcgtttgagcagctccttgacccgctgtacggtatagccgctccaggtggcgatctcgccctcgtcgatctgccggaattcggtgaagaccccgttgtagaggcgcagcagcgtgcggatgaagtgatccagctcgtcgcgctgcacgcggagtttgtagaggtcgtcgcggctcacgcagaacatgatccgcgccgggttctcctgtgcgtcggtcagcgtcatgtacccgttttgctgcaggagcttcagggcgcttacgaccgtgccggagtagaggtgctcgcgggcgcagaagtcgtggatgttgaacaggaacgatgcctgggcgccgtcgccgatgccgacctgcaggtaggagcagacccgttcgtagatgtccttgatcttttcgagcggcgggaactcttgctcgaaacgccgcacgatgcgttcgccgtcgtccgacgagaccagcagcagggcgtagctccgcataccgtcgcggcccgctcggccggcctcctggtagtagctctcgagcgagtcgcacatgctgtaatgggcgacgaagcgcacgtcgggtttgtcgatgcccatgccgaaggcgttggtggcgaccatcacgcgcgtcctgcccgagacccactcctcctgccgcagcgagcgttcggcatgccccatgcccccatggtaggccgcggccgttatgccctccctgcgcagcatgtcggcgacctgctcggtgccttcgcgcgtacggacgtagacgatgcccgagccggggacgttgcgtaccaggcgcagcagctgcccgttcttgtcgtcggtgtggcggacgctgtacgaaaggttgggacgtgcgaagctgctccgcaggatatgcggttcggcgaaccgcaggtggcgcatgatgtcttcggccacgagtttcgtggccgaggccgtgagcgccagcaccgggacgccgggcagtttttcgcgcagctcggcgatgcgcaggtacgaggggcggaaatcgtagccccactgcgagatgcagtgggcttcgtcgacggccacgagcgatacgttcatgcgcacgacgcgcaggcggaaggcctccgttgcgagccgctcgggggcgacgtaaaggaacttgacgtcgccgtagacgcagttgtccagcgcgatgtcgattgcacgcggcgagagccccgaatggatcgccacggccgggatgtgccgtgcccgcaggcggtcgacctggtctttcatcagggcgatcaggggcgtcacgacgatgcacagcccctcctgcgcaagcccggggatctggtaggtaagcgactttccgccgcccgtgggcatcagggccagggtgtcgcgcccgtccatcaccgaacggatgatacgctcctgtacggggcggaattcggtgaagccccagtagcgtttcagtacgtcgtatatcttgtccgctggcctttccatgaatacaaaggtaggaaaaattaggtgtttcccggaattttttatacttttgcatcggattagacgttcgacaaatgaagataagcgaaaaattcaaagtgcgcgagatggcgggggagcatgtgattatcatgccgggccgctgcggtgccgacatgacccgtatcctggcgctcaacgattcgtcgctctatctttgggaggcgctcggcggcaaggactttaccaccggggacgcagccgccctgttgttggagcgttacgacgtggacgaagccaccgcacagcgcgatgccggggcctgggctgcgaagctcgccgaatgcggcgtgctggagtaaccggcggcacgtgtccggcgcacgggcggaaaacctgaaaggtagcatgaaattgaaaagactcatatcgctgttgctgctcgccatctacctgacggcgtggggcggccctgcgtatgtgtcgctttcgtgcaagtgcgtcacgatgtcgtcgcatgtctgctgccaccactgccagcacagcgccgatgccgcgggtgccggcgagtcgctgaaggctccctgctgcggcaaccaccattcgaccgaaatcgaactctatacgggttcttcttccgataaccacgagagattcatccgctgcacggtcaccgacctgccgcccgcattggttgcggaggctccggtcgcggccgtcctcaagttcttcggggagacgcttcccgaatgcggcgatcctttcgtcatgcggggccatgtgcgctccgcaggccttcgtgcccctcccgtattggcttaaaacctttttgggacggatgctgcgcgcatccgcccgcaaatagttttaaccaataacggaatgtaatgaaaatcaacaaaatcattttatctgtttcttcccttgccgtgtgcggaaccctcagcgcacaggatttgcggggtgtagtccgcgacgccgacaaccagccgctggtgggcgcttcggtttactgggagggtactacgatcggtgccagcaccgatgcccagggggcgttcctgctccatcgggtaaaaggttacgacaatctggtcgcctcgtatctgggatatgtgaacgacacgctgcgtgtggcaggcggtgcggagcgtatcgaattcacgctcgcttccgaaggcgtggcgttggaggacgtggtggtcgagggtaatctgagcggcaacttcgtcaagcgtgacggcatcgtcaagggcgagatgatctcgttcgcgggcctctgcaagatggcctgctgcaatctggccgagagcttcgagaactcggcgtcggtgaccgtcgggtacagcgacgccatttcgggcgcacggcagatcaagatgctcggcctggcaggtacctatacccagatcctcgacgaaaaccgcccgatcatgcgcgggctgagcgccccctacggactgagctacacgcccggcatgtggctcaattcgattcaggtgtcgaagggcgtggcgtcggtgacggccgggcatgaggccatcacggggcagatcaacctcgagcaccgcaagccgacggacgacgagaggctgttcgtgaacctctatctggacgacgaactgcgccccgaggccaacatctcgacggcgttccccgtcacgaaggacaagaaactgtcgagcgtcatcctgctccacggttcgatggataccgacgtccgtaagatggatcacaacgacgacggattccgcgacctgccgctctccgaccagatcaatgtggccaacaagtggctttatgcggccgacaacggtacgcagatccgctggggatggaaattcgtacaggagaaccgcctgggcggtatgctcgactacaagaattcgatgcgcggcgagatggagaagaactggaactggaaggagacgggcgccgatatgcccctctacggttcgaagatccgcaaccgcggcgcgaacggttattttaaaataggtatgcccgtcggcccgtcggtctacgatgccgacgagcaggatgagatgcgttcgaacctggctttcgtggccgatttcgaccacttcaacgagaacgcctatttcgggctgaacgactaccgcggcaatgagaatacgctctcgctgaacctcatgtacaaccactatttcacctatcggtcgtcgctgatcgtcggtgcacagggacatttgcagtactaccgcgagagttttgccaacaaccccccgtggattgcggcggctccggctacgctctacgacttcgaccgcaacgagcaggaagtgggtgcctatgccgaatatacctattcgatcaaggacaagttctcggtcgtggcgggtatccgcggcgattacaatgcgttttatgacaagttcttcgtgacgccccgcgggcatatccgctggaacatcaccccctcgaccacgctgcgcggctcggccggcctgggataccgttcgaccaacgtcatcaccgacaacatcggtatgctggcgaccggacggcagatcgtgatccccgatttcgacggcttcaaccggctggagaaggcgctcacggtgggcggaagcctcacgcagaccttcgggctggtcagtcccggcgacgcaacgctgagtttcgactatttccgcacgcagttctacaattcggtgatcgccgaccaggagtacagcgccgaccagatcgtgctctataattcggacaagcgttcctatacggatacctaccagatcgacttttcgtggacgcctgtcgaacggttggacatcttcgccacgttccgttatacggacagcgagatgacgatcgaccgccccgacggaaagaccgcccgcgtggaacggccgctggtgagccagtacaagacgctgctcaatatccagtacgccacgaaattccgccgttgggtgttcgacgcgacggcacagctgaacggccctgcgcgcatcccgacgcagacgggcgacctggccgacgacaagtattcgccgcgctacccgatgttcttcgcccagataagccgcaaggtcggcaagttcgacatctatgccggttgcgagaacatcgccgactaccgccagcacgacccgatcctcaatgcggacaacccctactcgacgggtttcaactcgatgaacgtatgggggccgctgatggggcgcaagttctatatcggcctgcggttcaacatgtattgattaacctttaaataaacaccaggatgaagaaaattttaatgctgtgccttgcactcgtgatgggggtgggcatgtgtgcggcgcagaaggctgccgacaaaaagacggtgacgacggttttcacgaccgacatcgactgtgaacactgtgtcaagaagatcatgaacaatgtcccctcgctcggcaagggcgtcaaggacgtgaaggtcgacctgcctaagaaggaggtgactgtggtctatgactccgcgaaaaacagcgacgagaatatcgtcaagggatttgcttcgatcaaggtcaaggccgaaccgaaaaaagccggcgcgaagaaataacgccggcgggttttgttatcggaaagggaggacatcattgtcctcccttttgtttcggttgttgggcgggctcctgtactgccgtcggtttcccccgatccgctatccactgcccgctatccaccgtctgctgtctaccgtacgattccggacgacagccgataagggccggtgcatgccgaacgacggccgggatgcgttccgcttgcccggaatccgcccggctgccggtatgcccggtttatcggtgcgggtgcccgtttgttttcataacattgtgcctgcgcctgcgcaggtagaggtcgagccctgcgaggccgaggaacgttgcggcgataaagatgtagaacagggacagccgcctgctttcggccgggaaatccggttcgggaaattttaaggagcccgggcctgtgaacgcgggcatgtcggggaatgaaggcatgtcgggcagatgcagcccgacgcccggttcgtaccagaaataccaggcgagcccggcgatcaccgccagcaggcagagtacgcccgccgtgcccagcaaccatgtttcgcgccgttcgcgccgcgccgattcgcgttccagccgttccatgagcctctcgcagaacccttcgggcagttgcgtacccggggcttgctccagcgcgcggcggattatgttatttttcgcttccatgcagttgcgtatttaccagtatatacagttttttgcggatgcggtggagccgtactttgatgttggactccgacatctgcgtgatcccggcgcattcgcttacggagtactcttcgtagtagaagagcgtgacgagtgcccgctcttcgggctccaactcaccgacggcacgggccagagcgtcgaggtattcctgccttccctcccaggcatccatccgctcggcttcgctgtcgggcaggttcgccagccgcgcctggtcgatgcaggcccattcgcgtttgcggcgccgtgtctcggagaccgccgtgttgtaagcgatccggaagagccaggtcgggaacgaactgcgcccgttgaacctgtgcaggttgcggaacgccttgaggaaaacgtcctgagccagctcctcggcatcctctgcgcagccgacgatgcgggaaaccagcgtgtagaccacccgcccgtaccgccgggcaaggatggcatacagatcggtttctccgtttacgatccgtcggatcagctccagttcctcctgttgttgcattgctatccggttagacgcattttgcctggaaaggttacatgccgacgccgtttttccggaacctgtaacctttttcgcggagctgcgtctaataaggcaaagatcgcaaaaaacgaatcgctaatctctaatacttaaaaaattatgatggattttatttttgttcccctggtcgtaggcgtgattacgctgggaatctacaagttcttcgaattgctcgtgtgccgtcgcgagcgccgcatgatcattgataaaatggacggcaatgctctgatcgactacctgaagttcgtaccgatgggggtgaggatcggcgctcccgtgtcggtgcgtcccgtgtcgggcggggtgtccggaaccctgaaggccggttgccttttgctgggcatcggtttcgggctgctcttcgccttcatgttgctgaactggtgtgcctatgatgcttcgtacgaaatgcggagcatcgtctacggcgggtcggttctctgcttcggcggtgtcggactgatcgtttcgtttgtcgtcgagcgtaatatcgtcggcagggagtgcaaataacccggcttttccggatggaaaaaggagtatcccgcttttgggggatactccttttggttttgccggggatcgtgcggcgcaccgggggcgggacggtttgctgagggccatgcggcgcaccgggggcaggacagtttgccagggggcggttgtggggcgggacggtcggggcggaacggtttgccggagcctggacgcctgccgtttgccggccgcgcggccttattccatcggccggatgcgcatctcggttacgccttccaactcccgtgcgagacggtcgatgtcggtcttttcctcgacttcgccgtagtggtaggggtagaagatcgtcggccggatcgccttgacggcctcgacggcctggtcgacggtcatcgtgtagggctggttgaccggcaggaaggcgatgtcgatattcttcagcgccttcaattcgggcgtgggttcggtatcgcccgcgatgtagatgcgcgagccgcctatcgtgagcacgtagccgcagtcctcacgctctttggggtggaattgcagatgcccgtcggtggtgttgtaggcggccacggcctcgactttcaggtaatcgcgcggcgtggcgacactgcccgggcgcatcgtgtagcagttcatttcgaacgcctcggccgatgtgcggtcgcagagtatctcggtctgcggggtctggatcgcttcgacggccgccacgtccaggtggtcgtagtgcgagtgggtgataagtaccacgtcggccttgggcagggcggcgtagtcggcatagccgcttacgggatctacgtagatgtattttccgccggtctcgaccgaaagcgaggcgtgtttgaaaaaggtgatcgtgatttgcatgccgtcgcgcgtcgtcagcgtgtcggcagggtattcgggagctttctttccgcatccgaaaaacgataggatcgacataagcaacaagagttttgggtttatgctcaaatattatatattacaacgccaatatagtgaaaaaaagtgaaatattcgtacctttgagccgcaaccgaacctgggaaaacgttgggggcggtttccgggaagttttctgagccgggcctggcgcacctttgggcggcggatgctttggggcagaatgcccggtttgcaggatgaaaatagaataattcgcacatttttcatgcctgggcgcagtatttttcgaatcgggacgtttataggaataaagtattattaaaattgtatatgatgaaaaaatttttgtttgtggcggcggtagtagcgtcgatggttttcaccgggtgtatcaacgaggacgacacctataagaagttgcaaccagttgagaaggggatcaacatttacaactggacatccagccagtattccatggcgaccgagcaggccaacatcggtctgcgtatggcgatgcttgtggccgaagcccacaagcagggggtggataacttcgaggatgtgaaaatcgaaggcatctccatcaagggcaagttgctcggcacctcctcgaagatcgaaaagacgaccactggctacaaaatcactttcaatcctgcatatatggacatggacggctattcgcgcgagggcgccgtgctgatcgacacgggcggggccccgctgctcgaagatgccgtggccggaaaggtctggtcggtgacgttcgacgaaaaactggtgctggttgccaccaacggcaatacgtcggtaaaggcttcgctggtgggcggttccacgcagctctacaacgatgaaaacggagcctatgcgatcagcattgcgaatcaggcctgctacctcgattcgggcagcaattttacctcgaattggggcggccgtatgacgttgaagccccataacatgaatttcacctattcggattgcatgggcgagaagttcgtcgtgaacacgacgggtgcaatttacggcccttcgttctatacgatggacaatgcaacgtctctggagctgagcatgacgctgacggatgtcgagtattacacgaggtcgagcatccgcgaaggtaagttcgaggcgatgatgaccggcgggtacgattttacggccttcccctctccgaaagtgacggtgaaatatgccgtaagtgccgacggcaagaaattgctgacgacgatcgaatatgcaggaaatacggtgacgatctaattttgattgtaaaaagtaaatgcggtgcgaattttcgcaccgcatttttattttccgggcggtctgttatcttggaggtgtgtttgctggatggggttgtttgtcggggacttgcttcggtgatgtttcgtaggcggtggctccggtgttgcccggtcgtaccagggggcgttttgccgggaggttgctccggggtaacccggatacgtggttgctttctgtcgttccgtgccctgcccgggatttatttcccgtccgttgcctttgtctggagctccgcgctttttgactgcctgtcgagccgcatgaccgaggggatgcagaaagccgcgagcccgagcgtgcagatcaccagccccgcgatgacgaatgtcgtggtgagcccgacctgttcggccaggaacccagtgccgagcagtccgatagccgacggaagcagcccgaagctgtaatagagcgacatcacgcgccccaggacacccgcgtcgatgcgggtctgtacgaccgagacgaatgacgaattgaaaacgctgctggtaatgccctcgatggccgatagtactgcgaaccagacgaacgccgtgggcggcagcagccccgagatggtgaacgacatgccgatggtcaggtacatcaggttcaccaggacgatgcggtttacccggtagacgcgtgcgcccatgatggcgccgccgataagcgctccgccgccccatacgatctcgatgagactcatgtcgtaggtgttgccgccgaaatgctgcagcgtcatcagcgggaacattaccccgacgggcatgatgaaaaaccagacgaggatagccagcgtgaagaaccaacccatgcccggtacggcgtgcatggcactgaacccttcgcggaactcccgccagagattaggtttgagcgtgccccgcacgggattggggatgcgtacgaacagcagcgaggtgcaggcgatgatggcgcccgcgacgtccagaagcaggatattgccgatgcccgtgaagctgatgagcacggctcccaatgccgggccgatgatgttcgacagcgaattgatgatctggttgacacccgccacccgggtcagctgggcttcgggagccagcagcggcacggaagcctgcatcgagggggtatggaaggccgatcccaccgagcggcaggccagcaggatgtagatatgccacatctgcgccacgtcgaaccagaaaagcatggccaggataagcgtgcagaacgcgatgaagctgtcggccaggatcatcgtgcgtttgctatcccatcggtcgacgtagaccccgacgaccgggcccagcagcgactggggcagcatacccgcaattgctgccagcgccagtacctcggccgaaccggtctcgatgctcatccagaagatgatcgcatagccgacgaccgagctgctgaggatcgaggcgagctgcccgctccagatgatcccgaatgtctttttccagttttccatgcttgtttcgcggtgatgccaaaaaaggcggacaccgaggtgtccgccgctgcaaacccttccgtgaaagggtttatttaactgctttaactattgcctcgaatgcttttggctcgttcatcgccaggtcggccagaaccttgcggttcagtgcgatgcccttggcgttgagtttgccgataaattgtgaataggtcattccctgtgcgcggactgctgcgttgatacgcatgatccacagcgagcggaatgtccgctttttgagctggcggtgtgcatatgcatactgcaaacccttttcgaccgtgtttttcgcaacggtccaaacatttccccttgaaccaaagttacctttggcaagtttcaaaactttttttctacgtgcgcgtgatgcaacggcgttgactgaacgtggcatacttgtaaagtttttgaagagctgtcagcgacgcggttctcccgcgttctttggggctgattcgctccggttaataaattccgcaggtcgattacttgaccagcaggttcttgattttggcctcgtcgaccgcagaaaccgtacccgagtagcagaggttacgcttctgtttagtcgtctttttggtcaggatgtgactgtgataagcgtgtttgcgcttgatctttcctgtgccggtgaaggtaaaacgcttcttcgcagcggcattggttttcattttcggcattgtcgtaaatagttaattagttaaacttagcctgcaaagataacaaaaattcggcataccgcaatcgcggggctgaaaaatctccctctttttattcccgttgcgcaattattgcagggaaacgccgggggctgtccgccgcctgtgccccaggtcggtttgccgatcccgataattttccgtatatttgaataggtaaatcaaaaaccgcaggacgatggagatggagtgggattttatcatacgcttgtgcgtggcaggcctttgcggcacggtgatcggcctcgaccgcgaataccgggtcaaggatgcgggtttccgcacccatttcctggttgcgctgggcagtgcgctgataatgatcgtgtcgcagtacggcttcgccgatatcctgatgcatacaggcgtggggctcgaccccagccgtatcgctgcacaggtggtgagcggcatcggcttcatcggcgccggtacgatcatcatccaccgccagttggtgcgcgggcttacgacggcggcaagcctctgggcgacggccggcatcggccttgcggccggggcgcatatgtatgtcgtggctgcagcggctacggtgctgacgctcttcgcgctcgaagtgcttacgctggtctttggcgggttggggcgccgcaggacgatggtggtcttttcggctacgaagcgtgctgcggtcgacgagatgttcaacgagttgcagagccgcgaatatgccgtgatctcctatgaggtcgaggcacagcgcagcgccgacggcatcgtctaccgggccaccctggtcatccgtgccaaggggaatacggatgaagaccgctatgtcgacctgctgcgtgagaatcccgacattaccatcgaacggatcgtatgagccggtcgtacagcaggcagaagcccagcggcagggtgattccgaccacggtgtagggtatccaccaccagggcgaccctgtggggatgaccgggtggcaggccaggtagcggggcgggtagtcgcaaacccacatctgaaagagtatcagcagtttgaatgcggggatgtgccacagcatgatcgccatggtgtgtcgtcccgtatagtccagcatacgtgtcaacgggttgccgtatgccgtgaggcggcttgcagcagtgacgagcatgtagcatcctgtgcacaccagcacgacgaagagcaccgggttgccgaaaagtctcccgccgaggttgacgcggcagcctgcggctgccgccgcgagcaggatgactaggcagagcgttgcgatgcgcccgtccagcgggagccgcgcgtggaagatgcggaagagttttccgaggtagattatccccgtgatggcgaatgtccggacggcgatccactcgcccggaatgccctacggatggcgggcgtgcagtatggcgaccgtaaacaggaacaggatggaacctccgcgcagccgctccgccacggtcggcgtcggggcgagtttgcgggttgccagcgtgatgcagaaaaagagcatcagcccgaggaacagcccttgcagaaaccagaagggcgcctgcatctactcgtggtgcaggaacaggaatacccttcccagcgtccggagcagttccggggtgtcgtagggccggatggcctcccgggcggagaagtcataggcgatcaggtgccacttgagaaatcggttgtgcggcagcacgaagagcgtgcccaggatgacgtagggcaggtaaaggcgccggagtttgcggcctatgaaacgccctggggcggcggtctgtccgtcgtcgaagaaatagcccgcgacgaaaaagaaaacggccgtgttgaaatagtaggtgaaggtttccagcggtgtcaggatcgcggtgtgcgaaatcaccaccgcggcgatgccaagggccttgacaatcgagatcgccgtgtcatgggggtgcgtgccggtgcccatcggtcagaaataacggtgtacttcttcgaggagctcctcctgtgccatgtcgttggggttcgtgccgggcagcccttcgggaaccggctcgcccagccggtcgaagaggtcggcccagaattgcggcagtgtcccgtccgcggcgcggaagttcatcggccgcgccgtgaaaagcggggtgccgtcttcggcgcggtagctttcccacaccagttcgctgcaatagagcttctcccttccgggccggtacgaataatcgtaggggactccgagcaagcagcgggcccggcggacagccgcggcgatgccggccgtgtcctttaaccgcatggcaactactgccggccggccgccgatttttgcggagcgtccgagaaattcctccaatggcgtgagccggacgccgccgtctgtcgtggcttcgagcaccgaatccgccccgttgcctgtgacggcgatccccacgtgggagaaattcagcagcctttcttcgcccgtcgccgccgtgatcgccccggtcatctccgtgttttttccggcctggaagagcaggtcgcccgagtgcaggcgatcgcggtttcggccgcaggaaatggccagcagaagcatacctatatatattaaagcctgtttcatagtctccgccgttcgtttatgcaaatatattaaaattttttcacaactaactcgctgaccgatagccgtgtgtgaaaaaagctgctcgaattgtcgaaaaaaagtccccgaattatttggaaataactccggaatgcccttatctttgcatccgcttcgagagagaaatactgctccggggcggtgaaaaacaggttctgaaaaattttgaaaaaaaagttccaaaatcttttggagattcggaaaaatgacttacctttgcacccgcttcgaataagaaatacggttcgaaacgataagaaaaaaggttctgaaaatttctgaaaaattctttcaaaaagatttggtggtttcaaaaagatgacttatctttgcaccactttccgctgaaaaatcggcggtcggaacaacggggaaggccgaaaggacagacccggcaaaaggaaagaaattgttctttatagcaatatatttgaacagcgttctttgaagtatttgagcagctaaaagttttccactctcgcgagagagtgatttcaaacaatacctttgagattagagctaaagatttaaaacaaaacattttatacaatggagagtttgatcctggctcaggatgaacgctagcggcaggcctaacacatgcaagtcgaggggcatcacgaggtagcaatactttggtggcgaccggcgcacgggtgcgtaacgcgtatgtaacctacctataacaggggcataacactgagaaattggtactaattccccataatattcggagaggcatctctccgggttgaaaactccggtggttatagatggacatgcgttgtattagctagttggtgaggtaacggctcaccaaggcaacgatacatagggggactgagaggttaaccccccacactggtactgagacacggaccagactcctacgggaggcagcagtgaggaatattggtcaatggacgcaagtctgaaccagccatgccgcgtgcaggaagacggctctatgagttgtaaactgcttttgtacgagggtaaactcacctacgcgtaggtgactgaaagtatcgtacgaataaggatcggctaactccgtgccagcagccgcggtaatacggaggattcaagcgttatccggatttattgggtttaaagggtgcgtaggcggtttgataagttagaggtgaaatcccggggcttaactccggaactgcctctaatactgttagactagagagtagttgcggtaggcggaatgtatggtgtagcggtgaaatgcttagagatcatacagaacaccgattgcgaaggcagcttaccaaactatatctgacgttgaggcacgaaagcgtggggagcaaacaggattagataccctggtagtccacgcagtaaacgatgataactcgttgtcggcgatacacagtcggtgactaagcgaaagcgataagttatccacctggggagtacgttcgcaagaatgaaactcaaaggaattgacgggggcccgcacaagcggaggaacatgtggtttaattcgatgatacgcgaggaaccttacccgggcttgaaagttactgacgattctggaaacaggatttcccttcggggcaggaaactaggtgctgcatggttgtcgtcagctcgtgccgtgaggtgtcgggttaagtcccataacgagcgcaacccctaccgttagttgccatcaggtcaagctgggcactctggcgggactgccggtgtaagccgagaggaaggtggggatgacgtcaaatcagcacggcccttacgtccggggctacacacgtgttacaatggtaggtacagagggtcgctactccgtgaggagatgccaatctcgaaagcctatctcagttcggattggaggctgaaacccgcctccatgaagttggattcgctagtaatcgcgcatcagccatggcgcggtgaatacgttcccgggccttgtacacaccgcccgtcaagccatggaagctgggggtgcctgaagttcgtgaccgcaaggagcgacctagggcaaaaccggtaactggggctaagtcgtaacaaggtagccgtaccggaaggtgcggctggaacacctcctttctggagccttgtttcaaaggtaatttagctgctcacttcaaagaaacgtcacaacagcaccgctttaggcgtaggttcgaaccgagtgctgttcactgcaaatggaaatttgcgacgttcattgacatatttaaggagatgagataaagttccgataactacaataggggttatcggaaatgtaagaaagtaataaagggcgtatgggggatgcctaggctcttggaggcgaagaaagacgtggtaagctgcgataagcctcggggatttgcaaacgagaattgatccgaggatttctgaatgggacaacccggcaggcagaaggcctgtcacacgaaagtgggccaaccctctgaactgaaacatcttagtaggaggaggaaaagaaagaaacatcgatttcctaagtagcggcgagcgaacgggaaacagcctaaaccacaattgttacggcaactgtggggttgtaggactgcaatattcaaatgactgtgaactggaatgttctggaaagttcatccgtagagagtgaaagactcgtacaggtaagcacgtcaggcgatagcagtatcctgagtagggcgggacacgaggaatcctgtctgaatctgccgggaccacccggtaaggctaaatactcccaagagaccgatagtgaaccagtaccgtgagggaaaggtgaaaagaaccccgaacaggggagtgaaatagaacctgaaaccatacgcttacaacctgtcggagcggcttcgtgccgtgacggcgtgcctattgaataatgagcctacgagttactaatcactggcaaggttaagtgcacggatgcacggagccgaagcgaaagcgagtctgaacagggcgtttagtcagtggttgtagacgcgaaaccttgcgatctacccttgagcaggttgaaggttgggtaaaaccaactggaggaccgaacgaataagcgttgaaaagcttctcgatgacttgagggtaggggtgaaaggctaatcaagctgggaaatagctcgtactccccgaaatgcctttaggggcagcgttgtaattaagagtctactggaggtagagctactgattggatgcgggggcttcaccgcctaccaaatcctgacaaactccgaatgccagtagtatgatttacagcagtgagcgaccgggtgctaatgtccggttacgagagtggaacaacacagaccagcaactaaggtccccaagagtatactaagttgatctaacgatgttttgctgcagagacagctaggatgttagcttggaagcagctattcattcaaagagtgcgtaacagctcactagtcgagcggcaaagcgtggataataaacgggcatcaagtataccaccgaagttctgggcacgaaagtgcggtaggggagcattccattccgcgttgaagccgaaccgtgaggtttggtggagtgtatggaaaagcaaatgtaggcatgagtaacgataatgcgggagagtaacccgcacaccgcaagaccaaggtttcctgatcaacgctaatcggatcagggttagtcgggtcctaagggtaagccgaacggtgatctcgatggataatcggttaatattccgatactgacatatacctcgatggagagacgaaggaacgtaagtgccgccacctgacggaataggtggttaaagggcttaggtatagggacagattaagagttagtccttgctgaaacctgacagtacagagagcctacgggcaatttgatagtgcacccaagtcgacttccgagaaaatcttctaagttatagtatatgtcacccgtaccgtaaaccgacacaggtggtcgaggagagtatcctaaggtgctcgagtgaatcacggttaaggaactaggcaaattaaccccgtaacttcgggaaaaggggtcccatcgcgaggtgggcgcagcgaagaggtccaggcgactgtttatcaaaaacacagggctctgcaaattcgaaagaagacgtatagggcctgacacctgcccggtgctggaaggttaagaggggatgtcatcgcaagagaagcattgaatcgaagccccagtaaacggcggccgtaactataacggtcctaaggtagcgaaattccttgtcgggtaagttccgacctgcacgaatggtgtaacgatctggacactgtctcaaccgtgagctcggtgaaattgtagtcccggtgatgatgccgggtacccgcaacgggacgaaaagaccccgtgaacctttactatagcttaacgctgaatttgggtacacaatgtgtaggataggcaggagactacgaagcgggcacgccagtgttcgtggagtcgacgttgaaatactgccctttgtgtacttgagttctaaccctcgagaggggacaccgtttggtgggtagtttgactggggtggtcgcctccaaaagagtaacggaggcttcccaaggtaccctcagcacgaatggtaaccgtgcgtagagtgcaatagcataagggtgcttgactgtgagaccaacaagtcgatcaggtgcgaaagcagggtatagtgatccggtggttctgcgtggactggccatcgctcaaaggataaaaggtactccggggataacaggctgatcgccgccaagagctcatatcgacgcggcggtttggcacctcgatgtcggctcgtcacatcctggggctggagaaggtcccaagggttcggctgttcgccgattaaagtggcacgcgagctgggttcagaacgtcgtgagacagttcggtctctatctgttgcgggcgtaggaagattgaggggtcctgactttagtacgagaggaccgagttggacgaacctccggtgtatcggttatgctgccaagtgtactgccgagtagccgcgttcggtctggataagcgctgaaagcatctaagcgcgaagccatccccaagataagtcttcccttgaggggcgtaggagacgactacgttgataggctgcaggtgtaaagacagtaatgtcaaagccgagcagtactaattacccgaaaggcttttttacaagattctttatctcatctccgaagtatgtcaacttataccgggtgcgacggattgcagcgactaaaaggctgctcgcactacttcgatagcatggagcatgtcggacttcgtccttcgttttctccacacgacaaaacaaacaggtttgctttgtcccggtttatcgaaaacgttcttttaggtggttatagcagtgaggttccacctcttcccattccgaacagagaagttaagctcactaacgccgatggtactgcggttttcccgtgggagagtaggtagccgcctcttcaaggtcagatcgtaaggtctgacctttttttatgcccctttccgagcatccgcgttacagttgccggaaaaacaaatcatacgtaacggattggccgctatggcagcaaaaaagatcgggaagatccgaagatcttcccgaaagggcaatccggccgatccggatacggggcgcgttgtacctgcggatgccgctttttgccctttgctgttggaggcgttttgattgcgggggcattgtcgatcgccccccccctgttcaatttgcaattatccctgtgtgcaccggtattaccggatcatccggttttatcaaaacaatagccccggtatttcgccaactcccctggcggatccttcggtaaaagcgctcactgggcgtctgatataacaattactcatacagtcggttattcatgccagtcggtgtagagtccgcaccgtttgcagtggagccggtaagtgcggcgggttactgcgcggacgcggagtgtcgcgtggcggcaacccgggcagcgcatggtgtagagcagacgttcgtagtgccggaataggaaaaagtttatgcagctcagggcgattgccgcaaatccggtacccgaattttcacccgtgattaccggcagcaggcaacttgccagggtcaggaaaagaacggtcagcccgagcgtatggatcgtttggttgcgcaggtgcctcagaagccagagcggcagcgtgatgcacatgcccgtcacagcaggtacgcaactgatgccgatcagcaggagatagttgttcataacaattatcaggatgcctgtccctcggcatagttaagtgggagttgtggggtgtggagatataaaaaacgtgggacaaaactctgatttgctctctgaggctctggaataacctgtgcaaccaaatacagaatgaagcccacgttgaaaacgtgagcgtcaaacttcattccttggttgctcttaaaattttccagattttcagaaagcaaggtacaaagctaacgctttttatatgtattcgccggcgcttttagtgcgtggacggcagaactgttcttgtgaaaaaggtaaaattcgcgcgttaatttctcataggctttgaaatttgggattgcacatacaaatatacgaaaaacatccggaattggcggatgttttttgtcgttaatattgttatatgccccggaatcacctgggcgggcgggtttttacactcccgggttatttgaattctccgggatggagggctttgtattcttccagcgagaggggacggcgtccctgtgaccggcgcagtttgtcgcctatgacgtgggctgcggcgcggagcgtgcgccccagttccgtcgcgaatccgcggggaggaaagagtgtgcagaccatttctcgatcccatttcttcaggaagaacttgctgtaatattcgtccgtggggtttatcaggaaatcgatatcgtctttccactcgtagcgtacgtgcatcaactccccttcggagaagggcagcagtttgtaggggagcgactggtagggcagatagttcaggaacagttctccgtaatcgttggcgtagttgccgggtacgcgccgcttgtcgtaaagaaccagtttgtcgccgatgttgagcacgacccagcggtgcgatttcttggggaaaagccattcgccgagcaggctcggggtctcgatgtagccggccttgccgacccgcattacttcgcgcaggaactgcgccgggtcgtcgctgtgttcgagtacctggttgcagatcacgtagtcgaattccttgtctgcaaaaggcagggcttcggccgcagcgttgaccagctgctggtgagggaatatgcgcaggccgccgcagcgatgggtatcgtcgccgaggaatttctccacgaggacgttcgcacggaaggaggggtgattgccggggcctacctcgagtacccggtcacgtcttttgatatgcagatcctgtctgcttttgggagtgctgactttcattggcggtcgcgtattgtcacaaatatagaaaaatattttttatttgttccggaacatgcgttttacatctttccactccccgtcgttgggtgcgggctcgatgcccagcagcctgcacaggatgaggtacatgttctggttctggaacgagccctgccggtagcccttgcggaatgcggggcccgaggcgtagaagaccatgtgcatgtcgcggtcgcggttgtcgaagccgtgtgtgccgcgtttgcggacggggcgtgtttcggccgcgtagtcgagcgtccatccggtctcggggatgacgatgatgttcgtcaggcgggtagggtgggtgccgtaatggaaacgccggggcatctgctcgcgccgccaggccttcatgcgccccgtcctgcggagtatcctgattgccgtgtcggcatactcttctttcacctccagcccgaacggggtgccaggtacggtacgtatgacctgcgtagtgtcgagcagcggcatgaggttgatgtaccgctccggcgaaagcgcggccatgccatggtcggccgttacgatgaaattgattcgctcgaagacgggcgagcgccgtatctcacggaaaaagtagcggaggacggagtcgatgtgttcggcctgggcgactgcctgcggtgaatcggggccgtaggtgtgcatcatggcgtcgggctcttcgaaataccacattaccagctccgggatctcggcttcggggcgcgtcatggcttcgatcacccaatcggcgcgttggtagtaggtcggtttcgacgagtagggagtccagacggtcgcctggcgtccgtcgatcgggacttcgctgcccggccacatgaagatgttggccgtgaggccctgtctttccgccgtgttccagatcggttcgccgctccagaaccccggcagccggacatcctccgcgtcgaacacggagagcttgcgcccggccttccggtcgtagaagttattgttcacgaccccgtggtggtcgggatgcagccccgtcgccatggcgtagtggctcgggaaggtattggaggggtagaccggataaatttcggcataggttcccgcccgggcgagcgagtcgagtgtcggcgtatggctgcggccggcgagatcccagcggaaggcgtccatcgaaaggattacgacgtattgttttccgtcgggtgttgcgctgacatgggccttgcgggacgaggcacagcctgtcaggaggatgagcagcaggaaaaacgtatattttttcatgtgcgggctttgtatggtaaagatacaaaaaaagcgcccgctattgcagtgggcgcctttcggatgtgaaaaaattactttttcatgtaacccttcacatagtggtggtgcgggccgaaacgctcgaaggcggcacggtcgagttcctcctgtgccgacgggtcggctacggagatgatcaggcgtgcgcgctcctgcagcgtcttgccgtagaggtctacggccccgtgctcggttacgaaccagtggatgtggttgcgggtcgtgacgacgcctgcgcctggcgacagtacgggggcgatcttcgagatgcccttattggtcatcgagggcatggcaatgatggccttgccgcccttcgacagcgatgcgccgtatacgaagtcgatctggccgccgacacccgaatagaacttcgtgcccagcgagtccgcgcatacctggccggtaatgtcgacctgcagcgccgaattgatggccgttacgcggtcgttcttcgaaatgatataggggtcgttcgtgtagcccacgtccatcatcagcacggcagggttgtcgtcgatgaagtcgtaaacgcgctgcgaacccatcaggaacgtcgataccatcttgcccttgtcgatgttcttggcttcgccgttgatgacgccgctctccacgagcgggagtacgccgtcggcgaacatttcggtgtggatacccaggttcttgtggttgcccagctgcgccagtacggcgttcgggatggcgccgatgcccatctggagtgtcgcaccgtcctcgatcagggcggcgcagtgtttgccgatggcttcttcggtggcgttcggctgcgtgaagtgcgcctcgatcagcggtttgtcatcctgtacgaagatgtcgatcttcgaggagtggatcatggcctgcccgaatgcgcgggggacatatttgtttacgacggcgatcacgtgctcggcggtctccacggcggccagcgttgcgtcgaccgacgtgccgagcgatacgaagccgtgcttgtcgggcgtcgacacctggatcatcgccacattgcagggtactgcgccgcagcggtagaggcgctgcgtctcgctcaggaaaatcggaatatagtcggcatagccgctctgggtgactttgcggacgttgccgcccacgaagaacgaatcgagctggaatacgccttcgaacttctcgtcggcatagggtgccgggccttcggtgtgcaggtggtggatgtggacatccttcagttcgccggcctcgccgcgtgcgcacatggcgttgatcaggcattggggggccgaagccacggagctcaggtggatgtggtcgcccgatttgataaccttgacggcctcttcggcggtcgtaaatttgatctgggtagtcatttttactttaagtttgtattttggttttggttagcgtttcctttcgccgatttttcgcggacaaagttcctgatggccttgtccgtgtaagtccagaaaatcggtacgttacgcatcgtgatgatgttcagcgtattcagggcaaggcccatgctgatgtccacgcgatcgagcgtgtcgatacccggggcaatgttgtagaacatgacgacgacgtgttcgggttgtcctccgcgcatcgtgtagacccggccgtagtggtcggacgaaggataggccgcgcctttggcataggcggccgtgccgttgcgctcgccgcccatatagaggcggaatcccccgtagaggggtgtgatgtcgaaacgcagcatcacgttgcccgtgatgttgtccccggcgcagatgacgttcgaaatgcggaagtcgtttacgaacgagggggtgctgatctccgagggctggtgcccgcgggcgaatttctcgacggcttcattgcgcagggattcgaaatgccgcgcttcccggcggagttttttcttctgggccttttgcagcgccttctgttcctttgcggtgctaccctccccgggttgcatggccgatgccgctccgcacagcgtgcagagcgacaacagcaaaacggtcagacgtttcagcatggcgttgctatttgcgtttcacctcgacctgttcgtatccctcgacgatgtcgccgacacggatatcgttgaacgattcgatgttcaggccgcagtcctggccggccgtaacctccttgacgtcgtccttgaagcgcttgagcgaacccagcttgccggtgtagatcacgataccgtcgcggatgacgcggatcggggtgttgcgctggagcttgccttcgcggacgatacagccggccacggtgccgaccttcgatatcttgaagatctccagtacctcaaccgaagcgacgatctcctccttcatcacgggctcgagcatgccttcgatggcatccttgatgtcgttgatcgcgtcgtagatgatcgagtagaggcggatttcgatctcctccttctcggccagcttgcgcgccgaggccgacgggcgtacctggaagccgacgatgatggcgttcgaagcggcggccagcagcacgtccgactccgagatctgtcccacggcggcgtggatgacgttgacctgcacggtctccttcgagagcttgatgagcgagcccgacatggcctcgatcgagccgtccacatcgcccttgacgatgatgttgagctccttgaacgatccgatggcgatacggcggccgatttcgtcgagcgtcacgtgcttctgggtcatgatgccctgcatgcgctgcaactgctcgcgtttgttggcgatttcgcgtgccgagcggtcgtcctccatcacgttgaacgtatcgccggcctgcggtgcgccgttcagtcccagcacctgtaccggcgtcgaggggccggcggaatcgaccttcttgccgttctcgttgaacatggccttcacgcggcccgtgtaggtgcccgacaggatcacgtcgcccacgtggagcgtaccgctctgcacgaggatcgtcgagacgtacccgcggcccttgtcgagcgtcgattcgatgaccgtgccctgcgccttcttgttggggttggccttcaggtcgagcatctcggcttcgagcagcaccttttcgagcagtttgtcgaggttaaggcccttcttggccgaaacctcctgatcctggtatttaccgccccacgactccaccagatagttcatctgcgagagctgctccttgatgtggtcggggttggcgttgggcttgtcgatcttgttgatggcgaagaccatcggcacacctgcggcctgcgcatggttgatggcctcgatcgtctgcggcatgacgctgtcgtcggccgccacgatgatgatcgcgacgtccgttacggcggcaccgcgggcacgcatggccgtgaaggcttcgtggcccggcgtatcgaggaacgtgatcttctggccgttgagctcgacactgtacgcaccgatgtgctgcgtgatacccccggcctcgccttcgatgacgttggttttgcggatgttgtccagcagcgaggtcttaccgtggtcgacgtgtcccatgaccgtgacgatcggcggacggggcacgaggtcttcctccttgtcttcgccctcgtcgttgatggcctcctggatctcgaccgagacaaattcgaccttgtagccgaactcctcggcgaccacgacgagcgcttcggcgtcgaggcgctggttgatggagaccatcagtcccaggttcatgcaggccgtgatgacctgcgtgggcgacacgttcatcatcgtcgccaactcgctcacggtcacgaactccgtgactttgagggtcgagcgttcctgttcctcgcgttcgaactcttcgttcatacgctcggcaacggcgtcgcgtttatccttgcggtatttggcactcttgcttttggcacccttggccgtcaggcgtgccagggtgtcctttacctgcttcgaaacctcctcgtcgctcacttcggggcgtacgatcggcttgggtgcggccttgcctttgtttttgttgcgacggccttcgcccggtttgggctggttctgggcgccgggacggttttgcccgccctgtccgggacggttctggccgccctggcccccttgtccaccctgcttgttgccgccgccctgcgcattgcccttcggggccttgctgacgtcgactttctccttttgcaggcgcttgcgcttgtgcttgccgccggccacgaatcccgacacgtccatcgtaccgagtacctgcggcccggtgagggtcacggtctccggacggaagatgttgtccttgggtgcggccggttccggcgcgggtgccggagcttctgcgggcttggcgtccggttgcccgggagcctgcgctgcgggtgtcggcgtggccggtgcggcgggtttcgcaggttcagcgggcgcagcctgggcagtctgagcagcaggcgccgcatgcaccggcgttgcgggtgcggcagggcttgcctgcgacggccgggcttccgggcttgcaggcatggccggtgcgggctgtgcggcagccttgggcgccggggcaggtgccggtgctgcgggggccgcaggatgctgtgcggcgggtttttccgcttccgccttcggggcgggtgccggcgcagccttgggtttgggcgacaggtcgatcttgccgaggaacttcggctgctggatttcgtccttgacgctgattacgttgcttttgatgaccacctctttttcctcctcgcgctcctgcttcttagcctcttcgagggtgatggtcgtctgcttcagggagatgcgctcgcggatcgactcgcgtgcattgcctgcggcgcggttcgccccgaactccttctccagaacggcataggtctccgcgtcgaccagcgtattgggtgacccgtcgctcttgatgcccttcttctgcaggaagtccgtgatggtattcagtcccaccttgaactcctttgcaacctgaatgagccttaattttctttcgttacccatatcttgtgttttcctttcttgcttatgttactcttcaaattcggccttcaggatttcgacgaccttctgtgcctgttccagctccaggtcggcacgcgcggcgatctcctctacgggcagttccagcacgctcttggccgtgtcgcagccgacgttcttcagggcgtcgatgatccatccgtcgatctcgtcggcgaattcggtgagggccacgtcctcttcttcgacctcgcggtatacgtcgatgtcataccccgtgagcatcttcgagaggcggatgttcaggccgcccttgccgatggccagcgacacctggtcgggcttgaggtagaccgaagcggtcatcttctcctcgtcgatggtgatgctcgaaatcttggcggggttcagcgcgcgctggatcatcagcgacgggttggccgtgtagttcaccacgtcgatgttctcgttgcgcagctccttgacgatcgagtagatgcgcgaacccttcatgcctacgcatgcgcctaccgggtcgatgcgttcgtcgtaggactccacggcgactttggcgcgctcgcccgggatgcggacgatcttcttgatggtgatcagcccgtcgaagatctcgggaacctcctgctcgaagaggcgttcgaggaactggttggccgtgcgcgaaaggatgatacgcggctggttattgttcatctcgaccgacttgacgatggccttgatggtatcgcccttgcggtagaagtcgttaggaatctgctccgccttgggcaggatcagttcgttctcctcgtcgtcgaggatcagcacctcctttttccacacctggtaaacttcgccggtgacaatctcgccgaccttctccgaatacttctcgtagaggctggccttctccaggtcgaggatgcgcgatgccaggttttggcgcagcgacaacacggtgcggcggccgaacgaggcgagtttgatctcgtcggcatattcgtcgccgatctcgtaggtcgggtcgatggccttgacctccgacacggcgatctgcgtattgggattctcgactgcgccgtcctcgacgacggtgcggttgcgccagatttcgaggtcgcccttctcggggttgatgatgacgtcgaaattctcgtccgtctcgtactgtttctgcagtgcgtggcggaaaacgtcctccagcacaccgatcatcgtgctcttgtcgatgttcttcagctctttgaactcggcaaagttgctgataagattgagattgtccattgtgtcgtttatcttgttttcagtttatgcttgtttttgcctgcggttccccgcagtttgtccgggggtgtccggcgcgagtgcctatttgaaatccagccactcccgcgcggacttgatttcgctgaagccgtaacggcgcgtcaccgtcaccagttgcttgcgttttttgccttcgacggcctgcttctcctcgtaggagagggtgatgccctggtcgtcggccgcgtcgagtttcgccagcaccttgatgcccgaggtgagcagcacctcgaccgtgctgccgaccagcttgcggtactggcgcaggcacttgagctccgacccgatgccggccgaagccaccgtcagcgagaaatcctcctcgtcgcgatccaattcctcctcgatcgagcggctgagcctgacgcaggcgtcgatggccaccgaggtgtcgctgtcgatgagcagctcgatatcgttgccgggcgtgcaggtgcatcccacgacgaacatgtccgtcccctgcaggttgcgctccgccgcctcgattatcttttttgtgtcgatcatagctgaataccggtcgtgaatatgtataaaataaggggactccccgtccccttaccacttgctttgtctttcgacattgcaaatatagtgaaaatttctaatataccaatatttatacggaaattttactcctctttcgatacgctttcatagggcttgatgatgccgcgcttcgattcgcggatgaacctcaccagctcgtcgcgctccttgctttggggaacctgcttctcgacctcctcgcaccccgacatgtagttcaggccgctctggaagaggatgcggcaggcatcgtggatctcgccgatgcgctcgggggtgaagccgcggcgcgagagcccgatcttgttgatgcccgcgaagcgcatcgtgtcgttgcgtacgatgacgaacggaggggcgtcctgccccagcagcgccccgccctggatcatagcgtggttgccgatgcgcgtccactggtgtatggcggcatggccgccgatcaccacccagtcgccgatctcgacctcgccggccagcgacacgcggttggcgatgacgcagttgctgccgaccacgtcgtcgtgggcgatgtggacgtaggccatgagcaggttgtggtcgcccacgaccgtcttgccgcgtgacgccgtgccgcggctgatggtcacatactcgcggatgtcgttgtagtcgccgatctcggccgtcgtgacctcgcctgcgaatttcagatcctgcggcaggcaggagacggaggctgcggtatgtatcctgcatcctttgccgatgcgcgccccgtcgtggatcacggcgccgggcccgatccagcagtcgtcgccgatcaccacgtcgccggcgatataggcgaaaggttctaccgtgacattgtttccgatttttgcgtcgggatggatgtatgccagattgctgatcatcgcttacttgttgtttttgtttttaacgacctgggccatcagtacggcttcgcaggcgagggtttcgcctacaaaggcctttgcctccacgacggccacgccgcggcggatcggctccatgaggtggatttcgaactggagcgtgtcaccggggacgaccttgcgcttgaatttcacgccgtcgatcttcatgaagtaggtcgagtagttctccgggtcgggcacgtcgcccagcaccaggatgccgctgcactgcgccatcgcttcgacgatcagcacgcccggcatgacgggctcttcggggaaatgccccacgaagaagggttcgttcattgtgacgttcttgataccggccacgtccgtcgcgtcgcggtggaagatgcggtcgaccagcaggaacggcggacggtggggcagcatgtggcggatgtcgttgatgtcgtggagcggcggcttgcggcagtcgtactggaaacggggtttttcgccggcccggcggatggtgtgcttgagctgcttcatgaactcggtgttggcgaaatgcccggggcgggtggcccagacgcggcctttgatgcggacgcccagcagtgcgaagtcgcccagcaggtcgagcagcttgtggcgcgccagttcgttgttgcagcgcagttcgaggttgttgaggtagcccgccttgatctcgatgtcgggcttgttgaagatctttttcaggtgttccagctggtcggccgggacagggttttcgaccacgacgatggcgttgtccaggtcgccgcccttgatgaggttcatcttgatgagcggctccagttcgtgcaggaagacgaatgtgcggcagggcgagattttctcggcatagttgtcgcccgggttgaaggtggcgtactggttgccgatgaccttcgagttgtagtccacgtgtaccgagacggaaaactcgtcgtcggggtagaggatgatggccacgcccttctcggggatcgtgtagaccattttttcggtcacgtggtagaatttgcgttcggcgtcctggtcggcgacgcccgcttcggtgatggccttggcataggcgcaggccgaaccgtccatgatgggggtctcgggggcgtcgatgtcgatgacggcgttgtccacgcccagcgtccagagcgccgacatgatgtgttcgatggtgcttacgcggtggccgcccgattcgatggtcgtgccgcgcgaagtgtctacgacgtagtcgcagagtgcggggattatgggttgcccttcgatgtcggtgcggcggaatacgatccccgtgtcgacttcggcgggattgacggtcatggttaccttgacgcccgtatggaggcccttgccggagaatgagagcggggccttcagcgtttgttgttttgttgacataagcagtgtttccgattatttacgcgcaaagataaaaattttttcttaataaaaagtacgtatgcggttattataaaaagtaagggtttatagcgacatcgccgcgggcgggggtggatatttcggaaaaaaacagtatttttgtgcggaaaaaacaggaaacacgccatgccgacgccggaaccggaaaaacgagtcaaacgcccccgcctgcacctgcctttcgagaaacggaagcaggatgccggttcgtggacgtacgaccaccgcatcgggttgtgcgtgacgctcatcgcctacctggtgctgatgatcgccttcgtttcgtcgaagatcgtcgtcggccgcaagccccatacccaggggatgtatatcgacctgcagacgctggccgagctggaacaggagcgcgacaggctggaacggctggcgcgcgaacggcaggagaaagacccgatcgactggcggagcatccagaaccaggtttcgaacgaaaacgcgctgaacgaaaagctcagggacgaccgcggtaccaatgccgcggcgctcaacgatgccgcagctgcggccgaggagcgcatgcgtgccaaccgcgaggcttacgaacaggggctcgccgaggagcgcgccatccgccagcgccgcggcgccggggaggattccgagcaccaggatcgcaaggtcaaggggcgcgtcacggtttccttttcgctgaccgacccggtgcggacgtcccgctacctggccgtcccggcctacaaatgcgaaggcggcggcgaagtggtggtcgagattacggtcaaccgtgcgggcgacgtgacgaacgcccgggtggtcgaaggcggggacgagtgcatgcgctcttcggcgctcggttcggcccgcaggtcgcgtttcaacatcgacgactccgccccggcgcgccagcaagggacgattacgtatatttttatcccccaataagttctttttgccccgcagaggcgtgatgtttgccggattttttttatctttgttgccgatcgaaattcaggcatgcgtaaaatcgcgatcatactgtcgggcttgctgtgttgcctgttctacgaaacgggcggcagggggattcctgcgtccgttgcggagcatgccgccgtcacgatttcggtcgaccgcgcttcccacgaccaatggcgttgcgagcgcgagtacaatgccgacctgaatttgccccgcgcggcgggggaagtatctcctgccccggtcgtgcccgtttcccaacgcggcggatccgaaaccggccagaacgccgaccgttttgcggcgaaccggttcgaggcgggtgtcgtgaaagtaacctcggaattcaaatcttctgacctgtccgtcggcctgcatgccgtagactactacgtctaccgcctgcgccggctcattatttagcgtgttgtattttaccggtttacaaaggaaatacaaacgattaataatgaaaaagatatggataggaataaaatttgcgaggcgatgtacgccttgcccgggggcgttgtggtaaaacgccgtaagtcccagttgcgcgctgccgtgctgttcatcgccggcgttgcgttggtggtagtgaacaatatgtacggggcggagctcacgaacaacatgcgttcggcgatcgttttcatcggcgggctgctgatcctctcggggatggtcatggctgcgatccagctcttcggctcggggggcgtgcccttccacaaggacaagcattgctacctcgttttcgaggagctctacttcgaccggggcgtccgtgccgatgtggtgcagtcggtggaggacggcgccgtagaccggctgctggggctggcacgtgcgaatgtcccggcgctcacggtggccctctaccgtacgcccgacaacagttttgcagccatgcaggcgttcgagtacgccgacctggagtacaagccgctgaccaggctgaacatagtagataaagcataacgtaacataaacggaaaagaatgatagacatcagtggtgaaaatgtagtattggtaggcgcattgctgctcttcgtggcggtgatggccggtaaggtcgcgtatcgtttcggggcccccgcgctgttgctgttcctcggggtgggcatgttgttcggtttgaatttcatctcgtaccgttcggtcgagatgacccagttcgtgggtatgatcgccttgtgtattatcctcttcacgggcggtatggacacgaagttctcggagataaaacccatcatcggcccgggcgtcgtactggctacggtcggtgtggtcatgacggcgttcgtgctggccggtttcgtgtggctggtggctccgtggctggggatcgaaataccgttcgcgctggcactgctgctggcctccacgatgtcctcgaccgactcggcgtcggttttctccatcctgcgaagcaagaaacaggggctcaagcaaaacctgcgcccgctgctggagctggagagcggttcgaacgacccgatggcatacatgatgaccatcctgctcatcagcgtcgtgtcgaatacctcgtccggcgtcggcctgggtatgagcgtagtctttttcgtggtgcagatggtcgtgggcgccctgtccgggtacctgatcgggcggctggccgtatggacgatcaaccgcatcaagctggccaaccattcgctctactcggtgctcctgctcgcattcatcttcttctcgttcgccttcaccgacctgatcaagggcaacggctacctggccgtctacctttcgggtctggttatcggtaaccacaagctccagcagaaacggccgctgacggttttcttcgacgggttcacgtggctcatgcagatcgtgatgttcctcacgctgggcctgttcgtgaacagcaacgaactgctcgaaccccgggtgctgatcctcggcgggctggtcggggcgttcatgatccttgtggcgcgtccgctgacggtcttcgcttgcctgctcccgttccgcaagtttacgaccaaggcacggctttacgtgtcgtgggtcgggttgcgcggcgctgtgcctatcctcttcgccatctatccgctgatggcgcatgtggagaatgccgggctgctgttcaacgtggttttcctggggacgatcatttcgctgctggtgcagggcactacggtgagcggcatggccaacctgctggggctggcctatgaggagcgcgagtcggccttcagcgtcgacatgcatcaggacatgaagtcggcgcttacggaggtcgaggtcaacgagacgatgctcgaaagcgggcatacgctcaaggacatcaccctccccgagaatacgctggtgatgatggtctgccgcgacggcgagtatttcgtgccgcagggtaagacggaactcaagctgggcgacaagctgctggtcatttccgaccgcagcgaggagctggcaaccacctataaggacatgggcatcgacgatgtcatgaagttagggtaggcttcccgcggaggaggttccctgttccgtcgggaattcaggatccgttccgcaaatccttttcagagggacagatatgtccggtatccggtgacttggagcctgccggacagaggcagatcccggcgattcgctcgccgggattttgtttcgctttgccggacgaaaagccggacggcgatttgcaccgtccgggattttttcctatattcgatgtgccgtatcggaggctgccccgatctccgtatccctatgaaaaccgaacgaatgaaaatagcgctgtttgccgcgcagctcgtcttgcccgccgtgccgggcctttatgtcatcctgttccgtcccggggtgtcgctgcttacgccccggatgcttattccctccatgctgtgcatcaacctgctggctctcctcttggggtggcgtaggctcggatggtcgcgcaacgaacggttcgatgcggccatgctgttggtgatgttcgccctgtttccctggctggaataccaggtactgcccgtcggggcgttcgaggggaatttgtgggcgcaggtcgggtgttactgcgcgggacaggcgatcgggtatgtctcggtcgtgctggcgcccgactggttgggaaggctgaggcagcggcggtatgaagagcgggtcttgtcggggcgggaaaagttccgatcccgcaaggaggtgctggagcagcgggccgaagcgcaggaagcgcagcgcagggcgaaggagttgcgcaaggcgaagaaataaaaacatcccggacattcgtagttcgggatgtttgttttcggggcgtatgccggagccgtttccccggctgtcaatctgccaatccatcggtttgtccgtccgtcaactcatcagtccgccggcccgccagtccttcggtctgccagtttgcccgcccgtcagcccattggttcgtctgtctgtctgtctgtctgtctgtccgccggctcattagtctgtaagctcgtcagcccgtcaggccgctgctccgcccgcagggagggcggaatcgcggcctgctgccgttttacagggagcgccggatgttgagcatccaggggttctcgatgttgcggatgcctttctggaagatcagctgcgccagcgtcagccccatctggcggaagtcggtcgagagggtggtgatcccgcccgcgaggatctccttgaggggcgtgtcgttgtacgaaatgatgccgaattcgcggccggccgtcatctgctgccgctcggcctgcttgagcagcgtcaccagatcgcggtcgctgacgaggatgaacaggtcgccttcgcggatttcgcggtcgcggatcgaggcgaggtattcgtgcccgaacccgtgttccgcacagaagcgcaccagtccgtcatagcgctcctgcggctcctttttttcgtgctgcaccatcagcagccgttcgtatttgcggatatgccgcagcccgtggcagagcgcctcgtaggtgtccttttcgaagttttgcgcaacggacgaatacctgcccagcagttcggggtggaagtggtcgagcaggaacacccgccccgagaggctttcgagcagcggcccgatgccggtgaacttgcccggcatgatgatataggtggtgtatttgccgttggcgtcggtcaccagcgcgtcgaagaccctgcggttgtagttgtggaaatagaggtctacgcttacgcctttgccgacgtgctccatgaacgagttgtagaggtcttccttgaattcgttgaattcgttgaagagcaggaaaatattctgttccgaggggattcgcgccgaggcgatgtagtagcccacgccgggcgttgaggcgatgatgccgcgcgatttgagttcgctcagcccggcgaagaccgtgtcgcgcgagaggtggtaattctcgcggaattcgttgatcgagggtatccagtcccccttctggagcttcccttcggcgatgccgtcgatgacgaagttgacgacctgtttgtatttcgattcgttgtttttcatggctttgcacacgcaatgtcgtgcaaatatacataaaatcgggtaatatcggtacgaaccggtacgaaaaataaaaaaaacataccagttcgtaccagtatgatgaaattttgtttatatttgcccgaaagatcgtacagcgcaatggagaaagggatcgttttcagcatcgaggagttcgccatacacgacgggccgggtatccgcaccaccgttttcctgaaagggtgcccgcttcgctgtgcctggtgccacaatcccgagggcatttcccccgagccgcagtatatggatcgccgcgacggccgcacgatgtgcgggtacgcgatctgctcgggggagctggccggcaaactgctgcgcaacaaggcggtatacgccatgaactgcggcggcgtgacgctcacgggcggcgagccgctcctgcaggccgcatttgcggcagaggtgcttgccgcgttgcagtccgcgggggtgcatacggccgtcgagacgagcggctatgccgcgccggaggtgttccgccgggtggcggggcacgccgatctggtgctgttcgacgtgaagcacgccgacccggtgcagcaccgccgctggacaggggtggacaatgcccccatcctgcgcaacctggcatggctgtgcacttcgggccggccgttcgtcgtccgcattccgctgatccccggggtgaacgatacgcgggagaacatgttgcagacctgcctgctgatcaaggatgccccggggctggagcgggtcgagatcctgcgctaccacaagaccgccggggcgaagtacgccatgatcggccggacgtatgcccccggtttcgataccggggcggagccccgtgtccacgacgttttcagcgactacaatcttaaaacactcatacaatgaatcccagaatcgaaaacctgcgcggctatatcctccgcaaagagcaccatgtcctgcgccgtaccccggcccggctcgggctggacaacctcaatatcgggtttgcagcggccggaatgccgcccgtgaggcgctcggcggagatgctcgccgccctgatgcgtgccgaacagcccgtgatcctgccgggcgagaagatcgtcttcacccgcaccgttaccgaagtgcccgaaatcttcaccccgcaggagtgggacgggatcaaggcgtcgcactacatccacgagcgcgggacggtctgcaacatatcgcccgactacgaaaccaccatccgccttgggctcgatgcccggaaggccgaaatcgcttcccgcctggcggacgattcgctcgaccaggaacagcgtatcttcctggggtcggtggcgctctgcatcgaggccgtgcaggagcttacggggcgttacgccgcccatgcccgcgaagcggggcaggcggatacggctcaagtgctcgaggccgtgcgtacgcgcggcgcccggtcgctgcgcgaggcgctgcaactgctgcgcatcctccatttcgcgatctgggaggccggcaattaccacaatacgctggggcgtttcgaccagtacatgtacccctatttccgccatgacatcgacagcggtgtgctgaccgaggaggaggcgttcgacctggtggaagagttcttcctcgcatgcaacaaggacagcgacctctatcccggtatgcagcagggcgacaacggccagagcatggtgctgggcggccgcgccgcaaacggcgactaccttttcaaccgcctctcggagatgtgcctgcgggccagctgcgaactggagctgatcgaccccaagatcaacatccgcgtcgacgcggatacgcccgacgaaatcttcttcctggggtcgcagctcacccgcaaggggctgggattcccgcagtacagcaacgacgacgtgatcgtcccggggctcatgaagaaaggctattcggagcaggacgcccgcaattatgtcgtggccgcctgctgggagttcatcatccccaaccatgcgatggacatccccaacatcgacgccgtgtcgctcatcggctgcgtgcgcgaggtgttgcccgaattggcggcatgtcccgactacgcggcgttttacggcctggtcgagcggaagatcgtcgaaaaggccgacgccatctgccgcaagcaccgcaacctctacatcgtccccgcaccgatgatgtcgctgttgatggacggcaccatagaacgggcgcaggacatttcgctcggctcgcgctacaacaactacggcctgcacggcacgggcattgccacggcggccgactcgctggcggcgctgcgcaaattttacttcgaggagcgccgtttcgacgccccgacgctgctctcggcgctggaggacgacttccgcggcgcacccgaattacaacgcctgttgcgccgggaggctcccaagatggggcaggacgacgactatgccgactccatcgcctgcgacctgctcgcatcgttcgcacgtgcgctcgaagggcgctgcaacgagcggggcggcatctaccgcgccggcaccggtacggccatgtactatgttttccatgccgcaggcctcggtgccacgcccgacggccgcagtgccggggagatgatccccgccaactattcgccgagcctgttcatcgaccagcgcgggcccgtatcggtcatcaaatccttcaccaaaccgcgtctggaggatgtggtcaacggcgggccgctgaccctcgagttcgaccagtcggtcttcaacaacgaggagagcgtccgcaaactgggcatgctcgtcaagacctacatcgccctgggcggccaccagttgcagctcaataccgtcagccgcgaaaagctgctcgacgccaaggtgcatcccgagcggcaccgcaacctgatcgtgcgcgtctggggctggagcggctatttcgtcgaactggacgaatgttaccagaaccatgtgatcaaccggatcgaattcggcctctgaaccgtcgtgaaccgaaactgaaaaccaactaatccgacctgatatgaaaacatccgttaaaggcttcatgttttatgtcgccttcgtcgcgtcgctcggcggccttttgttcggcttcgacacggccgtgatctccggtgccgaaaaggcgatccaggggatttatgcgctctcggacttcgcgcacggcttcacgatcgccacggcgcttatcggcaccatcgtcggcgccctggtctgcggcggcccagccgaacgctacgggcgcctgcgcttgctcaaggcgatcgcgtggctctacctgatctcggccgtgggcagtgccgtgatcgtcaactggtattcgttcatgttcttccgcttcctgggcgggctagccgtcggcgcctcgtcggtcgtggggccgatgtatatcgccgagatctccccgtcgcactggcgcgggcgtttcgtggccttcttccagttcaacatcgtgctgggcatcgtcatcgcctacctgaccaactactggatcgtgggtattccccgcgactggcagtggatgctgggcatcgaggccgtcccggcactggccttcggcctgttgctgatgaccgtgcccgaaagcccccgctggctgcttatccgcagccgtgacgctgaggcgcgccgtgtactcgaacgcaccacgcgcgagaatgtcgaagccgaaatggccgagatccgcgcctcgctcgccggggcgggcgatacgggcgagcggcttttccggaaaaaatatttcatccccatcctgctggcgttcctcatctcgacgttcaaccagctcacggggatcaacgccatcctctactatgcgccgcgcctgttcgagatgtcgggcgtcttccgcgagggggcgatgatgcagtcgatcatgatcggcatcaccaacctcacgttcaccatgctgggcatgttcctcatcgacaaggtggggcggaagaagctcatcggcgtaggtgccgtggggatgttcgtctcgctggtgctcgtggcgcgcgggttctggctcgaacgcttcgaaggttactacatgctcgtctgcctgatgggctacatcgccttcttcgccgtgtcgctgggcgctacgatctgggtggttatttccgaggtcttccccaattcggtgcgtgccaaggggcaggtgctgggcagcatgacccactgggtgtggtcggcgctgctgtcgtggttcttccccgtcttcctttcggtcggcggcacctatatcttcggatttttcgcgcttattgccctcggcagccttatctttgcgataaagctccccgagaccaaggacaaatcgctcgaacagatacagaaagaactggtaaaataaaaacccggacatatgaaccgttccctgaaaaaaattcccctcgcggccttgtgtgccgccatggccgccgcctgtgcgggcggcgcaacggacgccacgatcacggtcgatgcgtcgaaagtcgagggtagcgtcaccccctggctttacggggcttgcatcgaagacgtcaaccacgagatttacggaggcctttacgaccagcggatcttcggcgagagtttcgaggagcccgtgcccaaccccctcttcgacgactgctcggcctacgaaggggagtggcaggttgccggcgacgagctgctctgtgccgcccatgcgggcgccaagctggtctatgacccgctggagatggctgcgggcgaggtcgagaccgaactgaaattcacccgcggcggcggtggcgacaatgccggcctgctggccggggtttcggagccgggcaacggcgccgacaatttccatggctacgagataagccttgcggccgacggccgtaaggtcgtgctgggcaagcataagaacaatttcacgccgatcgccgatgctgccgtgtcgtgcgaccccgcacaatggaacaggctgggattcaagaccgacggccgcacgttgcaggttttcctgaacggggcttgcgtgctccgtgccgaggacgacgatcccgtgctggccaggggcagggtcgccctgcgtacgtggaattccgaggcacggttccgcaacgtgaaggttacggccgacggtgcgtcgcgcaaactcgtgttccgcacgacgccggccgtgcaggtcagccggcagtggggcgccttttcgacgggcggtgccgtggctgcctaccgccacgaagtgggggacgcctataacggcgcctgctcgcagagcgtggaattcgtctccgggacgggaaccgtcggcatcgccaatgccggactgaaccgctggggcattgccgtgcgcaaggggcagacgttcgaagggcgcctctacctgcgcgggtcgggcgatgtggtcgtggcgttgcagagtgccgacggcacgaaggaatatgcctcgcagcgtatcacgggcatcggtgcggcctggaagaaatttccgttcgaactgactgccgccgccgcggacggggatgcccgcttcgccctctacctcgaccgccccggcagggtgcaggccgatcaggtgacgctgatgtccacgggcgaagaccgcttccgcggcctgccgctgcggggtgacatcgggcaggcgatggtcgaccaggggctgaccttcctgcgttacggcggtacgatgatcaacattccgggctaccgcttcaagaagatgatcggcgaccgcgacaagcggccgccctaccacgggcactggtaccgctggtcgaccaacggcttcggcatcgaggatttcctgcaattctgcgagaaggcgggcttcacggcggcctttgcggtcaatatcgaagagacgccccaggatatggccgacatgatcgagtacctgaacggcccggtgacgtcggagtgggggcgccggcgtgccgagaacggccaccccgagccttacggcgtgaaatatatcggcatcggcaacgaggaggtgctcttcaacggcgaccgtgccgacgaatacgaccactatgtcgagcgcttcaacctgctgcacgacgccatcaagggcaaagacccgtcggtgaaactgatttccacggcgtggtggcgtgccgattcgccgagcatggaacggacgttccgtgccttggatggcaaagccgactattgggactaccacccgtgggccgaccagctcgcctgcggccgggaggtcgaggccgaactgcgccgtatgcgcgagctgttcctcaggtggaacccttccaccacgatgaaatgcgccatcttcgaggagaacggcaaccgccacgacatgcagcgcgtgctgggacacgttacgcttcagaacgccgtgcgccgcatgggcgacttcgtgctgacctcctgcgcggccaatgccctgcaaccctaccggcaaaacgacaacggctgggatcaggggcaggttttcttcaccccgtcccaggtgtgggggatgcccccctattatgcgcagcagatggctgcggcacaccaccgtcccctgacggtcggctgcggggtcgagggcgctgatggggtgctcgacgtgacggcaacccgcagccgcgaggcggggagcgtcgtgctccacatcgccaatacgggtgccgagccgctgcgtgtgggcctgcgtgtggacgggatggggaaggtttccgaagcccgcatggtttcgctctcgggcgacctcgacgcggtgaacacccccgaagagccgcgccgcatcgcccctgtcgggcgggaactgccggcccgggctgcgcagactgtcgacatagcgccctactcctatacgatcgtggtgctggatgaataaccctgaaaaaccgaagactatgaatctgaaaagaaccatgctggcggcgctcgtggccgccgtgctgatccccggcgggctttgggcgcgcgggaaaacgggcaatgcccgaatcaaggtcgacatcgaacgccaaaagggcgaaatcaaccggaatatctacggcaacttcgtcgagcacctcggccgctgtatctacggcgggctttacgagcccggatcgcccctttcggacgagaagggctaccgccgggacgtgctcgaagcgacgcgggcgcttcgcacatcgctggtgcgctggccgggcggcaacttcgtctcgggctaccactgggaggacggcatcggcccgcaggccggacgcccgacgcgcatcgacctggcatggggcttccgcgagagcaacgcgttcggcaccgatgagttcgtcgagtggtgccgccgtgccgcgaccgagccctatttctgcgtgaacctcggcacggggacgatggacgaagcccgcaactgggtcgagtactgcaatgtcgagaaaggtacctactggtccgacctgcgccgccgtaacggctacgagaaaccccacaaggtgaaatactgggccctgggcaacgagatggacggccagtggcagatggggcacaagaacgccgaggattacggcaagttcgccctcgagacggccaagctgatgaagtggatcgaccgggacatcaaactcgtcgtggccgggtcgagcgactacaacggcaactggatcgactggaaccgtaccgtgctggagtacctgaagaaccacgccgactacatcgccctgcacaactacgtcgagaaccggagcaacgattattacaagttcatggccacgacgcgcttcgccgagaaggctatccgcatcaccgagggactgatcgccgaggcgatgaccaaggccgaacgcaaggatccgatctacatcgccttcgacgagtacaacgtatggtaccgcgccaagggcgaggagggcaacgaggaggtctacaacctcgaagatgcgctggtggtatcgactttcctcaacatcttcgtccgcaacgcccatgtggtcaagatggccaacatggcgcagctggtcaacgtcatcgccccgatcttctccaccaaggaaggttcgtggtaccagacgatcttctacccgttgcagctcttcgccacgcattgccacggcacgtcgctcgacaccttcgtcgactgtgacacctatgcgctgggcggggagcggatcccttacctcgacgtatcggcggcctatgacaacgaggccggcgaagtgatcgtgaacgtcaccaaccgccaccgggagcaggccatcacgaccgacatcctctgccagacaggacgtttcggcggcaaggcgacggtatacgaggtcaacggccccgacatcaaggccgagaactcgatgacccgtcaggccgtgaaaaccgtgaccaaagaggcacaggcgcggggcgaccggttcacctatgcctttccggcgcactcgttcacgctgatccgcatccccgtcgtaaccgactgacagcaccctgcccggaggcaggcgccgtcggccccgggcgggggctcccgaacccgaataaaatgaaacagaacttattaatcgtattttttatggcaggaatgctttccggatgcggctccgagcggcattcgcaggtctcgcgtgccgccttccgctccacggtggacggcaaggcgaccgacctttacacgttgaggaatgcccgcgggctggagatgacggtgaccaatttcggcggccgcgtcgtcgaattatgggtgcccgaccgcgacggcaatttcgcggacatcgtgctggggcacgacaatctcggcgcttacgtcgatcaaaccggagagcggttcctcggcgccaccatcggccgttacggcaaccgtatcgccgcagggcgctttacgctcgacgggaaggagtatacgctgcctctgaacgacggccccaacagcctgcacggcggtgccaagggcttcgacatggttgtgtgggatgtcgtcgaggtgacgccgcagaagatcgtattggcctgcctctcgcccgacggcgatcagggataccccgggaacctgaaggttacgatgacctacgagctgaccgacgacaacagcttcgtcgttacacacgaggccacgaccgaccgtcgtacggtcgtcaacctcacgcaccactcgttcttcaacctgcacggggcgggcgggccgccgatcaacgatcatgagctgatgatcgcagccgatttcttcacgcccgtcgattcgacgctcatccccaccggccgcctgatgcccgtcgaaggcacgccgatggatttccgccgtccggcaccgatcgggtcgcgcctcgatgccgatttcgaacagctccgcctcggccacggctacgaccacaattgggtgctgtcgcgcaggagcgcccatgacctggaactggcggctacggtctatgaacccgctgcggggcgttatatggaggtttggacgaccgaaccgggcattcagttctacggcggtaatttcttcgacggctccctggtcggcaagggcggcaaatcctacggccgccgcgcttcgctggcgctcgaaacccagcatttccccgacagccccaaccatcccggcttcccctcgacggtgctcggctccggccagcgctaccgccatgtctgtgtctacaagttcagcacccggtaggggatatccataccccccccctgaggtttttggaataggtctgttattattttacatcggaagcactgcggttttgttttccgtcaaacgttcagccgtgcatggtctgcgaggaacttctccagcccgctgttcgtcatcggatgtctgagcaacccttcgattgccgcaagggggcatgtcgccacatcggctcccgcatcgaggcactggataatatgctgcgtatgacggatcgaagcggccagcacctgcgttttgtaaccataggtgcggtagaccttcacgatgtgggctaccaatgccacgccgtcttcggagatgtcgtcgagacgtcccacgaacggagacacgtaggtcgctccggcctttgccgccaacaacgcctgccccacggagaataccagcgtgcagttcgtccggatatccttggcggcaaaatattttacggcccggattcctgcggccgtgcagggcagtttcacgacgatgcggggatgcagcgccgccagcgcctcaccctctcgcaccattccttcgaagtctgtggctatgacctctgcgctcacgtccccttcgacgatgttgcagatttcaacataatgacggttgcagttttccgtaccccggatgttctctttggccatcagcgatgggttggtcgttacgccgtccaggacgcccagttcgtgcgccttgcggatttgttccagattggccgtgtcgataaagaatttcatgattcaggtaatttttatgacttcttaaaaatacgaaaattttgttacggtcgtgtcgtgcaatatcctattttcaaccgtatggctatcctctgtattgaggtactctttttccgcgaaaacagctatggctttccatcattcgcggaaactgtcagggctgtccgcacttttccgcttagggtgctccggaaacagaaacggccggaaaatccgatgtttgctggcagcgacagagtctccgtcgtggataatgaaggagaatgacggtacggtgggcggctacgctttcggaagtttcctcgaagaacattcgggtatgtccccttttctggaaccgatgaagatccgtttcgaaaactgtgggtcgatagtttccggatcttccgggggaaagtcacttccctacaaaaaaaacttcggagagtatcgcctgttataagttatgtggtaatttcagtggtatggatacaagacaggctgcaccgaaatcgggtgcagcctgtttttgcggagggcggttcggatgaaattccccgccgtagccttttcccggcctatttcaggatgacgaacctgttttcatagggtttcagcgccagcgaagtgacgctccggccgtccagcgggtgccctgtcgcatcggccgccgtaaagggcagttcgcgtcccgaggcgtcgagcagggtaagggtgcctgcctgcccgtcggtttcccgcaggttgatcaggatgccctctccgctggccgcgggggtgcatgacgtgatcagcacatggctgcatccgctgcgcaggaatgagtggtcgcgggcgttgccgttggccgcagtggcggccggcattacgcgggtgcagagcgggatgcgtgcactccagccgaactgcgatgcggctgtgttggaggtgtcccgggttgagctgatgacgaatccgcacttgaattccccttcctgcgaagcgcggaaattcgttgtccagtaattgttcatcagccacgggaagacatgcggcttttcataggtgcggggctggcgataagggtcgtcgagcagttttccgagcaggtagagcggtacctcgctgccgcttacgagaatctgggcgtcgtcgttgcgtgccgcgacgaaattctgcacggtgttccacgaggcgctcgtgccggggatctggtcttcgccggaacggactacgccgcccggtacgtcgaacgtgagtttcgcattttccagcagccacggcatggcgacgtagatcgccgaaggatcggtctcggggttgcggatgaaatcgtagccgagctccacgcgtttcacgtcgttatacaggcgtacttcgacctgcacgccgaatttttcgtcgcatccctcggctttgcccgtaaagcggacgctttggtaaatatcgcccgacgttacgcccgggcagtgcacgtcggagagcgaagagcgccggtaattgtcgaatactttgcgttccatttggcggcggtcgccgttgagcgattcatagacgaaagcccccagcttccattccgagtccgggtcgaccatctcccgtcccagctccttgtcgtagagcgaggcgattgtccccgaagccgggtcgaagacgatccggtagaaatcgttttcgaggctgttgtcccggagttccgtgcggcggggtgccgcggccttgccgtcgccgagtacgatttcgaaggtcttgtaacccatggcggggattccttccgcccagatggcgtaatagcgtccttcgcggcgcgagcggatgggctgtacgcgcagggctttcccggctgcatcgacgatccggaactcgcggtcggccgggatcagttcgaagtctatgtagactgtcgtcagttccgagcgttcccagccgagcgggttgaagaacgtgagcgtcgggtgcgtcgagcggtagagggcgccttgtaggcggcctatggcatcttcatagagcagttgggtgcttttgagtgcctcccatacgtaggagcccttttcggcccactgtacctgagaattctcgcatccggggttccagatgctttccgcggccccgaaggtgtgctcgtcgtagaagagcaggttttcgtggatgcggcgcagttcttcgtgtgtcccgccgctctggcctgtcccctccatttgggccatcgagagcatcgcttcgatggcgaccaggtcggattgcgttttgcgtgaggctgccgtctcgcgtgccgccgacccgaacccgtccgtccaccagtcggggtaggcggcccggtatacgggcagcttgtcgccgtactgggagtcgatgcgcccgaggaattcgtgtgccgtggcgctgcgtagcttcggccaggcgtagcgttcgttccatgcgcggatcaggtcgcactcgcgcatcgacgggggcgagttgtcggtcaggtatcccgagtattgcacggcgatgaccgggaacgggtaacccgtgcgtttgaggttgcggatgtacccgaatacgccgtcttccaggcgggccatgtcgcccgtgtggatgccccacgagttcccggtatggtagtggtcgctgcggaacatcagtagccccttgcccgacggggattcccagcggtagagtgtcgggcggtcgaacgggatgagggcgcggtggttgttcgatccgatcgaaaaatatttcacgcccaggtcgggcagatagtccgccaggcaccatgcgatgccgttcacgtcattctgcatggctgtttcgaccggcagccccaattcccggaatcgggccacgggctcgaggaacgtcttgtaattgttctcgcccgacagctcggacatgttgaagaacatggccgtcacctcgatctgccctgccttgacgtacctgatgaatttgtccacctgtgccttgggacgtatgcgcaaccactcgcgtacgggccacgaggcttcgcatgtccagcggaacttcgcgtcgtccgggtagtcggccgtcaggtcgcagtattccacggcatagtcgatatagcgcaggtgctcggtgaggatttcggtctgcggtttggtatagccgatgtccgtgtgcgtgtgctgcaccaggtagacggtgtatttgtccgccggggcgatttccaccgctgccgacagggctttcccgcggttgggatgcacttcgaaatccaccgtgcggccttcgtacccttcgggaatattgacctcgacggtgtttatcccgcgagacagtgtgaccgtcccgcccggtttgccgtcgtagttccatccggcacgctggggcttgccccagttgacgagggtcagcgtcaccgggtgcagcagctccccttcggtgcggccgtaaatcagccccggctgcgagtggcttccgatgagcgcgatgccgtcgccggggcgtgtgcatttcacgctgcggtcggcttcgaggacgatggcgtcccagacgagccagctgccgccggcgttgcggatcgtgaggaggttttccccggcgccgaatgtcccggccggcaatagggcctcgatcgcaaggccgcgtgccgaggtgcgtttggtatccgggtagttgatgtcgtccccggcaggcgcctgcaccgaggtgcggaacccgcctgcggagatttcgatcgtcgggggtgacgaggcctgcgattcgaccaggtagagtgtcagccgcatctccgcccgggaggcttgcgcatcggctccgaagcggatcagcagcgatccgttgccgttgccggcccagccgtcctggggcccgggcaggatgtaggggatttctcccggtgtgctgcgccctacgtcgtacgcggccgccgcgccggggaaccggcccagaaggtcggaatacgcgccgtcgtacaacgcgaactcggcggccgagccgtccttgcggccgatttcccatacgggccggtagggggttgccgacaggctgccccatagcagggccgccagtacggcgaggatggaatgcttgtgtcttttcatatcggaatttttgggttattcggggtcagtccattttacgtcggtcatttttgccacatgcctgccggtcatgtcggtgatctccgagccgacgttgagcgtcagcggccagtaggctttcagcccttcctcagtcccggagaagtcgcatgccacatcggctgcggcctcggcctcggtgcggacgtccgcccagatcgaaacgtgctggatgttgccgcgcatgtagcggttcgagtaggagggggcggtgcccagctgcaggttgcaggtcggctccacgatggccttgccgcacgcgaagctctttaccagccgtccgtccagatagaagtgcatcttgtcgttggccttgtacgtggctgtgatgtggtaccacttgttcagctcgatcgtgcagcaggtgccgcccttccagctcccgtcgttgacgtagaactgcaggttcgcgccgttgttgcggatcatgatggcacccttgccctgctcgcacgagatgacgttctggtcgcccgttgcgaattcgtcgaagcgtattttcatctcccacgtcagctcttccgtgagatcccagtcgcctgcgggcccgaggttcatcttcgacccggcgttgaaataggggattccggccttgacgatgttctcccggaaggtttttatcgcttcttcgagctgtttgcaggcgttccggtagccttcgtcccgcgaggtgttgttcatgatgtaataggcttggtcgatgcgggcctgcaatgccttcttcgatccgggggccgtgtcgccctcttcgatcccttccgtcgactcttcgacgagcgattccgcctggcggatcagcgccatgagtgactggtgcgcttcggaatagtcatcgtcgctgcatgcgcacaataccagtgccgcgcagaggaaggtcgcgaattttttcagtatggttttcatggtcgttttactgcgttaggtgtttaatatccttcgttttgtcccagggttgtccagtcgggcataccgtcgaactgcgtctgcgggatggggcgtacgacgtggtactccttgatgttgtcctttgcatcggggttgtagatcctcacctggtcgatgagcctgccgaagcgtttcaggtcgagccgccgctgccactcgccgaagagctcgcgggcgcgttcctcgaggatgaaatcgagcgtcatgtcctcttcggtgaccttcatggcctcttcgtattcgggcttttcgtggttgacggcgcgtttgcgcagctgggttatgtcctcggcggcacccttcaggtcgcggttctccgtgctccggatacgcgcctcggcacggatcaggtaaagttcgcccagccggatcacagggtagctgcgatccgacagctccgacatgttgcccggccgggtgtggtcgtagaacttggtcatgccgatgaacgtccagcgatcctgcgggatgccgtcggcgtcgaacatgtcgttgcggtcgaataccgtgaaggtcttttccatgcgcttgtgttcctcgacgggcagtacgtcgggacagaggtagagcgccgtgtcgatgtattcgcgccactggttgagcgggaaggccgaacggtcgtcggccgggtcgttgtaataccatacccattggtgcaggtcgctccagcgtttgtcggcgtcgcggtcgaacagatccatgaagtaggtcgaggggatcgcctggcagccgccgtagcccgtccatttgagcatggtctgcacgcccgggaaacggtcgatatacatggcataccatgaccagtagccgttggcctggcggaaggcgtcgtcctcggtgaattccgtcgtccagatgaattcgttgttggtcttgtcgtcggcccacaggtctttgagcgaggggcagagctccagcccgtagtggccgatcacctgcgatgccatgtctgcggcctcgtcccactgttcgttgtaaaggtacatgcgtgcgagcagcgccttggttgcgggcatgtcgatgcgccccgattccgtggtgcgcgtgtcggggaagagcccgatggccgtctcgagtgcgccgatgatctcttcgtagaacttcgcgcggggcgaacggcgggcttcggtgccctcggtctcgtcggttgtcatcggcaggtagctgtcgccccacgtctcggtgacgatccacaggaacagggcccgcatgacatacatctccgctttgaactggctcttttcgtcttcgtcggcaaagggcgtctggtcgatcgtttcgaagaacaggttgatgttgaacagcgccttgtagcagtggttccacagccatgccacattgccgttggtggcgtcgagcccgtagtagtcgcacaggcccacatcgccctggttcttgccgcgcaggtagatgtccgtccccagctcggtcatcagcggccactgtccgtcgccgccgtagaggttgttgatcttggtgtagctctggtataccagcgccttgatgccgttttcctccttgaatatctcggtcgtcgacccgtaggtttcttcttcgaggaagctctggcatccggtcagccctatcgtaagtgccgccgcaaacaggatgaatatctttttcatggtctggttttcggattttaagttagaactggacattcgcgccgaagatatagaacgactcccaccacgagatgccgcccgtgttctggaactggctgtaacgccacggggtgttcatggtcacatagaagcgcgtcttcttcaccacgcgccccatccatgcccggggcagggtgtagccgagcgtgatgttgcggatgtttacgtagctgttcttgtagtagcccgtggcgtcgaggtatttgatcgactgtccttcgaccgggcgtggatgtcggttggaaggtttttcgggtgtccagtagtcgatcttgtaggtgttccagcgtccgagctggttcgcccattcgctcgtgctgcggccgtcgtgggccagcgagccgaactcgccgtatacgtcgaccgagaagtcgatgttcttccactccgcattgatctgcaggccgccgacccagtcggggcgtgtcgtgccgaggatcgtgcggtcgttgccgtcgatcttgccgttgccgtccaggtcggcgaccttgacctcgccgggtttctgtccgtagatcgcagccaggtcggcttcgttttcctgccagatgcctacctgtttgtaattatagtgtacgccgttgaccggatagcctacgaacaggccgttgttgatgtcttccttcatcttgggatcctgcaggcgtaccagctcctccttgttgcggtaatacgagaggttcacccccaggtggaagtccttcgtttccacggggacggtcgagaggcttacctcccagccgcggttgcgggtgtcgccgatgttcgtccacgcccgattgaagcccgaagtatagggcagcaccttgaggtagagcaggtcgtagctcttcgaatcgtaatagtcgatcgtgccgtggatacgtcccttgaggaacccgaagtcgaggccgatgtcgagcatcttgttgcgctcccactccaggtcgggcgtcgggcgggtttcgggctccagccctgggcggtgcagctcaccgccgttgaaattggcgtatttgccgtgcagcgtacctgccgtggcataggccgcgatcgagtaattgcccgtcatgccgtacgaggcgcgcagcttgaggttcgaaatccattccacgtccttgaggaagggctcttccgagatgcgccacgcgatggcccccgaagggaagaaggcccatttgtgccccggcgagagctgcgacgcaccgtcctcgcggaacgacgcggtgatgatgtaccggtcgtcgtaggagtattgcacgcgcccgacgaccgaaaccatctggctgcggacgaagcccgaggacaggcttttcgaatcggtcaggcgccccatgttgtaccacaggtaggcgggcgattcctggtctttgcccgacatcgaggcattgaccgtctggcggttctgcatttcatagacggccgtcaggtcgatgttgtgcctgccgaattgacgtttgtagttgagcacgttgttccagacccagtcggccttgcggttgttgtgcatgaaggccacgttgcgctcgtcggtatacgataccgagcggttgtcgtagtaatagccgcgcgacgagaaggcggggctgtatgcgaagttggtattgaacgtgagccccttcgccaggtcgatctgggcgaagaagcgcaggaagagtttccactcctcggtcttgtccttatatacgtcgtcgctctcgttcatgtaggggttcttcacgaacgggtcgccgaaggggtagacgttgtagctgccgtcctcgttgcgggtctgtgtgagcggggacatgtgcaggaactggttgaacatgtccggcttgtcgttcttgacgatgtagtatgcgcggctcgaaagtccgaccttgaggaacggcaacaccttgtgcgagagatctgcggtcaggtaaaagtggtcgtgccccgcgtttttgtagcggctgtcttcgttcttgtagttgaatgcgattttgtaggcgcttttgtccgttgccgccgaaatggtcagcgagtggcttgtccacaggcgtttcttgttgaaatactttcccatccagtcattgtcgaccttgcccatgttggccagttcgatcccgaaaaacgcctttgcgtcgtcggcttcgctgtgccaggtgcctgccgcgcggctcgcctcgcgctggaatgcgatgtattcgtcggcgtccattacgtcgagcgaaccccggttgttgacgcctgcacccacgaacccgtcgtaggttaccgtcgtcttgccctgtttggcctgtttggtcgtaatcaggataacgccgttggcgccgcgggcgccgtagatggccgtcgaggacgcgtctttcagcacgtcgatcgactcgatgtccccggggttgatcgaggacagcgtttcgtcgtagggaatgccgtcgaggacgatcagcgggtcgttgctggcattgcgcgagcgggtgccgcgtatgcggatcgaacccccgtccatcctaatcccggcgatgccggtcaacgccgtggtgatgttgtaggccggaatacgctcgatacggtctgccgagatcgagctgacggaacctgtgatgtccttgcgtttcatcgtggtatagcccgtcacgacgacatcttccagaccaatcatatcctccgacaggactacgtccaccgaagtgcgtccggctcccaccttgacggtctgcggcagcatgccgaggaacgatatttccagcaagtcgccgtcttccaccccctcgagtgcgtagtgtcccgcgttgtcggtcagcgtgccgcgtgacgatccttttattacgacagaagcgcccgcaacggctgccccgtgcgtgtcctcgacgatgcccgataccgtacgccggatttccccccccctgtattttgggggttgacagttgctgttgcggaactttccgcggccgcatttgccgccgccggcaacatcagggccgacagcaccaggacaaaaccgcctctcataatgcccgatagcctgtgccggggtcgccggccggcatggatgattggatagaaatgttgcatggttcagtagtttaggttagtgtggtttgggttggttgattaatagttgaacatttttaataatgtatgaacattaacgtctactgcaaatttatacatagatttttaaaatacaacttttttcagctctttttttatgataatttgtgaacatccgctgtatttcccttattcggaggatttccggtatctctgtggatagtacctgtttgcctgcatgatttttgccggagccgagtctgcacggttccgaagcgatctccgattccctgtgcccggggctgccgccgtgccggtgtgtgcatcgtgcggccgttgcgggctgtttgtatgtacatgaaatcttctcgatgcgcgatgctgccgcctgcccgacggattgctgcccgcccgccgcccgctttctgccgtgtgctgcccgctgcctgcccggcaggttgccgccgactgccggttcgcgtggcgggcggcgttgtctggcatttctggcattgcggcacccgcattgttcccggctccttcctgctgttcctgcctcttcctgttgctcccggctttttcgcgttgttcccgcccccccctccccgggcggggacgccccgaaaaagtaacggcgcatccgttgtccggatgcgccgccgatggggaatatgcctgccgctattcggggagtttcccggttccccagcgagtgttgggcttgggccccagccatagctcgagcaggccgccgcgtgcgaattcttcgtgcgggaaccagaagttgttgagcacccggccgtttaggcgtgcgcgttggatataacagttcttgtccgaattgccgtaggtgcggatgacgaaccggtcggagcggtcggccgggtaataacgcttgtcgagacggatcgacacctcgtcgaagaccggcgaggtgatctcgtatacggggcgggcagcggccgtgccccgcgtactgaacaacccgatcgacatcagtgcgctcacgccgcccatttgtccctggtcttcgtcgtgcccgccatacccccggtcgggtgtggtgcccccgtaagcctgttcgttcacccggcgaacccagtattgcgtgagccagggtttcccgccccagctgaatacgtgtgcgttggagcatcccggctggttggcgtagctgacgtaaccttgtccgtagccgaacacgaaatcctgcggcgcagcctgctcgaatgcataattgagcttcccgcagaatttgtcataaccgcccatgagcgttgcgagggtcggtagttcgtgcgaaacgccccaggtggcctgccatgcattggcctcgatccagccggtgcccctgagcggatcgtcgtgcagccattggccctgttcgtccttggggaagagcaactgctggtcggggcggtatagcttgcgccatccgtgggatcggttgccgaagtaggcggcctcatcctccagtcccaaacgcacggccatttgtgcgagcgcccaatcctggaagttcgactcgatcgtcatcccggcgtttttcggctggtagccgtgttcgaggtaaaattccccgattccctgcatgccgcccggcatatggttgcgttgcatcgtccggaaagcgtgcatcgggtcgcatttgcgcatcagccctttgttataggccgagacgatgagcggcgtggccggacatccggacatgatgtaggtatatcctccggcgcagggcccccggggaatcagcccgccgttgtcggcatagcggatgagcgaggccgacatttcgtcgggcatttcgggccatcccagcccccacaggacgttgaggttccactgcgtgagccagaaggcgtcggaattatacatgtgatgcacgacgcggcctgccgcatcgcgcgggagcgtgcgggtcttgacccggatgtcgcgcgtgaaggagccggcgcgctggccgtccgtcaggtcggggtattcgccgttcacgtcgtcgatcttgtggcggcccagcaggacatgccacaggtcggtgtagaattttgtccgttgctgctgcgtgccgccttttacctcgatgcgtcccagccattcgttccattcgtcctgtgccgcgcggcgcacggcgtcgaagtcccaggtcgtggcgtcatgcgtgaggttctcccgtgcattttccgtactgacgtacgatacggccgttcggacatggatgcggtcgcccgtacggacgccgtaatgtgccgcgacgcccgatgtgggggagtccaggtaactcagcgcttcgcgcgggtggcgcctggtgatttcggaggagccttcgagcgagtcgattccggaataacggcgtgtgccgacccatccgtcgagtcggtcgaacggccggtcgaaacggacgacgaagtaaaccctgacgttctcggggccgccccagtggcggccgtaggtgtcgaagctgccctctatttcgtgctctccgacccgctgcacgcgggcgttgcacatggtcgtcgacgccagatagccgcccaggttcaggagtatgccggcttcggcgtcgcgggtgaaggtcaggcggtagaaccccgtgcggtcggtggccgtctgctcgacccagatgccgtaatcctccaggaagaggcggtggtaacccggctgggcgatttcgccctcgtgccggaagtgcgatttccagtgcccttcgccgaaagtgggatcgacgttgccggtcgtcggcatgagcgtaagcccggccagcacccagttgtgtatctgcgggaagccgagcacctcggtcgaattgtagttgtagcccccgccgtactggttgcggttgcgggtcagcggtgcggcgccgatcatgccgaacggctggttgcccgtgatgaagaagaaatagcgccccttggtcgtttcgatgaacgggtcgacctgcgagacgaaatcgcctccggcctcggcgggcgggaatgcctcgatctcggagagcccgacatgggaacccacggcgtcgttgacctcgaatttcacccatctgacccgtttgggcgcgaattccacgaccttgggctccccgttgtccgggatcccgactactccgatacgtgtaccgtcgctgaaaaagaggtcgccgcctgccgtatgcgcatcgcccgtcggccggtcgtagaggacgatgcgcgagagggtgacctcctcgtcccagtcgagccggatccaagggtagggtaattgctgccagtagggcatctgcgctgccgatacccattcgcccgcattgtcgaggcggatgtagccgtcgttgactttcgaggcatcgccgtcggcattgagcgacgacgatgccgtggcgcgggctttcggggcgatattgtaggtgccgccgagtgccgggaacgagattcccgccacgcaaaacagggttaacagctcttttttcatcgcgatgtgcttgcgttaaggttcgtattgcatgaatatacgaataatatcgtctcgccggttcctgttccggcccacagcccgggaatatacccgttatttcataaaggccttcacgaccatgatctcgcgccccgaggtgttgacgatccggtaggagcctgccgccgccgaaattaccagcgtttcggcatagctcaggcggaagcggctgccgcccgcggtttcgacctcggcgctttcgccctcgaccaggttcaggacatggcattttccctgcgttgcgacctccaccgaggtgttgagcttgtagcggtgcacgtcgtaggagtggttgcggtgcgtgggcaggtgccatagttcccagtccgcccccttgtcgagcagcgcggggtgcgacaccagttcccgtttcacggcctcgcccttgcggtcgaagcagaggttctccatcgcccggcggatgttcagcgggcgcggtttcccgtcgaggtcgagcgccagccagtcgtacatcttgaatgtgaagatgtaaggcgtggtgctgatctccagcacgaggttgttgcgtcccgagctgtggagcgtgcccggcggtatgaggaacaggtcgtgccgcgccgactgttcggcgttgatgtagcgcggcacgtcgagttccgtgcctttttcgaagctttcggtcagcgcccgttcgaacttcgcagggtcgatatcctctttgaacccgaggtatacgaccgacccgggtgccgtgtcgaggatatagtaggtctcctcctgagtcagtacctcgccgaaattcttgcggatatattcccgctgcgggtggcactggatcgaaaggttgccgccgtcgaagttgtcgaggtagtccatgcggatcgggaattcgtcgccgtatgcgtcgtagcacgcgctgccgacgacctgttcgccgccctggaacatcaccatgtcgaacgacacttcgagcatcttgccgccgctgccgaagatcagcccgttttccggtacgatcagctcgaacgaccatgcgtagttgggcacgtcgtggggcagtgcgccgatgtgttcgcggatccattggcctccccacgccccgggttcgaaccacggccggacgcggaatccgtttgcggcgaggtgctccaggccgcggcgcaggtcggcgccctcggcccaggtgatctccccttcgcgctgcccgtcgacgatgatgccgatgcggggcagcagctccttcttgtggcggttcagtacgacccagtcgacgaaatagaaccgcttgtacatctttttcgggggctcgggctgcgtggcccccaggttggcgatgctgcccgcacgcgagcggaactggatctcgtttttcgggatgtcgatatagaccaactcgccctgccagccggccagcgcggcgcccgttccgatgagtatgttcatctccgcctcggggtcgggtgcgatcgcccgcagtttttccccgtcgaagaactcctccagccgcagcggggtgcggaagccgaagatcgggtcgtcgccgcccagatagggggcgaccaggcgttcgatctcctcctgcggccgcagggccgcgtcgacgctccaccacacggggcggatgcccagctgcgtgagcgcacggttcagctcctgccggaagaggtcgaagcgtacgccgacatagccgtcgacgacaacctgcttctgtccggccagccgccgtgccagcgacgtgtagtcgcagaaaatcttatccggcccgaggtcatgtgtcgggtagatgtcgtattggttttttccggtttccggtttgcataccggaagtgggttctgtgttgttttccttaaaagagacatgactattgtttggttatatgaataacgatgctgcgccgatcagggcggcatggtcgggccgggccgggagccctatcctgatccggtggccgtcggcttcgagccggcgttccatggcgggcccgaacagcgggtaggcccgcgagatattcccgccgagcaccagcatgtcggcgcggaagcgttccgccacgggggctgcgaatgccgccagccgctccccgtattcgtcgaataggcgccgtgccgcggggtcttccgcatggcgttcggcagcttcgcgtgcgccgcttatctcctgcccggtcagctcccggtagcggccgcatacccagcgggtcgagaaggcttcgtcgacgatgcccccttcgaacggcaggcagtatacccagccgttggcgggcacctcgtcgcccgaggtcaccagcctgcggccggccacgaagcccgacccgacgcccgtgccgagcgtcagcgccactacgcgttcggcgccatccgcgaccccgccgaggcattcgcccagcgcgaaggccgccgcgtcgttgacgtagcggaactcctccgtgccgcactcccgcagcagcgggtagagcgtcgccgcgacgtcgagcccgtagatgcgctcgaacttccgcacgccccggatcagcgaaatgccccgctcgtagtcgaacggcccggggaaggcgaagcctgcgcaccggatgcgtccgatgcccgatgccgcggccgtgcgccggatgttcgcggcccaggccccggcgatcgtgcgggccccggccgccgcgtcgactttgtccgtgtgcggttccccgcacagttgccccgtggcgaggtctaccaccgccgagcagacatggctgccgccgatgtccacgcccagggcgtagcgattatgtgccgattgtgccatgacggtatatttttcgtagttatttgttcagccgggtgttgggctccgcggcgaggttcacccgcagcgtgccgccgccgaccacttcggcgaagggaagctgtacgctctgcaagggtttgccgtccagttccagcgaaccgatatagtaattctccggcgtgttgcccgtcgtttcgatcacgaactccttgcccgtgtagtaatcggggttgaggcggatcgtcaccttgtcgaacagggggctgccgatctggaacgtcgggtcgggggcggtgagccccttcgcgtcgaagagccccatcgaggccatgacgtaccatgcccccagctgtccctggtcttcgtcctgcccgtagccgtagccgtggatctcctccgtgccgtagaattcgttgcaaatcgtgcgcatccatttctgcgagagccacggtttgcccgagaagttgaacagcgccgagatgtggaggttcggttggttgccgtggttgtaataggcatggactcccgcaaaggcattgatcgtcttgccgccgccgaagacgctctcgcgtgagatgaggaacgtgctgtcgaggcggttgttgaactcctcgcggccgaccatctcgaccagccggtcgatgtcgtggggcacgtagtaggtgtactgcacggcattgccctcctggaatccggcccatgccgcatgggggtcgaagtcggcgatgaattcgccgctgcgatcccgtggccggatgtacttggtctcggggtcgaaaagcagctcccacccgcccgaaagcttttcgagctgctcgtaatcggcctcatggcccaactggcgggccatctgtgcgacggcataggcgctgaacgagtattcgagcgtatgcgatgccgcgaatcccgagccgtcgggcgtggtctgcatgcccagttcgggcaggtagggcgaatagccctgactgacgaattttcccacgtccagtttgcccgcgccggccgggcggccttcgctgcccagctcgttcttgcgggcggcctggtagcccagcgccacgtcgaagttgcggatgccgcagttgtaggccgcggcaatggcgagccccgtgaagttggtgcctacgcccgagacgtacttgctgcatgcgatgccgtcgccgagccatccggcgtccttgtagaccagcagctggctcgccacccagtcggcatagtattcgggataggcgatgctccacagctgcgtgaggttccagtaggcgccccagatcgcatcggtattgtaatagtcgtgcaccggcctgccagcgccgtcgagcgcaatctgcccgaccgtgccgtcgttggcggggtaggccccgttcacgtcgctggccaggccgcgccccagcagggcgtggaacagccccgtgtagaacttcacgcggtcatcgtgcaggccgccctcgacgcgaagccggcccagcgcctcttcccacgtgtcgttcgcctcgcggcgcacccggtcgaaatctttcctggcggcctccttttcgaggttcagccgcgcgttctccaccgacgtgtacgacaggccgatcttcagccccacctgctgacgctcgcgggtgtcgaaacgcaggtagagccctgctccgacgcctgtgcggctgcgctcccccgcgaaggtttgctcgccgctgaacgcgccccaggccgcaggctcggcgtcgagtacggcgctgaaatacattgtcaccgtggcgcctttctggtaaatgtcgacataggcgggctcggtcaccacccagccctcgatacgtccgtcgtcggtgtaggtcaccgacgcgtcgcgcaccgggccgctttcgcccatgcgcgtcccgatgttgaagatcaggttcgcctcctccgtcgccgggaaggtatagcggtggaatccgacccgttcggtggctgtcagctcggccttgacgccgtaatccttcagcagcacggagtagtagccggggcgcgccacctcgtccttcttgtcgaagcgcgaacggtagcccgcgtcggggttgtcgagcggcccgggtacggtctgaagttcgccgaccgtcggagccaccaccacgccgccgacctggaactcgtggaagttggcgaagccctcgatcgaggtgtggcgtgagtcgtagcccacggcttcccagccgttgggattccccaggtggccgtcggtcgtcggagccagtttggccatgccgaacggtacggccgccggggtgaagaagaaccaccgcgaatgtgcggtgccgatgcgcggggcgacgtagtccgtcagcggctcctgggccgtacatgccgacagacaggccgtcgcggagaagaggatcagtttgtgcaggtgttttttcatcgttgatgtttgccggcggccgttgcggccgcctttgggttatatggttttctgtttaatgtatatacatgaggtgcggggcgtccgtctatttcgcggcgaacctgcgcagggcgagggcgcagcctgccaggtagagcatacaggccgaaatgaccagcagcgaaccggtctggctgcccaggaggtcggtcgtgaagcccatcaggggcgggatgacggcgccgccgcagacccctgtgatcatcagccccgaaatctcgttggctttttccggatggcatttcagcgccgtcgagtagatcaccgagaagatgctcgagcaggcgaagccgatcagtccgaccagcgccagcattcccacggtaccctgtacgaagtagaggacggccatggcggcgatggccgcgaagatgtggatgcggaaataacgcacgtcgttcatgcgcaccagcaggatcgaaccgatcagcgcaccgaccgtgcggcagacgaagtaaacgctcgacccgagtccggcctgctcgacggggtaaccgccgcgttcgatcagcagcttaggcgctacggtattcatccccacgtcgacgccgacgacgaagacgatcccgaggaagaggaggagtaccgtgcggtctttcagcagggcgaacgtcgcaccgacaggcgaggcctgcggcgcttcggcctcttcgcggatgggggtgcacatgagccatgcggccgagagcagcgtgatgagcgcgaagatcgggaagaggtattgccagttgcccagcgtgccggcggcgaatgcggcgatgaaggggccgcagaacgacgagacggccttgacgacctggcctgcggtcagcgaactggtcagcgcgtcccccttgaccacgttggtgagcagcgggttgagcgatacctggaggatcgtattgccgatgcccagcagcacgaatgccgtcatgcacgtggcaaggttgtagtgtacgaacgggatcagcataccgacggccgtgatgccgttgctgatctgtaccatgttcttgcggccgaggcggttcatggcgagggccgccggaatggaaagcagcaggaaccagatgaaaaccatcgaggggatgaatccggcgagggtctcgctgagcccgaaatcttgctggacatagctggtcgagataccgaccacgtcgcagaagcccatgacgaagaaaccgaacaggacgggcagtaatttgtggagtgacttgttcatttgggttgtggtgtttgtcagccgttgatgaattcgatcgagtaggtgaagctgtcggcgcggtaatagccgatgttatattccaccggggtgtcgtttacgtcgagcacgaagcgtttgcggacgaggatcggctccccttcgttgatgtcgagcttttcggccagctccgcgtttgcgctgcgggcatataccatctcgcgcgaggtcttgacgacgatgccgtaattcttccggaggttttcgtagagcgggagcgccatgtcctcttctccggtcatcgggatcgcggggttgaaataggagatgaaatagacgaacggtaggttcgggcgtccgcgcaggcgctccaggcacagcagcctggctccttccggggcattgagaaactcggaagcctcggccggcggcgtcttgcggctgatgtgcagttcgaaattctgcacgaccatgccctgggcatgcatctcctgcgaaaagctcatccagttgcgggcgttgctcatcacgttctggggcgccacggtcgtcccgtacccttttttacggacgagtaacccttcgaataccagacggttgatggcctgccggagggtgttgcgcgaaatattcagttctttcgaaagctccacctcgttgggaagcagtttgcctttgcggtactcttcctgctggatcatctgtcgcagcagatcctcggcctgctggtgcagcggtttcgaagagttcgggtcgagttgtaatttcatgtcgttcgggcttttgtgttatccccggattatagccgtgccgggatcggcgtatagcatggcgcgtagggcggtttgctgcgggcatcggcgcaggcctttcccgggggggctttcccctgagtcattcctgaggggaatctttaccctgttcgacccgctatgttcacttttgtgtcttgtatatgttcttatatttgtcaatatgttcatgcaaataaacgtaaaatatccgaattgtcaaaatctatgttcccgataatgtcggtacagggcggatatttttttcaaaagcctcgttcgttgcctgtcattgtcctgtattactggtgattgcgttttttgcggccgattgccgttttttttgcccgggccgagcctgcccgcggttttgtccgtatccggatggtgccgcgcccagtctgcgcccggtcgctgcaggatgatagagggggatatttgtggatgcaggggacggattccgataaaaaaataaggatggacttatgtccatccttaccggggttgtggagaataccagggtcgaactggtgacctcttgcatgccatgcaagcgctctagccaactgagctaatcccccgttgtgggtgcaaagataacggaaattttttttatttccaaatagcggccggaaaaaatcgaccgcaggattaccattgctgccgttcggaagggggggtagggcggggcgtccggtatcgtttttttgtccgccatgcggattataaggctgtttccgcattttcgcaagcatctccgctgtccggggggctttcgtaccggcaggcggggggcatactggaggccgccgggcaatccttcctccggggtgccgtttgtttgtcccgccccaaggaaaaagccggcgcttcgagcgccggctttcccgtatgccgggatgcctcccggatcagtgtcgtgcctgttaagttattcgatctcccacgtggcgcccgaatgcagcagctcgtccaccgagcggatcttgctctgtgccttgacctcctcgacctgccgagccacctcgcggtcgtaaaccgtggcgtcctcgacggcgcggatcacgcccagggcaacggggtattcgggatatttcatcgccgccagcatcgagtgcagcgtcgtgtcgcgctcgtgggcgtcgtgcgtcagcacatcgtccagcgtgtagccgtcctggccgacggtcacgaccttgagcttcatgtcctcgaagacgagtcccttctccatgttggctccgaacagcattttcccgccgtggcgcagcgtgatcgtacgttcggcgcgcgtagccttgtcggcggcgaatgcggcgtgggtcttgtcgttgaaaatcacgcagttttgcagtacttcgatcaccgacatgcctttgtgcatcgcagcggccaccatgcactccttcgaaagctgcacctccatgtcgaccgagcgggcgaagaacgtgcctttggcgccgatcaccagttcgccggggttgaacggcttttcgaccgtgccgtagggcgaggtcttggtgatcttgcccagcttcgaggtgggggagtactgccccttggtgaggccgtagatctcgttgttgaagagtatgacgttcaggtcgacattgcggcggatggcgtgtatgaagtggttgccgccgatggccagcgagtcgccgtcgcccgtggtgacccagacgctgaggcgcgggttggcgaccttgacgcccgtggccacggcgttggcgcggccgtgcaccgaatggaacccgtaggtcttcatgtaatagatgaaccgcgacgagcagccgatgcccgacacgaacgtgaaaaggttgtgcggcgtgtcggtcgcgtcggcgatctcgggcagcgcgcgctgtacagcgctgaggatggcgtggtcgccgcatccggggcaccagcgtacctcctggtcgcttttgaaatccgcgggggtgtatttgtattctgccatggcgttatttcaataaggattcgaatttttggcaaagctctgcaaccgtgaagggcaggccctcgcacttgttgtactgttcgtagcggaactcctgcaaactctggcgcagatagttggcgaactgcccttcgttcagctcgcagacgacgatcttgcggaatttcgagaatatctcgcgtacgccgtgcggcagcgggttgatgtagttgaaatggcacagcgaaacgcgcttgccttcggcgcgcatctggtcgacggcgttttgcaggtgtccgcgcgtacctccccagccgaccaccagcaggtcgccttccggggcgccccatacggcctgtgccgggatgtcgtcgacggctttcgccaccttttcggcgcgggtgcgcaccatcttctggtggttcgacgggtcgtgcgagatacaaccctttacgcagtccttttcaaggccgccgacacgatgttccagtcccgtcttgccagggaatgcccagccgcgggccaggttttcgttgcgcacgtagggcatgaaaccgccttcgggggcctcgtccacgatcggcggggtgatggcagggtagtccttcatcgcagggatgcgccacggctccgagccgttggcgatgaacccgtcggtcagcaggatcacgggggtcatatgctccatggccaggcgcccggcctcgaatgcgtagtggaagcagtcgctgggcgacgatgccgccacgacgatcacggggcactcgccgttgcggccgtagagcgcctgcgccagatcgctctgctcggtcttggtcggaagtcccgtcgaggggccgccgcgctgtacgtcgaccaccaccagcggcaactcggtcatcacggccagtcccagcgcctcgctcttgagcgacaggccggggcccgaggtggtcgtcacggcgaagttgcctgcgaaggccgcgccgatggcggtgcagatgcccgcgatttcgtcttcggcctggacggtcttcaccccgaggtctttgcgcttggccagctcttcgaggattacggtggccggggtgatcgggtacgagccgcagaagagcggcagcccggccttttcggccgcggcgcacagaccccatgccgtggcgacgttaccgctgatcgagcggtaggtgcctttttcgagcggtgcgggcgctacggtgtaggtgtttgcgaactggtgcgtattggctgcgtagtcgtaccccgcccggatggccagcttgttggcttcggctatggcggggttcttctttgcgaatttggtttcgatatatttgattgcgtacgcttccggcctgtcgaacaggtagaagcagatgcccagtgcgaacatgtttttgcacttggttacggccttgttgtcgaggccggtctcccggagcacttcgcgcgtcatcgaggtgatgtcgggaatgacgacgttgtactcgtcgagttgcaactcggcgatggggtcgagcgtggcgaagcacgcctttttgaggtggtcttcggtgatcgaatcgccgtcgatgatgaccgtcgcacccggtttgagccatttgcggttggccttgagcgctgcggggttcatcgccaccagcacgtcgcagtagtcgccggggttgagctcccggtggctgccgaagtgaacctggaatccagatacgcccgccacggtaccctgtggcgcgcggatttcggcagggtagtcggggaaggtcgagatcccgttcccgagcagtgccgaggtgtctgagaaaagcgtgcccgtaagctgcatgccgtcgcccgagtcgcctgaaaagcggatcacgacatcctgcaactcccgtacattggttttgtccatgtcttgtttcggattagtagggttttgaaaacaatatcacaaatatataaatttattgtcagattgttcacggcggatgacttttttgcggctctaatccggcggttttttctctttgtgcctccgtattgctgataatcctgctttcggaggctcgttttgcgttttatttgttaccggatttgtgaatttggttgcgatttgatagcggccttattattaaaattttttgcgaatgctgcttccggattgtaagtgctgctccggatttttcgctgtaatttgccttcttccgttcttcctgctgttgcttccgccgctgttcccgtcttgccccgccgctgtttctgtcgttgttctttctgctgtttcggctgctcctgcgctgttcccgtgcagctcctgtgccaggcgcgcaacccggattgggggctatgcgaaaggccgctgcaagattgcgttgcagcggcctcgttgccggaacctgtttgttatgccgtatccggccgggaaatcctgcagggatagtggcccggaaaatcttgcgggggtgcctgtccggcgtattttacatgggcgcccgtgatccccgcgtggctcggttgccggggcggcaggctcggacgtttaccgggtacggtttcggacgtagacgagtttcagctctccgttttccgacggacgctcttcgatttcgactattttcgaaagggattttaccagcagcgacagtttcttgtacccgtaattgcgggggtcgaagtccggcatcttcttggtgagcaccccgcccacgatgccgaggaaggcccagccgctgtcgtcggcggcgtcttcgatcgtgtttgcgagcagtgttttgaaatcctcgtcgatcggacgaatgatcggctggggctgtgccgtatccggagccggggcggccttcttctccgcagcggcgggttctgcgggggctgcctccgcagcaacgtgttccgcgacggctgcttccggcatgtctgtttcgggtgcattgcgcccctgatgttttttcgcggtttttttcggcgtcgcagctttggctgccggcacagctgccgctgtttgtgccggtgccgttaccggagccggggcgggtgcgggtgcgggtgcgggtgcgggctgcccgagtatctcgacatagatgaatttgtcgcacgatttgatgaacggcttgggggtcttcttctccccgaaaccgagtacttcccgtcccgattcgcggatgcggctcgccaggcgggtgtagtcgctgtcgctcgacacgatgcagaatccgttgaccgactctttgtgcaggatgtccatcgcgtcgattatcagcgccgaatccgtcgcgttcttgcctgtcgtgtaggcgtattgctggatcggggtgatcgaattctcgagcagcacgcttttccatgccgcgaatttcgggtctgtgaaatcgccgtagatacgcttgatcgtcggcgtgccgtagttggcgatttcgtcgagtatgtccttgattttccggtgcgagatgttgtcggcgtcgatcagcaccgcgaattttttatcggatagttccatgtcgggcggttttattttccgaaagataggaaattttttcggaatcagggtgccggttcatcttctttcgcggcaggttcccggctgcgggttccgcccttcgcgcttcagctgtgccgtttttgcagtacaatgtccggcagcgggtttgcggcggacatcggagcgctgccgccgggacagtttcccgggagagacgggcgggcgccccgttctgagtcgcttcgctgcggcctgctcgctgcggcagccgcagggcattgcccgcattgcatgataaaggcgcaagcaggcgtgcgcgttcgtcgtgcctgcttccgcctctgtttcggggcttgtccgcccctgtccgggccgctaccggatcgagttcatcctgatgctggccttgaccagcgcgattgcccttatgcggttgatcgccacgtccttgtctgcgtggtgcgggttctggctcacgagtttcacatacccctcgcggtcggatttctgaatgtatttcaccgtcacgtactcctcgccgtcgatgtcgatcgacagcagatacatgtcgccccagaagatatcgttgatgtcgcccagctgtttgtagagtacgatgtcgccgcttttgagtagcgggtacatcgaatcccctacgatatatatggcgccgtcgcatttgggcaggttgggaatgtggatgaaattcacgggtttggcctgcgcctggtcggcgaacagcggtaccagccccgccgtgccctcgatcgagtagaggggcacgctctgcaacggcagcgaattgtccgtgcggtgcatgtaagctgtcaggtcgggttcggcgttgaacatgttgcccttgccgctttcgagccattcgggatttacgttcaattcctgaaccaggatgttccggttgcgtgccgagagccccgccttgccggtctcgatcatcgagagcgccgccttgccgatgccaagccgctgtgccagttgttcttgcgtcatccccaactgtttccgtatcagttttacccgttcgttcatagcttttaatcggaaaattttatattaaaaaattgaatattttatttggaaattcaatatttgaacttatctttgtcctgcaaagttaaacaatttatttctgcctgcaaatttatttgcaaaaatcttgctaattatcaactatgtattcggtttcacctgaactttaccatgaggcggcggcacggttgtcggacgccatcgacggcgggaactatttttcgggttcgctcgcgttccgcttcggcgatacggactgccgcctcacggcgtcggtcatcgtctaccgcggccgcctttcgctgcccgaaggggtgcagcaccctgttacggatctcgtgcccgtctggtgggaattccacaccacgcaagccgggggcgaagtgctcaacgacttcgacttctccgagctgaagcgctgcgtgtaatccgcttcatccgttccggccatccctccgggcccggcgcagccgccggaacggcattttcttccgaacctcccgccgcggcgccgcgcatagggttcaaaaatcaaaccaatgtctgttaaaaccgatccggcctctgcggaaattccttccgcagaggttttcgtacctgccgccatcttcgatcccgatttctccgaccttcgcgccgcgcccggccagcccgtttccagcgtccagtctgtactctcaggccagcccgtcacacccggccttccagctgtgcccgtccggcctgtttcccccgcccaaggtgccattgccggccggcccgccgtgcccgggtacggggcggtctgcacggatggagccgggccgtccggggctcttccctccgccgcgggtgtgcccccttcgttcggcgcattcgcgctggcggtctatcccttcctcgagctgcaacccttccaccgggcgtattaccgtgtgctggaggcttttgccgccgggcgcatccggcgtctgatcgtcaccatgcctccccagcacggcaagagcgtcggcgcgacgacactgcttccggcctacgtgctggggcttgatcccgacctgcgcgttgcgatcgcctcctattccggggcgctggcttcgaaattcaaccgccgcgtgcagcgcatcatcgaatcgcgcgaatatgccgcgttcttccccgccacgaccatcaaacaggggacgaaaccgcccggttatatccgtacggccgacgaagtggaggtcatcggccgccgcggcgggctgctctccgtcgggcgcgaaggctcgctcacgggtaaccgtgtcgactgcttcatcctcgacgacctctacaaggatgccctcgaagccaattcgcccatcgtccgcgccaattgctgggagtggtatacctcggtcgtgcggacgcgcatgcacaacgcctcgcgcgaactgatcgtcttcacacgctggcacgaagaagaccttatcggtacgctcgccgcgcgtgaacccgtcgtcgaattcactcgctgggcgcagctcgacgggctgtcccccgacacgtggctgcatctgaatttcgaggcgctgaaaacctcgccgcctaccgaggtcgacccccgtgtcccgggcgaggcgctgtgggaggggcagcaggggcgtgcgttgctcgaagccaaacggcggctcgacccgctgcaattcgaaagtatgtaccaggggcatccctcgtcccgcgagggtttgctctacgggctgaacttcgccgagtacgaccagctgccgcacgagatcgtccgccgcgccaactataccgatacggccgatacgggcgacgactacctctgttcgctctcgtatgcagtcgatgccgacggggtggtctacatcaccgatgccgtctattcgcgtgaaccgatggaggtcaccgagccgttcgtggccgggatgctcctgcgctccgatacgcggcaggcggccgtcgaaagcaataacggcggccgcggttttgcacgctcgctgcaggctttggcaccctccgtgcgcatcgaatggttccaccagggcgccaacaaggaggcgcgcatcctctccaattcggccacggcgctgcacctcgtgcgctttccccggggctggaacctgcgctggccggagctatacgcccacctgacgacctaccgccgccggttccgcgccaaccgctggcacgatgccgccgacgtggtgaccggtatcgtcgagcgcgaagcccccggccgcaaccgcgcccgggtgagaggtgtccggttcctgtaggcaggggttgggtttttgcggcctaaaagtaatatttgaaaccgaccgtcgggctgattccgagctggaaagagatcccgttcacacccgttcccgaatacgacagatagctatagtccaatgtcaggagaccgatcgacaatccgatatgggacgacggcctgatttcgaacgctccgagcgacaaccctgcatcgaagccgtatccgctggtgccgtccgtcgatgcgaacgcgaatcccacggccagctgcggcgtgtagtagaagcggtcgcatagtctgacgtaacaggcaagactggggcctgccgtcagcccgtgcgtcgtttcgccgttggtcgaaatcagttggtatccgatcgagccgccgatacgcagcttgtcggatgcgaaataaccgaattcgggcgcaaatccgaatgtcgtctgcgatgcggaggagccgtcaatgctgatcgacgtcgtcgttattccgattattccgccgacatatttgtctcccttgctttgggcggagaggggcggaatacatagcattagggccaaaaccggaaagagaagttttttcatacttgtcgatttgaaggttagtggttttgtggtgtttgcggttctaagttagaaaaaaaagcaaaatccgcgttttttttgctgtaaaaaaagtcgtttcgcacttctggacgaccgcccgaccggaactcctcgccccgaaaagactgccgttgcggctgcgcaatgtgaagcctgcgttaaattatcttcccgtgcggaaccaatcgccccgatttttcgtacctttggctccatggttatttagtttgcactaatcccaatttaatatgaaagcattgaaaatcggaaatttgctcgctcccgtccccatcgtgcagggcggtatgggcgtaggcatatcgctcgcagggctggcttcggccgttgccgaccagggcggcatcggcgtcatttcgtcggccggcctgggagtgatttacaaagactattcgaaagattaccgtacggcctcgatctgggggctgaaacaggaactgaaaaaggcccgcgaggccacgaaaggcatcgtcggcgtgaacgtcatggtcgccatgtccaatttcgccgacatggtcagaaccgccatcgccgagaaggcggacatcatcttctcgggcgccgggctgccgctcaacctgccgtcgttccttaccgaaggagccaaaaccaaactggcacccatcgtatcgtcggcgcgcgccgcgaaactgctgtgccggaaatggtttgccgagtataagtacattcccgacgccatcgtggtcgaaggccccaaggcgggcggccacctcggctataaggaggagcagcttgtcgacgagcattatgcactcgagagcatcgttcccgaaatcgtcgccgaagtacatgcgttcgaggccgagcacggctgccatatccccgtcattgccggcggcggtatctataccggcgaggacatctaccgcatcatgtcgctgggcgccgagggtgtgcagatgggcacccgcttcgtcacgaccgaggagtgcgacgccgacccggcgttcaagcagagctacctcgatgccacgcagcaggatatcgagatcatcaagagccccgtgggtatgccggggcgggccatccacagctcgttcctcgaccgggtgaaggagggcctgaaacgcccccgaaactgcccgttcgactgcattaagacgtgcgacgtgacgcacagcccctactgcatcatgctggcgctctacaacgccttcaaggggaaattgcagaacggctatgccttctgcggcgccaacgcatggcgggccgaaaagatccagtcggtacgcgacctgatggcttcgctcaaggccgagtacgacaatttttcgctgaagggaaaactcttcggcgtaaaataatccggtctccggaaaatccggggatgcccgaaggaaaaaaggctcccgacctcgaaaggtcgggagcctttgtgttgtcccgaactggccggatgctgtcccggaatacccgggagcgattccgaatcgatcgttgccgtcccgaaataaccgcgggcggcctccctgcgcagtgctgaggcttccgggcggctattgctttttctcgaaatgctggtagtccttcaggcttttccagtggccgccccaggtgaatccgtggcgcaggaactcccggcagcaggggtcgtcctcggcgatcttgtaggggaaatcccgcttccgttcggcataaggggcagcttccgcgggggcgacgaccgtgcggccgccgttcgttttgacataagggctgtagagcgggttgatgtcgacggccatgccccggctgtggttggagagcactccggttcccgcgatgaaccggaagttgaatgccgaagagttgttggcccgtatcgaagggccgtcctgcgcgtcgtattcgtcgatcagcaccatgcgttcgatggggtaggctgcgtcgtagagcgcccggaagatttccagcaggtcgccgcttatggcctcgttgcagaccagttcgcccagcagggtttcgcctgcgaggttgcggtgcagcccccgcaggtagcggagctccgagcgggggccggtgcagtccggcttgtaggatttgccgtacatgcgcgcgaagagtgcgtcgccgatctccgaactggcgaaacagcggtcgatgccgtattccgccaccgcttcttccgtgaccttttccccggcgcgccatgcgcgaagccgctccgcatcgccgtcgccggcgtatgcactgccgatccccgccaggagcagcacgaatgccgcgagccgtttcatcttcccggccgcattacagctcttcgagccgtgccacgggcgacacgtcgagcgacgagaaatcgccgtgctggtagtggtagtagcctgccatggcgatcatcgcggcgttgtcggtcgtgaacttgaattccggcaggaacgtgcgccagccgcgcttgaggccctgctcgacgatgccgttgcgcagtcccgagttggccgatacgcccccggcgatggcgatgtcgcgtatgcccgtgtctttcgacgcccgtaccagtttgtcgagcagtatctccacgatcgtgccctgaagcgacgcgcagaggtcggccttgttacgctcgatgaaatcggggtctccggccacggcgtcgcgcagcatgtagaggaacgaggtcttgagccccgagaacgaatagtcgtagccgtcgacatgggggtgtgccaggcggaacgccttggggttgccctcctttgccaggcggtcgatcaccgggccgccggggtagggcaggcccatgactttggcgcatttgtcgaacgcttcgcctgcggcgtcgtcgatcgtcgtgccgatgatctccatatcgagcggcgaatccacgcgtacgatctgcgtatgcccgccgctgaccagcaggcagaggaacgggaagccgggatggggcaattcgcggtcgggcaggtcgatgaagtgcgagaggatatgcccctgcaggtggttgacctcgaccatcgggatgtcgtgcgccaccgagagccctttggcgaacgataccccgacgagcagcgaacccagcagcccggggccgcgcgtgaaggcgatggcgtctatctccgcgacggtaagcccggcctctcggagtgccgtgtcgaccaccgggatgatgttctgctggtgtgcccgcgaagccagttcggggatcacgccgccgtattttatgtgcacggcctgggaggcgatcacgttcgacagcagcaggttgttgcggatcacggcagccgacgtatcgtcgcacgaggattcgatgccgagaattgtaatatccatccggttattcgttttttttaactattttagttaaatttgcaggttataacgacctatcaatgcgcaaaggtataaaaatattgggaaaggtgttctcggtagcggttttgttgctgataattctgcccatggtgctctcgttgctgctcgatatccccgccgtgcagaattacgtggtacagaaagccgtgcgcatcgtgtctaagacgctcgagaccaccgtgagcatcgaccgcgtggacatcgggcttttcagcaaggtcaaggtcaagggcttctacgtcgaggattaccagcgcgacacgctgctctacgtcggcaagatagacgcttacatcacggggctgggcattttcggcggcggggtggtgttcagccgcggcgagatcagcggggcgaagctctacctgcgcgagacccccgagggggagatgaacatcaagcagatcgtcaaccgcatcagcgaccccgacaagcccaggaagggcaatttccgcctgtcgctgcgcaaggcttccatcgaaggcatggatctctgtctggagcggctcacgaggcgcgatcccgaattcggcatcgacttcggccacatgcacctctacggcatcacggcgcacgtcagcgacttcaccatcgacgggcagtcgatctataccaccatcgaggccatgtcggcacgtgagcgcagcggcttcgtgctcgaccatttctcggggcgtttctacctgaccaacggtgcgctgggcttcgaggatacctccgtcgtcacgccccgttcgaacgtcgacatcccctacatttcgctcgtcggcgattcgtgggccggctacaaggatttcctgggcgaggtgcgcatcgacggcaagctgcgcaacagcaccgtctccacggacgacatcgcctatttcgccccgcggctccgcgggtggcataccgttttcagcaatatcgacatcgatgtcgcgggcgtcgtctccgacttcacgggcaaggtcaggagcctacaggtgggccaggggacgtggttcacggccgacgccgcgatcaaggggctgcccgacatccgcgcgacgcatttcgacctgacgattccgcgcctgacctccacggccgaatccatcgacgccctggctgcgggcatcggcggccgtgcgctctccgacaagctggtcgcgatcctcgggaattcgggcgacatcgacgtcagcgcccgtttccgcgggctgctctcgtcgttcgacatgcaggtgggtgccaagaccgacgtgggcggcatcgactgcaacctgcagctgagccccttgcgcgacgggcgcagcagcgtcaagggcgatgtggccgcgcgcaacctcaggctgggcgaactactcggccgccgcgacctgctgggcaacgccacgctcacggctttcgtcgacggcgtcgtcgggcgggggttcaccgacgccaatgtcgtgggcaatgtcacgcagctgggcttcaacggctatgtctacgattcgctgcgcctcgacgggcggcttcgcaaccgcgagttcgacggccgtatcacggcacgcgaccccaacctcgatttcgatttcctcggcatggtcgacttcaacgactcggtgccccgttacgactttacgatggatctgcgccgtgccgacctggcccggctgcatgtcaaccgccgcgactcggtctcggaactttcggcgcatatcgtcgccaaggccggcggccgctcgctcgatgacctgaacggccgcatccgggtcaccgacgtcctctaccgctataacgacaagcagctcacgtcgaagagcatgaccgtcacgggcgagaactcggcccggagcaagttggtcgaactgcgctcggactttgccgacgccacgttccgcagcaagaccagctaccgcgaggtcttccgttacctgcgtgcgagtgcctggaaatacctccccctgttgcggcacggcgacgaggagtcggggccccgcgcatcggggatggccgtggccaacgacttttcgctcctctcggtcgacgtccgccatatcgacccgatcgccgacgccatctcgcccggcctgcaggtggccgacggctcgtcgctgcaactgcttttcaaccccgcgagcgaccagctttcgctcaaggcgacttcggaatatatcgaacgcaagcgtatgctggccacgcggctcaacgtcaacgcttcgaaccggggcgactcgctcacggtctacgcttcggccgaagacctctatgcgggtatgctccatctgccggagctttcgctcacgggcggcgccaagcaggggcgcgtgcagctctcggcaggcttcaacgatacgctgcgcaaggtatccggactggtgggcgtccgggccgacgtcgtcgacgagcacgggcccaacggccgcgtcgtcgacctgcgcatcctgccgtcgcacatcacccgcggctcgaagacctggcagattttcgcccacaagatacagcttgacacggcgcaggtcgtgatcgacaagttcttcgtgatgaaccgcgagcaggaacttctgctggacggtatcgcttcgcgcagccgcgaggattcggtgacgctgcgcctgcgcaatttcgacctcgcgcccttcacgcaggtcatcgaacgcatgggttacgtcttcgaagggcgtaccaatggttccgcgacgatgaaatcggcgctccatgcgggcgagatcacggctgacatcctgctcgacagccttcaggtcaacgacatacccgcaccgccgctgcgcctcacctcgcgctgggatttcctgcgcaaccgtgcgggcgttaccgtcaccgaccgccataagcgcgatacgctggtgcggggcttctacgctccgtcgcaggtgcgctactatgcccgtctggatgtcgacagcctcgacatggggctgctcgacccgatcctcacgggcgtcatttccgatacccgggggcacgcctccgccgacctggtgctccaggggcagcgccgcgaggccgacctcacgggcgaaatccgcgtcacggggctgtcgacgcgcgtcgatttcacacaggtgccctacaccatgccccgggcggtgctgagcgtcaagggcaaccgcttccgggcttcgaacgtcccgatattcgatcccgagggcaacgaggggcgcttcgacatcgacctgagcctgcaacacctctcgaacatcgcctacgacgtacgcgtcgcaccccggcagatgatggtgctcaacaccaccccgcaggacaacgactctttctacggcaaggtctacgccacgggctccgcccgcatttcgggcgacaaggggctcgtgaagatggatatcgccgccacgaccgacgaccgttcgtcgttcttcatgccgttgtccagcaagtccaatatatcgagcgccgacttcgtgaccttcagggaaccggccagggtcgatacggtcgacaacctcgcccgcaagaagatgatgttcgaacgcaagcggcagcagaagtccgatgccggcagccggatggatatctcgctggcactgaacgtgcggccgggcgtcgaggtcgaactcaccgtctcgggcaacacgctccgggcgcgcggcgacggtacgctcaacatgcagatcaacctccgttccaacgtcttcgagatgtacggcgactataccatcaccgaggggagcttcctcttctcgctgcagaacatcatcaacaagaagttcgtcatcgaggatggctccacaatccagtggacgggctcgccgatggatgccatgctcaacatcaacgccatctacaagctcaaggcgtcgttgcagcccctgttgcagggtacgtccgacaacctcgcggctgaccgttcggtgcccgtggagtgcgtcatccacctcggcgagcggctttccaacccggccgtcaccttcgacgtgcatgtccccggcaccgaccccgagacgcagaccgtgatcgccaatgccctcaccacgcccgagacggtcgatacgcagttcgcctacctgttgctgttcaacagcttcatgggcgagaacagctcgtcgtcgtcgaacatcggcacctcggtctcggccgccacgggtctggaattcgtgtcgaacatggtgagcaacctgctctcgaacgacgactacaacatcgtcatccgctaccgtcccaagtcggaactgaccagcgacgaagtggacttcggcctttcgaagagcctgatcaacaaccgcttgttcgtcgaggtcgagggcaactacctgatcgacaacaagcaggccgtgaacagttcgatgtccaacttcatgggcgaggcgtacatcacctacctgatcgaccgtgccgggacgctcaaggccaaggccttcacgcagaccatcgaccgtttcgacgagaaccagggtctgcaggagaccggcatcggtatctatttcaaggaggatttcaataatttccgcgacctgaggcggcgtatcagggagcgcttcaccaacaagaaacgcaaggcgcggcgcgaagcccggcggcaggccgcccgcgaggaaaaggagcggatgcggcagccggcggatacgcttccggtcctgcggcccgttatggataagaaggacgaaaacaaatgaacggcagaaaaagaactcgaatcaaacaataacaatttttctttaaactatgatgacatttttgcaggctgccgaggcggtggccaccagtgaagaaacccgcatgggactttggaaactgttttcgatgggcggctggctgatgtggccgctgctggcgctgggcggcgtgacgatcttcatcttcgtcgagcgcttcatggccatccgcaaggcgtcggtgctggacatgaacttcatgaaccgcatccgcgactacatttccgacggcaagatccatacggccgtgaacctgtgcaagaagaccgacacgccgatcgcccgcatgatcgagaagggcatcgagcgcatcggccgcccgatgagcgacgtgcagaccgccatcgagaatgtcgccaacctcgaagtctcgaagctcgaaaacggccttcccttcctggcgacgatcgccggcggcgccccgatgatcggtttcctcggtacggtgctcggtatggtgcagaccttcatggacatggccgctgcgggcggcacggtcgacctgagcctgctggccagcggcatgtacgtggcgatggtcaccacggtcggcggtcttatcgtcggtatcccggcctatttcggctacaactacctcgtggcacgcatcgagaagctggtattccagatggaggccaactcgatcgccttcatggacatcctgaatcaacccgttcaaaaataacgcgctatggcaatcaaacacggatcgaaagtcgataaatccttctcggcatcgtcgatgaccgacctgatgttcctgctgctgctgttcctgctgatcgctacgacgctgatcaaccccaatgccctgaagctgatgcttcccaagagctccaaccagctcaaggacaaggcgatgaccacggtgtcgattcaggatacggggcacggtaagtaccgctactatgtcgaattgcaggacgtgggttcggtcgagggcgtggaacgggcgctcaagtcgcgcctcgacggtcagaaagacgcaaccgtgtcgcttcattgcgacaaatcggtcgccgtcgacgaagtcgtcaaggtgatgaacgtagccaaggacaacaattacaaactcattctggcgacctcgccgaattaaaggccctatgtactattacgacccgaacggcaagtcgccccgcaggtgggcggcgatcgcggtggcagcctatgtgctgctgatcgccgcttcgttcgcattggtctcgttcgatttccggaagatccacgacaaacccggcgatacgatcctggtcgatttcaccgaaccgcctgcccccgagcgccccaagccgcccgtgaaggcggctaccgagccccgcgtgcatgacaaggccgcccccgtggaacagaccgcgcaggtggcgggcaaggacgagacgacgcagacgcccaaccccaaagcgctgttcaagatgaacaagggcggggccgacgaacccgacaatgcgggcaacccccgcgcgcctcagggcgaggacaaggcgagcggcgacggcccggggctgaatcccgacgggctcgaccagctcgaccaggggcttcagggacgcggccttgtgggcaacctgcccaaaccttcgtatcccggttcgaagagcgggaaagtcgtcatccgcgttacggtggacgccaagggcaaggtgacgggcgcttcctacgaaccgaaaggctcgacgaccgatgccgccgagcttgtcgaggcggcgaagagcgcggcgctgaaggcccgcttcacggagagccgcgccacgctgcagggcgggacgatcacttatgttttccgtatggagtaatttttgaaacgagcgtatacatgcgaaccttattactgacaatcctcgggtgcctggccttcacggcgggacatgccggggcggcggcgcaaaacccggctccggaaacggccggggcgcagcaggacgcgaaggcgcggggggcgcaccttcgcatggaggtcgccggccacgatttcggcgacgtaccccgcaagggcggcgacctggtgcgggaatttacctttaccaacgacggcacggcgccgctcgtggtgacgcgcgtcatcacgtcgtgctcgtgcctcaaggcgtcgttccccaaacgtcccgtaccgcccggcggacagggcgtgatccgcatcacctacgaaccccacaagagcgaaccgggcgtgttcaacaaggtgatccaggtctattcgaactccgtggacggacgcgatgtcatcaccgtgcagggcaattcgatcgacaccccgccgcgcaagataaagaccgacaaagtgaaagtgaaatacaaataatatggacatcctgtttaccaacgcaacgatcctaccgatgacggcggccggggacgaacccagaaccttcacgggggctgtgggcgtcgcgggcaaccgcatcgcgctcgtcactgcgtcgggctccgaagccgacgcgttccgcacctgcagtcccggcgtgcgggtcatcgactgcacgggccggctcctgatgccgggccttgtgaatacgcattgccatgcggccatgacgctgcaacgcagctatgccgacgacatcgccctgatggagtggctcaacgactatatatggcctttcgaggcgcgccagacggccgacgacgtggcgctgggcatgacgctcggcatcgtcgagatgctcctgggcggcgtcacctcgttcgtggacatgtattaccacgagaaccgctgcgtggaggtcgcccggcggctgggcatccgcgcgatgctgggctgcaactatttcgacaacaatgtcgacgaggtgctgcccgaggcggagaaggccgttgcgctggctgctgactgcgaccgcatacagattgccctcgcaccccattcgccctataccgtgtcgcccgaaaacctgcggcgcggcaaggagctggcccgcaaatgggggctgcatttcatgacccatatcgccgagacgcgggacgaggtgcgtatcgtgcgcgaaaaatacgccgcgacacccgtcgagcacctcgatgcgctgggtatgctcgacgacaagaccatcggcgcacactgcatccatgtcaccgacagcgacatccgcacgctggcccggcggggcgtggccgtgtcgcacaacccgcagagcaacatgaaaatttcgagcggcgtggctcccgtcgagaagatgcgggccgcgggtgcgctggtgaccatcggcaccgacggcacctgctcgaacaacgacctcgacatgttcgaggagctgcgcacggcggccttcctgcaaaaatccgccacgggcgatcccgtggcactcccggcctacgagacgctgaaactggctacggtcaacggcgcccgcgccatgggctatgcggagggtgagctgggcgtcatccgtcccggggcgctggccgacctgatcgtcgtcgacctgcagaaaccccacttgcagccgatccacgacctggtttctaacctggtctattgcggcaaggcgtctgatgtcgacaccgtgatggtcgacggctgcatcgtggtcgaaaaccgccgtgtcgccggtgtcgacctgccgaagctgtatgccgacgtcgccgcggccgtggaacgcataaccgggagataagggaatgccgggaaaaattcgattcggcatggtcggcaccgggttcatcgccgactgggtgctggccggggcgcggcaggacgcgcgcttcgaggccgtggcgatctgttcgcgtacgcaggagagggccgacgccttcgctgcgaagcacggcatcccgcacaccttcacctcgctcgggcagatggcggcaagcccgctcgtcgacgccgtttacatcgccacgcccaatttcctgcacgcttcgcagagcatcctctgcatgcgccacggcaagcacgtgctgtgcgagaagcccctggcctccaatgcccgcgaggcgcggcagatggtcgccgtcgcccgcgaatgcggcgtcacgctcatggaggccatgatctcgacgctcaaccccaatttccgcgtcgtgcaggagtacctgccccggctcgggacgatccgccgctatttcgccagcttctgccagtactcctcgcgctacgacaagttccggcaggggatcgtgctcaacgcctttaaccccgaactgtcgaacggcgccatgatggacatcggggtctataccgtctatccgatggtcgcgctgttcgggcgtccactggaggtcgaagcgcagggcatcgtcctctcttcgggtgccgacgggcagggcgccgtcaatttccgctacgaggggatgaatgccacggtgttctactccaagatcgccaattcgtcgcttccgtccgagatccaaggcgaggagggcaacctgttgctggacgccatccacaccatccgcgacgtggcgtaccttccgcgcccggcggccgcttcggggcggggcgacgcccccgtccgccacagcgtcggactccctctggagagggatccctattattacgaggtcgcggagttcatcgacctcatcgaacagggacggatagaatccgccgtcaacagccatgaaaactccctcgtgacgatggagatcatcgaccaggtgcgccgccagctgggcgtgtcctatcccgccgataggttgccgtagaggtgtagcgcttgtccgtccgggaacctttctccccggccggcggcctcctttcccggccgaccaacgctgttgcgcgccccaagcccgccatttgcggccgacaaacactgttgccctgcccggaatgcgcctttcccggccgacaaactgcctcaggccgggagcgttgcggcccgaaagcccgcctctttgccggcaaccgcggttgtgtgacccggagcctgccctttccggccggtaagggtcgtccctgcccgaggataaaacagcaggcctgtccccgcatgggacaggcctgctgtttgtcgtctccggctggttttcgtcggtgcggaggacgcacccgccgctattttttccgcaggtaaaccgtggccgtgcgcgaggtgttgtagatgcggatatggggccgttcggtgttgtcgccgtcgcgtgccgggaacgagaaatgctcggcgtccatcgcctgccgctgctgccctccgaaacgccgctcgtcggtcgagagcacgggcacatacttgcccggcgcctgcacgggcagttcgtagtcggggatcgaggccgtggggtgccagttgaacacgaacagcaggttgccgtgcgagaaaaccatcgtcttgttgcactcgtccatcgcgaggttccaggcatagccgtcctcgagtaccttgtaatgcttcaccagctttatcatcgccttgtcgaaatcccccagccacgagtagcgcaggaacccgttcttcgccagcgaccattgccgccgggcgtgggcgtagctccagccgttgccttcgcgcgggaagtcgatccactcggggtgcccgaactcgttgcccatgaagttgaggtaggcctgcccgcccgtcgagatggtcatcaggcggatcatcttgtgcagcgccatgccgcggtcgatcacgatactctccgacgcgcgatccatgtggtagtacatctccttgtccatcagccggaatgccagcgtcttgtcgcccaccagcgcctggtcgtgcgattcggcataggccacggttttcacttcgggcaggcggttggtcatgacgttccacatttcccatatgttccactcctcgtcgggcacctccttcagctccttgatccagaagtcggggatcgccatccccagccggtagtcgaacccgatgccgccgtcggcgatggggaggcacatgcccggcattccgctcacgtcctcggcgatggtcacggccgccggccggaagtcgtgcaccaggcggttggcgagcgtcaggtaggtcagcgcgtcgcggttgaccccttcgtcgaagaagcgttcgcggcagtcgaagtcgacataaccgtggtggtggtagatcattgacgtcacgccgtcgaagcggtagccgtcgaaatggaactcgtcgagccaatacttgacgttcgacagcaggaaatgctgtacctcgtccttgccgtagtcgaagagcttcgagtcccagtagggctggtagccggccttgccgggcagcgagtacagatggtcggtgccgtccagttcgtcgatgccttcgttgaggttgcggacatagtgggcatgcaccagatccatgatgaccgccagccccagctcgtgggcgcggcgcaccagctccttcagctcctcgggcgtgccgcagcgcgatgcgggtgcgaagaaactcgacacgtggtagccgaacgacccgtaataggggtgctcggcgatggccatgagctgcacggcgttgtagccgtccttttttattataggtagtattttttccgtgaattcgcggtaggtgcccacgccctccttctcctgcgccatgcccacatgggcctcgtagatcatgaggctgccgttcttcgaggcgtcgaacgcgtcgccccgccagtcgaacggctccggcgcccagaactgggccgtgtaattcttcgtcgcctcgtcctgtaccacgcgcgtggcataggccgggatgcggtctttccagccgttgtcgccgtggacgtggagcttgtagagcgacccgtggcggagccggtcgcggtacatcgcctccgggaagaaggcgctccatacgccgtgcgcgtcgcgctgcatacgtatctcggtacgctgccagttgttgaaatccccgaagacgtagacgtcgtgcgcgcccggcagccattcgcgcagccaccatccgtcgagcagctcgtcccgctgccagccgaaatagcggtagccgttggcgtagtcgacgatcgagcctgcagcctgctcgatcgcgtttattttgtccgtataccgttcgtagcggcggttgagctcctgctcggcggggagcagccactcgtcgcgttctacgatcgggagcctgcgggtcgttttttccatagcggttttccttttatacaaatatatgaattttttttctatctttgtccaagactaaaaaacagcaccttattaaaaaaattactaaaaccaaaatcaacttatgaaaggacaacccaaaggactgatcgcggcggcccttgccaatatgggcgagcgtttcggtttctacatcatgatggctatcctgaccttgttcatctccgccaagttcggcctgaacgaaacgaccgcggggtatatctattcgggattctatgcttcgatttacctgttggcgctcgtcggcggtatcattgccgacaaaacccgcaactacaagggaaccatcatgtgggggctcgtggtgatgtcgctgggctacctgattatcgccatccccacgccgacgcccgtgtccagcctgccgctctacctgacgctgacgtgcgtgggcctgctggtgatagccttcggcaacggccttttcaagggcaatctccaggcgctcgtggggcagatgtacgacaacaaggagttcagcgccaagcgtgagtcgggtttccagattttctacatgttcattaacatcgggggcttcttcgcgccgttcgtcgccatcggcgtgcgcaactggtggctcaaggtcaacaatttcgactataacgccaagctgcccgagttgtgccacgaataccttgccaagggcgagcacatggccggcgaggggcttgccaacctcacgtcgtacgccaattcggcctacctcgacggcacgcccgtgtcggctgccggcctgcacgatttctgcaacggctacctcgatgtcttcaaccgcggtttccactatgcgttcatcgcggccatcgtgatgatgctcgtgtcgctggtcatctacctgtccaacaagcagcgcttccccgacccgtcgaagaaagccgcggccggcggtgtcaaggcttcggccgaggagatcaccatgtcggcgcaggagatccgccagcgcatctacgcactgttcgccgtgttcggcgtcgtgatcttcttctgggtttcgttccaccagaacggctattcgctgacctatttcgcacgtgactacgtcaacctcgacgtcatcaacatcaacctgggcttcacgaccatcaagggcgccgagattttccagagcgtcaaccccttcttcgtcgtgaccctcacgccgctgatcatgtggttcttcggttggctgcgcaaacgcaacatcgaggtttcgaccccgatgaagatcgccatcggtatgggtatcgccgccacggcctacctcttcctgatgttcttctcgttcgcactgcccgacaaggccgctcttgcaggtatgaaggccgaccaggtgcagtcgatcctggtgaccccgtgggtcatggtgggcctctatttcattcttaccgtcgccgagctcttcatctcgcccctcgggctggcattcgtatcgaaggtggcacccccgcatatgcagggccttatgcagggcttttggctggctgctacagccgtgggcaatgcgttgctgttcgtcggcggatggctctacatgcacaccccgatgtgggctacgtggtgtgtcttcgtcgcggcctgcggcatgtcgatgctcgtcatgctctcgatggttcgctggctcgaacgggtgacgaaataacctcgtgttatattcctttatggccgctgcggtttgtccgcagcggctttttttgttttttcgcaaggcgggagcgaggacgtgggtgcccggtgcgactctcgatggtatgcgttccctgctgcgcccgtgatccggcaggtatgtcctgctgtgcatgccccggcacccgtagtgcgctgccccccccccggtctgtctcgcccggtctgcgttccggctgtgttccaggcgcttctggggatactgtccctatcggccagaacggaggcgggacacctcgctcattgtttgtctttactgctttgttcgccgttcggtgtgttatttgctgatgaaacggaagaaaatagaaaacttttttggtttcataagttttctttctatatttgcctccggatccgaaatatttgaatgcaatgacccctcctcagaaagaacgcattatcgaccaggccatgcatatgtttgtctcgcagggcatcaagtcggtacgaatggacgacatcgcgcagcagctcggggtgtcgaagcggacgctctacgagatgttcggcgacaaggaaggcctgctctacctggccatggaacgctattccgaacgtaaccgccagcggtggaacgaactcacggccgatgcgcacgacgttctcgaagccatgttcatggtgctgggcgaagtgatggacaacgccgaggtttcgcgccgcatgatggacaacctccggaagttttatcccgccgtacacgacaaactgatgcgcgaggggatggtgaaaaaccgcacgagcctgcgttcgatgctcgaacagggcatcgaggccgggctgttcgtcaataatttcaacatcgacctctcgatttcggtgctttattatacggcttcggccattgtgacgcgccgcgagctgatgctgcccgacgggatgtccgagcgcgaggctttcgtgcagatcatcagcaattttttccgcggcatttcgaccgctaagggcctgcagctgatcgacgacaacctgaagcggtacagactgtcgaaaacgggaaataaattgaatttggatagatgactatgaaaaaattgattctgacattgtgccttgcggcaacgggtacgttcgctgccgtggcgcagatgcgcctcacgctcgaccaggccctcgacctggcgctgagcgagaaccctaccgtcaaggtcgccgagatggaggtgcagcgctacgactatgtgaaacgccagacatggggcggcctgctgccgcaggtgtcggtgaccgggcaggtcaaccacagcttcatcgtgcagcagatgtccaagggcttctcgctgggcaacgacccctatacgacgctcagcggggccgtggatgcttcggtgccgctcttcgcgccgcaggtttaccgcatgatgaagatgaacgacaagcagatggccacggccgtcgaagcggcgcgttcgtcgcgcatcacgctgacggccgaagtcaaaaaggccttctacaacatcctgctcgccgagcagtcgctcgacgtgctccgcgagtcggaggccaccgtacaacgtacggtcgacgatacgcaggtgcagtaccagaacggcctgacctcggaatacgacctgctgacggcgcaggtgcagctcagcaacctgaaaccctcgatcctccagaccgagaactcgatccgcatcgccaagctgatgctcaagatgtacctttcgatccccgagcaggtcgatatcgaggtcgaaggcgaactggacgccatgcgcgacaaggtgctcgccggaaccgaggggcttacgaccgacacttcggacaactccgacctgcgcacgctcgaactgcaggaggatctgctccgcctccagctcaaggccgagaatgcgagccgcctgccgaccatcggggcgttcggcaacttcaccctcaccgggaacaacatgggctcggtgtcgttcgaccaggcgacgatggaaatgacgacgatcaaggacggctatttctggcagaacccgctttccgccggcatccgcgtctccgtgccgctcttttcggggctgacgaagatgaaccgctcgcgcgagatcaagaaccagatttcgcagatcggcctccagcggacatacgcccggcagcaggtcgacgtgcaggttcgctcggcgctgaacgacctgctgacggcgcgcgagacgatgtacgcccaggaactcaccgtcgagcaggcgcgcaaggcctactcgatctccgacacccgttaccgtgcgggggcgggtacgatcctcgagctcaacagcgcccagctggcgcagacgcaggcgcagctcaactactcgcaggcgatcttcgattacctgacggccaaggccgagtacgaccgcatcgtcggcaaggaaaaatagcgtggaaattgaaaaacaaagatagcatatgaagaaaacagcagttatattgtttgccgcggctgccctcgccggctgcaaaggcaaaaacggggcaggcgacgtgcagcaggacaaccgtgtgctgactaaaaccgaaacggcggagtccgccaccgtgcagcttaccgaggagttcacttcggagatcgagcccttcagggagaacgacatcactccggcggcttcgggcgtgcacatcgaccgcatcctggtcgaagtgggcgaccccgtgcgcgaggggcagctcatcgtgacgctcgatccgacgcagtacacccagcagctcgtgcagctgaagaccgtcgaggacgattacaaccgcctgctgcccgtctatgaggccggcggtatctcggcgcagcagatccagcaggccaaggcgcagctggacgtgcagcgcgaggtggtcgccaacctcaagaagaacatcgaggtgcgttcgcccatcacaggcgtggtcacggcgcgcaactacgagtcgggcgacctcttctcggcgcagcccatcctgcacatcatgcagatcgacccgctgaaggtcatcgccaatatttccgagcagtatttccccaacgtgaaggtcgggatgcccgtcgagctgaaggtggacatcttccccgaccagacctttacgggtaccgtgtcgctgatctatccggcgctcgaccccacgacccgtacgttcaaggtcgaggtgaaggtgcccaatgcccggcgcacgctgcgcccgggtatgtacgcccgcacgatcttcaacatggggcagaaggagggcgtcatggtgcccgacgtggccgtccagaagcaggtcggcactgccgagcgcttcgtgtatgtcatcgagggcgatagcgttgcccgtcgccgccgtgtcgatgtcggacgccaggtcggcgaccgcgtggacattctttcgggcgtaggggcggacgaagccgtggccatcacggccctttcgaagctctgcgacggtgccaaagtggaaatcaaacaggaataaaacgccccgaaacatatgaaaatatacgaaagcgcggttcggaaaccggtctccacggtgctcatgttcgtcggcgtgatggtcttcgggctcttctcgctgatgaacctcgcggtagaccagtaccccgaaatcgaaatcccccagatatcggtcatcaccttctatcccggtgccaacgctgcggatatcgagaccaacatcacgcgtatcctggaggataacctcaatacggtgagcaacctcaagaaactgacctccaagtcgcaggacaacgtgtcgatgatcattgtcgaattcgagtacggatccgacctgaccgagggcgccaacgagatccgtgacgtggtgagccgcagccagtcgcagttgcccgacgacatcgattatcctacgatcttcaagttctcgacctcgatgatccccgtgatcatgcttgccgtgacggccgacgagagctacccggccctgaagaagatcctcgacgataaattcgtcaacgtcctgaaccgtgtcgacggcgtgggtgccgtgacggtcatgggcgcccccgagcgcgaggtgcaggtcaatgtcgacccggccaagctcgaagcctacaatctgaccgtcgagcagctggggcagatcatcgccgccgagaacgtcaacatcccgagcggtacgatcgacatcggcaacaacacgttcaacatcaaggccgacggcgaattcaagctgagcgacgagatgcgcaaggtcgtggtttccaatgccggggggcgcacggtgatgctctccgacgtggccgagatccgcgatacgctcgaaaaggccacgatggacgaacgcgccaacgggcagcggagcgtgcgcgtgatgatccagaagcagtcgggtgccaacaccgtggacatcgtccatgagattcagaagcgcctgcccgacatccaggcgagccttccgcgcgacgtgaagatggagacgatcttcgaggggtcgcaggaaatcaccaatgccatcgggtcgctctcggaaacgatcatgtacgcctttatcttcgtggtgctggtggtgatggccttcctcgggcggtggagggcgacgctcatcatctgtatgacgatccccgtgtcgctgatctgctcgttcatctacctcttcgccacgggctcgacgctcaatatcatctcgctttcgtcgctctcgattgccatcggtatggtcgtcgacgatgccatcgtggtgctggagaacatcacgacgcacatcgagcgggggtcgaaccccaaggaggccgccatctacgccaccaacgaggtgtggctgtcggtcattgccaccacgctcgtggtcgttgccgtgttcctgccgctgacgatggtgccgggcatggcgggtatcctcttccgcgagctgggctggatcgtgaccatcgtggtctgcgtttcgactacggcagccatttcgctgaccccgatgatgtccgcctacctcttgaaactcgagggcggcgtgcacgattacaaggggctgggtgtcatatacaaacccatcgaccgggcactcgcatggctcgacgacgcctatgcctgctcgctgaactgggtggtgcgccaccgccgtatcacgatcttctcgatgatggggcttttcctggtttcgctggggctcgtcacgcaggtgccgaccgaattcttcccgccttcggataacggctggatttcggccacggtcaaactggagcagaacctctcggtggactacaccgcgcggatcgcccgccagatcgacagcatcatctacaagaactatcccgaggtgacgctcgtgtcggcctcgtcgggcgccaactcgtcggacgacgcgttcgctgcgatgcagaccaccggttcgcacatcatcaattacaacctcagcctgcccacctccgacaagcgcgagcggtcgatctacgttatctccgacctgctgcgcaaggaactggatcgcatccccgaggtgcgggaatattcggtgatgcccggcggcgataacggcagcatgagcggttcggcgacggtcgacatcaaggttttcggctacgacatggacgtgaccaacgccgttgccaacgacctgaaggaaaagctgggcggcctggagggtacgcgagacgtgcagctttcgcgcgacgacctgcgtcccgaactcaacgtggtcttcgaccgcgaccgccttgcctattacggcatgaacagcgctacggcgtcgcaggccgtgcgcaaccgcatcgacggcctcgtggcctcgaaatatcgcgaggacggcgacgaatatgacatcgtggtgcgctatgccgaaccgttccgcatgtcgctcggggacgtggagaacatcacgctttacaacgggcaggggcgccccgtgaaactcaaggaggtcggccgcgtgcaggaggagtatgccgcgccgatgatcgagcgcgagaaccgccagcgtgtgatcacggtcaagtcgtcgctcggagccggcgtcgccctgggcgacgtggtggccgaggtcgatcaactcatcgccgggtatcccgtgcccgacggcgtcgacctcgaaatcggcggtacggtcgaagaccagggcgacgccttcagcgacctgggcgtgctgttcatcctgatcgtcatcctggtctacatcgtgatggccacgcagttcgaatcgctgctcttcccgttcatcatcatgttcaccatcccgttcgccgccacgggcgttttcctggctttgtggatgacctccacgccgatgtcgctcattgccctgatcggcgccatcatgctggtgggcatcgtgaccaagaacggtatcgtgatggtcgactacatgaacctgctagtcgagcgtggctcgggtgtcttcgatgccgtgatcgccggcggaaagagccgtctgcgccctgtgctcatgacttcgttcacgaccatcctgggtatgttgccgctggcgatcggcacgggtgtcgggtcggagacgtggcagcccatgggcatcgccgtgatcggcggcctcacgttctcgaccctgctgacgctgttcatcatcccggcgctctactcggtattcgtcaaccgctcgcagcgcaaggagaaggagaaacttgcccgcctggccgccgaacaccaggccagccggcattaaaccgtttatcccgcctgtccggttgttaccgtaccgggcaggcgggatataaaaccccaataccgttatgaaagcagtattcttatcatacaaccaggcgctcaccgaccgtgtgaacgccatcctcgacgagcagggcgtccgcggcttcacgcgctgggcgctgaccgagggacgcgggtcggtcgacggagaaccccattacggcacgcatgcctggccgtcgatgaacgcttcgctcatggccatcgtcgacgacgaaaaggtcgcgccgctgatggaggctttccgggagatggacgccgctaccaagatgcagggctcgcgtgccttcgtctggaatatcgagcagacattctgagttttcccgggttccggtactttggattttcccgggctccggggtaagggtgcgggtttcccggtgtttccgggtacgccgggcggatgcgccgggactttccggaacgttccgggagttttccccgcttgtcttctccggttttgcagacagcctgcggcttggggacggtggtgacagctccggactttgctgctgccgtgccggtgcaccgcggcagattctttggcgtgcccgtacgcagtcgccctatttttactatctttgcctgcatgaaactcacctttctgggaacgggcacctcgcagggcgtccctgtcatcgggtgccgctgcaaggtctgcacctcggccgacaggcgtgacaaccgcctgcgcacttcggccatggtcgaggcgtgcggcgtgcgtatggtcattgacgccggccccgatttccgctgccaaatgctccgcacgggcatccgccacctcgacgccatcctcctcacgcacgaacataaagaccatatcggcgggctggacgacgtgcgggccttcaactttgtcgattacccgccgctggtgcacaaggtcgacatctatgccgcaccccataccatcggcgtcgtgcgcaaggatttcgactatgccttcgcgcaggataagtaccgcggcgtgcccgaaatcgagttgcatgagatcgacgtcacccggccgttccgggtcggggggctggaggtcgtccccgtatcgggacaccattccgaccgtttcgccgttacgggctaccgtatcggcaggctggcctacctgaccgatttcaagaccatcggggatgccgaggtcgaaaaactccggggcgtcgaggtgctcgtcgtcaacgcgctccgctttacggagcattattcccatttcaacgtggccgaggcccttgcgctcatcgcccgcgtcgccccgcgcgaggcctacctcacgcacatgtcccacgacatcggcctgcatgccgtgacggagccgacgctcccccgcggcgtacacatggcctacgatacgttgcagcttgaaataaacgattgatatgaaagatttaaaaaataaggtcgtcatcgtgacgggtgcttcgtcgggtatcggcgaggcgatggcacgcgagttcgccgcacagggcgcccgcgtggtgctgggcgcgcgcagcgtgcagaaattacagcttatcgcgggcgacatccgctcccggggcgggcaggccgcctattgcggcgtcgatgtgaccgatgtcggcgagtgccgccggctcatcgacacggccgtacgtgagttcggggggatcgacgtgctggtttgcaacgccgggctttcgatgcgcgccattttcgacgacgtcgacctggaggtgctgcaccgcctgatggacgtcaatttctggggtacggtcaactgctgcaagttcgccctgccgtacctccagcagtcgcacggttcgattgtcggcatctcgtccgtcgccgggctgcacgggctgccggggcgcacgggctattcggcctcgaagtacgccatgacgggtttcctcgaaacgctgcgcatcgaaaaccttaaaaagggactgcacgtgatgatcgcctgcccgggtttcacggcatccaacgttcgcttctcggcccttacggccgacggcacgcagcagggcgcaaccccgcgcgacgaagcgaagatgatgacccccgaagaggtcgcccgcatcgtcgcccgcggcatactgaagcgcaaacgcctctgtctgatggagaacgaggggcgtgccacgcatttcgttaagaagttcgcccccggcttcctcgaccgcatcttctacctggtgatgtcccgggagcccgattcgccgctgaaataacgtcgccgcatccggcggggcgagccccggggagcggtttgaaccaagggaactatggtccgggaagaaaaacactccgaagaagaggtcaggcgcgtctgcgccgggatccgccgtcaggccgctttggaaaacgcccgctggcaactcaaggcggggtatggcggcttggctctcatgtccgtcgtgctggtcgtcgtcctttgcggaggcgacggctggagatggtggtggctcttttatttcgttgcgccggtcatgctggtcatcaacggccatcgcgtggtgcggggtaaaaaatcgtggtaagtggtaaaataaaagaaggcgctcggttattttgagcgcctcttttttggtcgtcggttcatcgttcctgcctttcctgttccccttccatttgccgttcttccttccgggctggccggggtggattattccatccgccgtttccccgatagtagtgtcccgggttgctgtccttcgcgctgccggcttccgtaccgcttccggtaccgctgctccggtgcttcgccggcattacctatgccgtccggtatgtcttgcgcgttgcgtacatggcttttgttgcccggatgcgatcccgcttgcctgtctgctctccgggggggcgccgcttgccgtagtttttcgctcgtgccggacgatgcgttttccgcgccggcgagccctgggctccgggggaatacgatgtcgttttccccggcaccgcagcctttgcgcgcggttattcctttttcttcgtcccgccgtccttgccgtcttccttcgaggagtccttgaactccttgacgccgcgtcccaggccgcgcatcagttcggggattttcctgccgccgaacaggagcaatacgaccaacaggataagtatcaactcggtcgggccgaggaacagggggaggatgaataatgtcatggtatgttcgggtctttggtgtgtgcgttttccgtccgggctttcctgtcgtattcctggagacaggggctgccttgcggacaaatgtactaagaatttccgaaaccccgccttccggggtgaaaaaagcggggtgcatccgaagcaccccgcccgaactgtctttcgggaatccgttatttgaagaatatcgacgaaatctccttgtagttgtgtacgcgctcgatgacgtcggcgaacatgtccgccaccgacagcaccgtgaacttgtgcaggtctttgtcggggttgagcggaatggtgtcggtcacgatcacctcctgcagcgcgctgtcgttgatacgctcgtaggccgggcccgacagcacgggatgggtgatggcggcgcgaacgctcttcgccccgcgcgacatgagcatgtcggcggccatgcagatcgtgcctgccgtgtcgatcatgtcgtccacgatcaggatattgcggccctcgacctcgccgatggcggtcatcgtgcccacgacgttggctttggctcgttccttatgcgaaatgatgatcggcgtgccgagcagcttggcataggtgttggcacgcttggcgccgcccatgtcgggcgctgcgatcgacagctcttcgatgttgaggctcttgatataggggatgaagatgccgctggcatagagcgcatcgaccggtacgtcgaagaaaccctgtatctggtcggcatgcaagtccatcgtcatcacgcggtctacgcctgcggccatcagcaggttggctaccagtttcgcgccgatcggcacccggggccggtctttccgatcctgtcgtgcccagccgaagtagggtatcacggccacgaccttgtaggccgaagcgcggcgtgcggcgtcgatcatcatcaacagctccatcaggttatccgaaggcgggaacgtcgactggatgatgaataccgtacacccgcggatggactcgttgaagcagggctggaactcgccgtcgctgaaacgcagcacttccgattgcccgagcgtcgtaccgaaactcgccgcgattttttcggcaaggtattccgatccgcgacccgagaaaattttgattttgtggatagccataggttacgaggatttttgatggtgcaaagatagcataagccgtcggaaaaacgagccccgcgggcaaccttttttcaacaatcggttaaacatcgaggcatccgccgatgaagccgaggatctcctcgcgtcccgtaccgcgttcgcccgacgagacgaacatcggcggcagttcctcccattgctcgcccagcgtggccttgtaacgctccacgctcttggcgcactgcgttttggagagcttgtcggccttggtgaagacgataccgaacggaatgccgttcatgcccagcatttcgatgaagcgcaggtcgatcttctggggttcgagccggatgtccaccagcacgaacaggaagtgcatcttctcgcatttgagcacgtagtcggtgatgatcttggcgaaatcgctgcgcatggccttcgacgtgcgggcgtagccgtagcccggcaggtcgaccaggtaccacgcattgtcgatcaggaagtggttgatgagccgcgtcttgccgggtgtccccgagaccttcgccagcccctgccggccggtcagcatgttgatgagcgacgacttgccgacgttgctgcgcccgatgaaggcgatgtccttcagcgagtcctttggaacttgcgagatgcgctccgagctgcacctgaattcggctttgtggatctgcatggtgttggaattttgtgcaaagatagcaatatttccggatacggcacgggggatagcgcccgctgcactccgtcctgtcgccttccggttcgtttgccctctccgcggctgcccgttatttccccggctgcttaccccgtttccagacgagcgtcacccacagcggacagtgatccgatgccgtggccgtatggtctacggcgctttccgcgaccgtggccgacgtgggcagcccgcggccgaggatgtagtcgatgcgcacggccgggttgtcggacgggaacgtcatccgcgtggtgtcggaaagtatccggaagccgcccagccccgcaagcaccgccgcggcatttcctgtgttgaaatccccggccagcagcaccggtttgcggcatgtgtcggtggcttcgcggatgatcggcagcgaggcgagccggtcttcgggcgtcagcgaaaggtgggtgatgcataccgtgtagtccgggaattccgccatgagcagtacccgggcctcctcgcgccccgggagcgggatgctgcgtacggcgagcggctcggtgcgcgacagcaacccgacgccgtagcttccgcccgcgaagccgatggcgcggccgaacgtggcgtgcatacccgtcatccgccccagttcaccggggatgtaacgcccgtccacacgcagcgtggcgctgtccagttcctgcaacgccaccaggtcgggcgcttcgcgcaggatgacccgggcgatgcggccgatgtcctgtatgttgtcgatgccgatgccgttgcggatgttataggacatcagtttgagacgttcgggccgctgtgtgcaggcggcagccaggccgcagcagacggccagcacgagggtgcgtaggggttgtttcatgccggatggggttttccgcaaaggtaatacaaccgctgttgaaagccaaataaatccgactatgaccggctgtgtgtcatgcggttccgtgacaggcgccctgtgccgggcctcgtaaattcctttcggtttggtttaacggtgaatttttcgtaccttttagcatccgatttgcagcgaccgatatatttaacttatcatgcttatgaaaactcgacttcctatcgtgctcggcgctgcggcgctggcctttcttcccaccgaatccccggcctgcacgcgggccgtttacctcggccccgagggtatgaccgtcaccgggcgtaccatggactggcgcgaggatccgctcaccaacctttacatctttccgcgcggtacggcgcggcgcggggcgaacatagacaacacggtgttctggacctcgaaatacggcaccctgtcggctgccggctacgacatcggcatcaccgacggcatgaacgaggccgggctggtcgccaacctgctgttcctgcccgaatccgtctacgaacgcccgggcgatacgcgcccggtcatgggactgagcatctggacgcagtatgtgctggataatttcgctacggtcgacgaagccgttgcggagctttcgaaggagaagttccgcatcgacgcccccgacctcccgaacggtgtcaagtcgcgcctgcacctggccatctccgacgcctcgggcgacagcgccatcttcgagtatgtcgacggccgcctgtcggtgcaccacggccgtgagtaccaggtgatgaccaattcgccgttctacgaccagcaggtcgcaatcctcgattactggcagcagatcggcgggctgacgatgcttcccggcaccaaccgcgcccccgaccgcttcgtgcgtgcgtcgttctatatcaacgccgtcgtcaaaagcgccgatccgaaagtcgccgtgccggccgtgatgtccgtaatgcgcaacgtctcggtgccctacggcatctcgacccccgataagccccatatcgcgtcgacgcgctggcgcacggtctgcgaccagaagaaccgggtctactatttcgagcctacgctggcgatggaaaccttctgggtcgacctttcgaagatcgacttcggccagggaacgcccgaacgtgtcctgaaactcgtcggcggccgaaccttcacgggcgatgccacggccgaattccgcaggagcgacaagccgttcgtcttcctgttcggggtgtaattaccggattggtggaattatatacggcaagcgccgggtcttcatccgagcccggcgcttgcccgtatttctccttttcgccgaggccgggatccgcgtcatgacattaggacgggcggcgtgaaatccgtatggaatttttcctatctttgcggcgatataaatctccgcaatggaaaattactctcattttatcattacccggttcaacctgaacctttatgcgcaggacaaacacgacctgcccacccgtacggatcggtggctcgaacaccggttcgaggtcttcgagcgttactgcctgccgtccgtggcagcgcagacgagcgggaatttcacctggctctgtcttttcgatgccgcgacgcccgagtcctgccgccgccgtatcgaaggctataaggcccggtgcccgcagttcgaagccgtctattatacggccgcacaggcggccaacctgacggaaaatctccgcacgacgattgcagcgtacgtgtcgtgcgaccggaagggaagaaaatcccccccccgaagctgctgatcaccactaacttggataatgacgacgccttttcgtccgatgtcgtcgaactgttgcaacgcgagctgcgtcccgctcccggcaaacggatttacagcctgctgtacggttaccagtatttcaccgaccgccgcttcgcgctcaaaatgcgctatacgaacaaccatttcctgaccctcgccgagccgttcgatgcgcatgccgaaaccatcatttcctaccgccataccagggccatccggcaattgccgaccacctatctctccaccgcccgcggaaaatggctcgaaatcgtccacgaggacaacgtcagcaatgattttcgcatcaacatcaaagtctggtatattcccctgctatatggccggtcgttcgccgatttcggtttgggcggattccgcctgtcctgcgcccggcagtgggcggccacgctgctcgtggttccggcacgcttttttgccacggcggtacggcgtttgcgccgcaagtggtcgaaataaccctttcccggcctgaaaaagcggcgatgcttccgcaaaccaccggaggcatcgccctgtatttgacgcgctatggcaccgcagccttaccgcagcctcgggtatttgttgttgaaacggaacccgacgcccagcatcaggtagttcggggtctggaaatccttgaggcagtaccccacatgtacgaacgtattgtgtgtgacacctaccttgagcgtcagcatctggtaaaacgacttgaggtctcctcccttgtgcagcacgttgaaacccagtccgaagccgaccgtgaaatagggcatcacgaactccgcgcgtcccgaaattcccagtgcgatctgtttgtcgaacgagggggtgtggaactggtatccgggatcgcccccgtcgtagcctacgatgtagtcttcggtgtagacgttggcgctgccgtcgtacacgccgtccaccgacagacccgtgcggaacttgtacccgaaattatacatcgccgcgaagttgaaccccgccacgccgtaggcgtcgggtgcggcatattgcttgtcgccgaccgccacgcccttgcggcgccaggagccgaacagcacgaggtcgtagctcagatggcggggaaagggttttgcgagcagccgtgcccgtggccgcgagagcgggttgtcgacccttccgaaactgtatacgagcccgagtttcatgccgatcgagttgagtcccgcgttggggaatttggtgttgccgttcgaaaagtgggtcatcgaaaggcccgtggtgagttccaaccgctgcgtgagcagccagttgaggtagaaatcgacgttgaggtaggcgttgaccctcgaccccatcatgatgttggcgcggttgtagttcgtgtcgtagggtttccatccgaacgacaggccgaaattccactcgtagttgaacgataccagcgggctgatgcgtgcgatgcgcgcgccctggaagaggtagacggcaaccgggttgcccagctccccgcggttgccgaagctgtaataggagactccgatcccctggtatacgccgccgtagatacagtcggggcgcgacccggggcggaagcggaacgaataacgcaggtgggcggccagcgagcgctggatcggctcgcccgccatgttggctccggccagaaagatgttcgtcgggggaatgtactccgggcggaactccgcgccgatgctgtggacgagcctccgcctccggcctgtcgtgtccgcggagaaggaggacaatagcggggtagcggctggggcttgtttcttcgtctgatccagggcggcccggtatccggcggcatagccgttacggtagcccgtatcgtagcccgtccggtaggcggatgcgcggcggcgtgccgctccccgggacacggtgccggcctcagccccgcctgccatgcctgtcgtatccggcgccgcaccgcgggacgtgcctcccccggcgttcacggcattccggtaggccggtatgttttgccccggggggccgcccgcacgggcgggtacgggctccgcggcggtcgcctccgccgacaagaagagcaggcaccccgcaaagagccctgccgtccttcgtatgatatgtcgtattttctccaatcgcggtattttgaccgcacaagttacgaatttttacgcgagtgcaaagcgttgatccgaaaaaataccccgcgggtattctctgtttcgtcggttccggcttctctgtcccgttgcgccctgccggttttgcccttccgggctttttccccgcctgcctcggcatccttgcccgcgccgttgcagggtatcggggaacgctgcccgtcgtcacccgcaaccggcattttgcccgcgaggccggcatcacgcggacagtggttctgccgccgccggaataggtgccctcccgatcggccggtttgtcccggattgcggcctgcaccgtggaaaaagcggacgaaaaattgcaaaatccggccggatttcgtatacttgtacatgtaaatcccgggaaggcgggttgccggcctgaactcaaattcgggcagtctttcccgggactgccggatgagaaatttttgacgaatgaaacaattttccctcatactcttttccctgttggtttgttcttcctctgtccgcggcggtgacgctatgccgggcgacttgctgcggacgctcaatgcggcgatcgacagcagcgaagtctataccggctataaaaaggcgcgcatcgaggagctgcggctgcgcaagaccggtgcccggagtacggaggacatctaccggatcaactgtgagatcatcgacaactacgaatccttcctgtgcgactcggccgaatattatgtcctgcagaatatccggatcgcccgcagcctcggcaacccggatcatctctccgagagcaggctgcggctggcgttcctctactccctttcggggcttttcctgcaggccgacgacattttccggtctatcgactacggacggctgcctgccgaccagaaatgccgctattactggaactcgatccgctattacgagaacctgataaaatacaccaacgatagccagttgtcggacgaatataagggggagatcggccgctgccgcgattcgctgttgtcgctgctgcccgtcggttccacggactggcagaccgaacgggctttccagctcatggagcagggacagccggacggggcgctcgaaatcttcgaaggcatattccgttcgcgcgatccccagacccatccctatgccatgggggcgatgtgcctggccaaagcctacgggcaggcgggcgacagcgcgatggaggaacgctacctgatcctggccgccacgatggacatacgccttgcggtgaaggagaacgaggcgctgctcgcgctggccacgcgcctgttcgaaaagggcgacatcgaccgggcatactcctatatctcctatgcgctgaacgatgccaatttctacaattcccgtttcaagaacaccgtgatcgcgcgcctctatccgatcatcgagagcagctacctctataagctcgacaagcagcggcacaacctgcgcttctatgccaccatgtcgagcctgctggtgctggcgctggccatcgcgctgtttttctatttccgccagacgaaggtcatatcgcgtgcccggcgggagctggcggcactgacgcaggagcttatcagcctgaaccgcaacctcgacgaagcgaacctggtcaaggagcgttacctgggttatttcatgaaccagtgcgccatctatatcaacaaactggacaaataccgccgcgatataaacctgaagatcaggaataaacaattcgaccgcctgcacgacctttcgttgcaggctcccggcagggaggaagaggagttgtgccgcaatttcgaccgtgccttcctgaacctctatcccaatttcgtggagaaattcaacgccctgctcaatccccagagccgctatacgcccgaagaagggcgcctcaacaccgaactgcgcatcttcgcgctgatccggctcggggtttccgacgtgaaccagatcgccgatttcctgcgctgttcgccgcagacgatctataattacaagagcaaaatcaagaaagccgcgctcaacggcggcgacaatttcgaggaaacggttcgcaaactcggttccttgtcgctcgacgcgtttccatcctgtttaccggccgacaatgcataaccgcttgcaagtcgtcgtttgttagttgtttgttcggaagattgttcttttcctgtttatttccgatccggtgtgtgccctgctttcagccttgtcgtgattcgggcgaaattctggggtgctccccgtgtgacccggcatgccagcctggccggtgcggcctgcaatttcctcctttctcccgatgctccggcgtccgtctgcccctttccgatacgctgcacccttcgtggatttcctcatagccttgactgaccgggcaaaaaagagacccctgcctcaatcgcatgaagcaggggtgatatattccgtatggaagcttagtatctcctgttgccgtagccgccgccgtaaccgccgccacggttgccaccgccgtaaccgccggcaggtctgtctgccttgggctttgcgacattgaccccgatggtcttgccttcgaagtcggtgccgtcgagcgcgtcgatcgcagcctgtccttcggtctcgttaggcatctctacgaagccgaagccacgcgagcggcccgtttcgcggtcggtgattacgttagccgaggatacctcgccgtactgtgaaaaaaggttctgcaggctgtcgcttttcgtaccccagctcagatgtgaaacataaatgttcatcgttcttgtttttaattattgtttgtttatgattgatatacgtactgcggccaatccgcgcgtcccgcgttcaatttcaaatgttactttgtctccttcggcaatggtgtcaggtgcggaagagatgtggaaaaagtatttttcgccgctgtcggcatcctttatgaagccgtagcctttcgaggcggtgaagtactcgacgcgccctgtggagggcagtatttccatttgctcctgcttgggtgtcgaaatctcgatctgcgagacgtctatctccgtcttgggtttgacatcctggggcgtggtgtgcagtatgccgttctcgtccacataggctatcatatcctcgaaagaactcgtaccgccgcttttgcgttcgtccttgcgtttttgcttttcctgtcgtttttgctccttgagcttttcccggtctcttttacctgtcgttattcgttttgccattctatgttgttatgcggctatcgcccctgtcgcgggactgtatccgtcggtttcatcgtgtttccgctgtccgatacctgtgttgaaagcagaaaaggtgccagattcggcggcctttccctcggtatacggaattatgggacatggatttcgtgcttgtctgtaaaaaaatcaccatcattttctttttgcatcacctccgatgcctgttgcctccaagaggccgtttatgaacaaagaagctgataatgagatctattctgagatgggacagtccgccaaagtaccgcggaaacaaatacgcacgaaagaagaattcaatataaacccttgtttatgctgacaaaggtaatcaaattattcggttattcctattttttgcggattaatgcatcgatattccgcagaaatgtatttccgccccgttctcggggcgggagcggccgccggcaggaagccccgggactgcggctttagtagccgagtatcctcagcatcgagcggtaggactgctccttggcgaagagcctcgtgtagtactcgttgtcgctcttgtcgcggtcgatgatgatgtgcttgggtgccgggatcaggcagtgctggatgccgccgaaaccgcccagcgactcctggtaggcacccgtgtggaagaacccgatgtattgcgtgttgccgggttcgagcttgggcaggaatatggcgttggtgtgtgattcggcattgtagaaatcctcgctgtcgcaggtcagccccccgagcagtacgcgctggtattcgcgatcccagttgttcaccgccagcatgatgtaacgctggttgatgccccacgtgtcgggcagggtagtgatgaacgacgagtcgatcatgtaccagttctcgcggtcgttctgctgtttctggttgacgatcgagtagagcgccgcgccgctttcgcctacggtgaacgacccgaactcggtgaagatgttgggttcctccgtgtcgttgcggtggcagatgttcttgatctgggcgatgatctcctcggtcaggtattcgtagtcgtattcgaagttgagcgagttcttgatggggaatccgccgccgatgttgaggctgtccagctcggggcagatggctttgagttcgcagtagacgttcatgcacttcgacaactcgttccagtagtaggccgtgtccttgatgcccgtgttgatgaagaaatgcagcatcttgagctggaacttcttgctgttcttgagcttggccttgtagaagtcgaggatgtcgttgtagcggatacccagccgcgaggtgtagaactcgaacttgggttcctcctcgcaggcgatgcggatgccgaccttgcatttcttggtgaaggcgtcctcgaacaggtcgagctcctccttgttgtccagcacggggatcgtgttgacgaagccgtcgttcaccagctgggcgatgttctccacgtactgcgggcgcttgaacccgttgcagatgatgtaacggtctttgtcgatgatgccgccgtcgtaaagcgcattgattatatgtatgtcgtatgccgacgacgtttccaggtggacgtcgttcttcatggcctcctccagcacgaacgagaaatggctcgacttggtgcagtaacaatagttgtacgagcctttgtagtcgaccttcgccatcgccacgttgaacatgcgcttggcgcggttgatctgttgcgagatcttcggcaggtacgttatcttgagcggcgtaccgtactgtttgatcagttccatgagcgggatgtcatggaaattcaactcgttgtcttcgaccgagaactcatcctgcgggaagtcgaacgtctgttcgatgaggtcgatgtacttgtctttcatggctggttcgtgtaagtttcggcaatccgtcttcgctacatccgtaatttcgggccaaagtagcttgtccggattttttgaaatttcgggatgcaaatcaaacgaatatttttcgtataaccaatagtttgcccgattattttgaaaatccgtgccgaattttgcttttttcatcggaaaagggtatttttgaaccggatttcaaaagtggatttcaatcgtgttggttcagaccatatcgcaatatctcgggtcgcacaagcggctcgtcgtgccccagctcgggacgttcatcgtcaaggagccgggcgtaagcattgttttttcggagttgctcaaacgcgacgacggtgtgctgcgcagcctgctgcgagaggcgggcgtcggtgaactggaggctgcgggcgagatcgaccgcttcgtcttcgaggtgcgccatgccgcccagcacgggcaggagttccggctcgacggcttcggggtgttgcgtcccggccccaacgggacgatcgccttcgcctacgagccgcggcctgtgcagtccgctgcggacgcagcgccgggtgccgcctcggttccggccgggacgcggcccgcacctgcggggcaaacacccccgaaactgccttattccgagccgcgcgtgtcgccctcggccaagatgaaccccgacccttcggtgcggggcctgcgctacggcaagccgccgaagactaccgccgcctacacctatgtcgaccggccgccgcgccggcgccgtgccgaccgtttcatttgggtcgccgccatcgccgccgccatcgccgtcgccgccatcgctttcggctatctgcgtgaagcgaacgacaaggaggccgaaatgcagtacctcgaacaacccgccgacccgcggcccgcaacggacacgggcgcggcgacgcccgaacaacccataacggaataaatgacggacatcaccacagtcaagcagcgcttcggcatcatcggcacttcggaacttttagaccgggcgctggaggtcgccgtgcgtgtggcccccaccgacctgaccgtccttgtcacgggcgagagcggcgtgggcaaggagttctttccgcaggtcatccacgcctattcggcgcgcaaacacaataaatatatagccgtcaactgcgcggcgattcccgaaggtaccatcgattcggaactcttcgggcatgagaaaggctccttcaccggggcgctcgaagcccgcaagggctatttcgaggaggccgacggggggacgatcttcctcgacgaagtcgccgagttgccgcacccgacccaggcgcgcctgctgcgcgtgttgcagacgggcgagtttatccgcgtcgggtcgtccaaggtgcagaaaaccgatgtccgcgtcgttgccgccacgaatatgaacctccagcaggccatcgcttcggggcgtttccgcgaagacttgtactaccgcctcagcacggtgccgatcacggtgccttcgctgcgcgagcggccgcaggacatcccgctgctgttccgcaagttcgccgccgacgtggccgcacagtaccgtatgcccgccgtgacgctcgatgccgcagcgcgcgagatgctgatgcattattactggcggggcaatatccgccagctgaaaaacgtggccgagcagatctcggccatcgaacagacccgccttatcacggccgatgtgctgtcccgctaccttccgccgcaggacggcgggacgcccgcgccgatggggggcatgcgcgcggatgacacgatgtccaccgaacgcgaattgctctacaaggtgctgttcgacatgcgggccgacatcaacgacctcaagcggatgatgtccgagttgatgcataacccccaggcaccctgcgggcctgtgcacgacgtcaaggcgctgctgccgaccacggcacagagttccgcctcggcctatgcccccgcggcggtctatgccgagagcgaggatgtcaccgacgagccgccgcgcgagatgactaaggccgacatgcagcgcgagcagatcatccgcgccctgcgccgcaataacgggcgccgccgcgaggccgccgccgaattgttcatgtccgaacgcacgctctaccgcaagatcaaggagctgggcatcgaagagaattgaatggacatgtattgcatgcaagtttaatagattttatttatgctgccacaaaaatatatcattgccgttctgggtgatgcctatgaaggaaaaacaacgacaatcaataagactttcaataaattggcagacagtaaaataatctctggcgttacatcggtgtgggggcctttgccgtctccttccaatgtggtcgatttttctcttacggggattaccaaatacgggcttacaggatttttaagccagggagaccaaatatgctacacttatgtaaatttggaaaagttagtgcagatggggtgtcaggtgattgtatgcgcttgtaggaagcgtaatccggatacgttcaatgccgtagcgaaagtagcgtgggaatatgatttttcgattatttggattaagtttgatcgaccgaaagatgtttctaaagacgaatatacggatgaattatccaacaagatattctacttattcaaatagtgccattatttcggcgagcggttgttttgctgataaagagccgaatgaccttctgatggtattttcgatgaatgaagtttaaataaaaaagaagtggcttccttgcgggtgccagaacaatcgatatgatttttaagatgaagataaaacttgcaatcacggccctctgtgccgccctgctgaccgggtgcggcgtggccatcaaatattcgctctcgggcgcctcgatcccgcccgatgccaggactttcagcgtggcctatttccccaacaacgccacgatggttgcgcccatcctcagctcgacgctcaccgatgcgctcgtcgacatgttcacccgccgtacccgcctgatgcaggtcgaagagggcggcgacttcgctttcgaaggcgagatcatcaactatacctccaccacggcgtcggtgtcgagcgacgaggttgccctgctgaaccgcctgacgatcaccatcaaggtgcgtttcacaaatgccctcgacgagaaacagtcctggaacaggactttcacgtcctacgaggactacgaatccacacgtctgctgaccgaagtcgagggggagctcatcccgcagatcgtcgacaagctggtgacggacattttccaggcttcggcttcgaactggtaaacccgtgcggttatggcagatttgaaacaatatatcgcatcgtccggcgcgggtgagcttcccgcggcggcggaactcgacgcgttgctcgcacgctgcgagtggttcgacttggcgcgtatcgtgcgcgaaatcgccacgggcaggcccgattcccgactggacgtgaccgccccgtggcgtgcgcagagttcgctgcgcatggctgcggtcgatgccgatgccctgtgccggctgtcgtccgacgacatcatcgaccgtttcctgcgcgaggaggatctgcgcatcgtggccgccgacggcgaacccgaggaggaggtgtgcaccgaggccgtgctggacgacgacgaccaggtcgtgagcgaggaactggcggaaatctatcttgcccaggggcttcgggacaaagccatagcgatttatcgtaaattaagtttgcgaaatcccgaaaaaagtgtttactttgccgagctaattggcaaactggaaaacaataattaaatttcaacgatatgttatacacgatttgcattgccttgatactcattgccagcgttctggtgatccttgcggtattggtgcagaaccccaagagcggcatggccgccaatttcggcgcgtccaaccaggtcatgggggtgcgtgaaacttcggatttccttgagaaattcacctggacgatggctatcgctatcgttgtgctgagcctcgtggctacgctcgccatggacaaggggcgcgtcgcagagagcaatagcgaaatttcgaaggacgccaaggcacttcaggagcgtgtccttgagaccgaggcgcccgccacgatgccccaggctgagattccgacacaggctccggccgaaacccctgcggagcagcccgccgaatagggtagtatcccggaggctgcccctgacggacgggaagcagaagacaaaagactgcggaagcgattccgcagtctttttttgtattgtgcatttcctgtatacatttcctggcttttctgcttccaccgcctgttccccgcgttccccgcgttcccggtgttccccgcattttctccgttctctgcccacccccatcctcctctgcttctgcctttggctttttcgtctgtccctgtctgtccctgtttgcttcctccttcctttccggctttgcccttgcagcctgtgcttcttgttccgcgtaacttgttcatgtgcgatctttcatttttttgctatcttcgtttgccgtcctactactgcatcctcttcgagcctcttcctggggcctcctcttcctgggggtgtccactttttgcctcctctccgtgttccacgcttctgccccccccctttcctctgtgatagcctcggaatcgtaataaatgtttttaatggctttgactttttttgaaaatagctttgtgtttggtgggctataaaataatttttatctttgtaagccaagggttttaatcaatatattgcgtgtatatgtatatttattttaaatatatttccgaatgaaaaccaaaacttatgtaaaaggcattgccgcattttgtgccctcgcggcggtcgcctgtacgggcgtccagcaaccccggggcgatgtggccgtctatctggacgagtcgcagccgcttgaaaagcgcgtcgaggacgctctttcgcggatgacgctcgaagagaaggtcgggttgctgcatgcacagtctaaattctcgtcggcgggcgttccgcggctgggcattcccgaagtcgtgcagctttatatcggcgacaaactctcgtcgctgccgcgccccgtgaaggagctcaagggcttcgaaaaggtacacctcgcgcccggccagagccgaaccgtcacgttcgaaatcgaccccgggatgctcgcctgttacgacgatgcgaaagggggctggggcgctgaacccggtgaattcaccgcttatgtcggcgccgcgtcggacgacatccgcggaaccgtcgatttcgtgctgaaataatccccgctgcgagggcgtcgcggaaccgggcgctgcggaatgaatgcgtgcagcggaaaggcggcagccattttcccgcgggcaagacctccggggggcgcgttcccctctgcccggaatggcaacaacccccgcaaactcgatggtttgcgggggggggtgccggcatcagcagccccggggtattccgccgcaatgcgactgcgggcctgcccgttaacggaatctatcccttgattccgatccagtagagcacatgccgccgcaggggatgtccttccggcagggtagggtggttgaactggcccacgcactccatgccgattttttgcatgacccgctgcgagcgcaggttggcgacggcggtgaaagctattatctcctcgatgccaagtttcgtggcgtgtgtgaggcacgcctgtgcggcttccggggcgtagccgttgccccaggcgtcggtacgcagccgccatccgatctcgatctggccgcacagcccgtcgaacgttacgcggtgcagacccgtgtagccgagcagcgatccgtccgaaatcctttccacggcgtaaagcccgaacccttccgtttggaactcttcgcggatatgcccgaagaatgctgccgactcttcccgggtcagcggggcggggaaatactccatcacgcgcgggtctgcgttcatggccgcaaacgcgtcgaaatcatcctccctccatgcacgcagtacgaggcgggatgtctgtgccggaaaaatcatggtttttaatctttatcatgtgaatgttgcgtctcgaatagaggcggaaccgagcgcagaccctgtaccttcgttttgagcctgccgggattttgccgtgccgtccggtcgctgtttcccgttagcgtcatctgcctgccgttatccggttacctaccgttatttggtcgccgcagccgggctttgtcgtcgcttgccggatattggccgggtaatccgaccgggttggtatatcttccgccggctttgccgctgtttttgaggccctgctgcttctccccggctccggccttactcggccacctcttttttcgagcgcttgcgggtgttgatcgtcaggtagcgttgcagggtctgctgcaggcgcacggggtcgatgttgcggcggagctccccgccctgcgcgatcgagatgccgcccgtctcctccgaaacgacgatgatgatggcgtccgagatttcgctcatgccgatcgcggcgcggtggcgggtgccgtaggatttcgggacgtcgctctgcgtcaccggcaggatgcactttgctgccacgatgcggtcgccttcgatcagtacggcgccgtcgtgcaggggggcgttcttgaaaaatatgttttttaacaacgacgtcgaaaccttggcgtcgagggcgatgccgccctcggcgatcagccgcaggtcgctctgctggccgatgacgatcagcgcaccggttttcgtttccgacatttcgcggcaggccgtgacgatcggcacgacgttggtctgcaccgtgtcgtcgcccgtcgagaagatgcgggtgatgaagttgaagtgcttctggcgcatcccgatcacctgcagaaaccgccgcagttcgggctggaatacgatgatcagcgcaatggctccgaccgagatcagctgtccgagtatcgtcgacaatagttccatgttgagcgtccgcaccaccacccacagcaggtagatggcgatgatccccgagaggatatagggcgcgttggtacctttggtcatgcggtagatccagtacatgatcacggcgaccaggatgatgtctatgaaatcgacgaatgtgaacggaacgaaacccattgcttgtgtgttgctgttagtttgcctgcaaatgtataaaaaattacggacattccgcttttgcgctccgattatgtctcccggctgcccgccgcctgcgtaccaccgcccgttacctggtgtgcctgccgtcgcccgtcgcagcatgttgcctgctctgccgcccgaaaaaaaaagccgccccggatcggatcgggacggctcggcggggagggcaacgcacactcccttatttcttgacggctttcttgtccgctgcgtagagctcgttgaccttcgcaagcacggcgggcgtgatgttgagcgtcgaatcggcgtcgatcagtgccgtggcgttgatgatgagcttgtatttcttgtcgccgttgatctcctgcacggcgcggtgcaacagatcctgcgcacggttggtgaacacgtagttctcttcgtcgagcgcctgggcctctttctgtgcggaactctggtatgaagccacacgcttttcgatgctctgctgctgggcctgtgcatcgttggtggtaatcagccctttctggtatttttcctgcaactgggcggcttcggcctgcaggttttgctctttctgagcccagctcttctgagctttctgggtcttttcctgcagggctgcgccttcattcaggaaaaggtcgcattgtgccagtacggcttcgacctgcacataagcgatatcgcttgatccgacttcgcgggcaacctcctcctcggcggccgtctcggtggtcttcgtaccgcaggctgtcatggcgcaagccgcaacgagcgccgtaaaaagcatttttttcatgtcgttttttatctgttttagttaaatattcggcttttgaatcacaaaggtaaaaaaaaatctttatttttgccccacgccttgtaaattttgaatttcatgtacgaatacatcagcggaacggtcgccgaggcgaccccggcatatgcggtcatcgacgccggaggtgtcggttactacctccatatctcgctcgaaacatttgcggccgtcgaacatgcgcaaaacgcccgtttgtacgtgcactacatcgtgcgtgaagacgcccagatcctgtatggtttcgcaacgaaagtcgaacgcgaattcttccgccatctgatcagcgtttcgggcgtggggggcaatacggcgcgcatgatcctttcgacctattcgccgcgcgagttgcaggggatcatcacctcgggcaatgccgtactgctcaaaaacgtcaagggtctggggctgaaaaccgcccagaaaatcatcgtcgaactgagcggcaagctcaccggactggccgagggcgatactcaggcgatcccgtccgcaggcggggaggcgctcggggaggcgctttcggcgctggtcatgctgggattcgccaaggctccggccgagaaggcgttgcgcggcatcatgcgtgataatccggccgtttcggtcgaggatttggtgcgaatggccttaaaaatcctatgaaaaagcttttttttatcaataaaagtgtaaaaaatcccccccccacaatttggcagggcagattatttgctatacatttgcggcatcgtatttttatacgccgtaatatttgttaaacttgcttgctaaatggaagaggcgctcccacttggatttattatcctcttgctctgcatcgtttgtggtgccgtcgccgtcgcaatagggatctatgtactgaagcaacggcggctccagcggcttaaaaacccgcggaaagactattaccgctgattgcaggaagagatttatgacggctgaagccgtcttttttttgtccccggcacgctaaccggggctttttttacgtttcatgctttgaaatcggattgtttttgtaaatttgcacgataatacgacgatgaaaagactattgatcatatgcctatccgctgcgctcgtgtcgctggccggctgttccgacgacgaagacatccagcccgcgcagaaggagaagatagtctctttcctgaccgggacgcacgccccccggctcgtcgccgaggagaacctggaggagggcagcaaccagccctactacacggtttcaggcgatgccgtataccgctacattaccgatatctacaatcccgaccgggtcaactggccggaggtaaccccgacctcgaccgtgaagattaccttccgcgcctatgtcttcacctatgcgaatatcgtgacgacgggttcggaaaacaactggaccgtaccttattatacgaacgatgcctccctgaaaagttttctggaagggcgggggctcaataccgaatggtggacgttcgagccgctgacggtggatatgcggcatcccggcataataaaagggatggccgatgcgttacttggttgccgcgagggcgatgccgtcgaggtgtatatgacatacaatatggcttatggcgacgactatttcggcattatcccgaaggagagtcccatagcctggctttttacggtggatgcagtggatcgggtagaacccggccctgtggaatccggcagattaaatgttgagtaaaatacaaaccgaacatatgaaatttatcgctcgttttctgtacgtgccgctcgccggccttctggtgctgacgtcctgcgcgaaagacgaaacggaatcttacgacaaattcgagaaccaggcgctcgaggcatggatgacccagcaccgcagcgacctggtggagaacctccagtccgaagggctgtactatgtcgacctgctcgatgcgggcgaccttgcgtccgatccgatcaacaccgaggacatctgggtgtctttcgatttctcggggcgcgacctgagcggcaacatcatcctcacgcgcaatgccgacgatgccgtgctggccgggtctttctccaagtatacccactatgtacctttctaccgctactgcggctcggaaaactcaggactgatggaagggacgtggctggccatgcgccgtacgctgacgctcggcgatacctatttccggaataacaaagaccggctgggcatcacctcccccgaggtgacgctgcgctacggctcgaaaatccgactctacatgccttcgtcggtggtcggcaacggcgtcgagggtacgggcggatatgaggggcaggaaggttattcgctcagttccaaacgcccgttcatcgtgaccatggagatccgcgacacggtcagcaacccgctcgaacgcgagggtaccgatgtggatgacttctgcgaactgaacggcggcctgcagatttacagcaagggcgatgacgacacgcccgccacggaggtgccggaagaccccgaggatcccgagcacccctataacgagacttccaagcgctgggtcagcgcctgcgattcgatcccccaggtctatgtcaacgtgcgctacaacccggccgagcccggggatcagctctccttccctgcgccttaccacgtgggctatgagccctacgtcagcgaggcttcggtcagggatatcgacatgcagatcgccgaggcactcaaaaaacgtttccacggcgagggcgacgattacgagaagtacgagggggtcaagaaactcgaagcagattccgtgacgctcgaaggcacggccaaaatctggtatatcggccgttttctcgacgggttcatcttcgacacgaacatcgacgaggtgaagaagatcatctacggcgaggtcgcgcaaacgggtacggcgctcgaatacaccccgtcgagcggcgggatgatccaggcgttctactacgccatccccaacctcaagttcggccagtgggcggagctcatcaccacgtcgaccaacgcctacggttcgtcgggcaagagcggctcgtcgagttcgtccacttcggggtcgagcggttattcgtcgagctacctcgattatctcaactacctcaattacgccaatagctactacggcagcggcggctactacggggggtactacggcggctattacggcaactactacggcggttactacgacagcatgtacggctacggctatgacagttccagcacgggtaccaccgtgacgaccatcaccaccgagatcccgtcgttcacgccccttattttccagctttacatcgaaccggaagattgatccggcttcgctgcccggtgtggaaaaaccgtcctttcgcaatagaaggggcggttttatttttgttccgttcatgttacgtttttatttcactttttaaggcagaaattttgcagttccgcaaaattgtattaacttagtgatgcagaacttcaacttaaaattcaacggatatgattatcacatttaacgagttgcgtcgtatcaaggacaggctgcccagcggcagctcgcaacgcattgcagatgagttaggactcgacgtagaaaccgtccgcaattatttcgggggcaagcacgaggctaaggagtgcgtgggggttcatttcgaaccgggcccggacggtggagtcgttacactggacgacacgacgatcctcgatgttgcaatgcgtatccttggcgaccagaacaaatagttgttaagagttagtccggccttcgggtcgggtcgtagggcctgcgttttcgcaggcctgtttttttcgctctattttccggcgccccttgtttttccggcgccccttgtttttctggcgccccttgtttttccggtaaccctttctttccccgactgcccttcttttcccggctgttcctttccccgtccctgtccgacgcccctgctgattgcccgtgtcgctgccgtatgccttcgtccgctgcccggttgcttgccttcctgctttgcacctcccgttcctccccggcctttctgccaaaataacaccctgggcgcagttgccgggacggtcgtacggggaaattctgccattatgctgacaatttggcagggattgccgtttggtacaacctttgttcgatctactggcgtgaccggccaccggaaccgctgggcgaaggggcggggcacagggcaacgtaaaaaataacattaaacttatatacgattatggcaaaaattattggtattgacttaggtactacgaactcctgcgtagcagtgatggagggcaacgagcccgtggttattcccaactccgagggacaccgcacgaccccgtctgtggtggctttcacggcggacggcgagcgcaaggtgggcgacccggctaagcgtcaggccatcaccaaccccaaacgtacggtcttttcgatcaagcgtttcatgggcgagcgctacgatcaggttacggccgatatagagcgtgccccctatccgatcgtcaagggtgacaacaacaccccgcgcgtcgatatcgacggccgccagtatacgccgcaggagatttcggccatcatcctgcagaagatgaagaaaacggccgaagactacctcggacaggaggttacggaagccgtcatcacggttcccgcctatttctccgactcgcagcgccaggctacgaaggaggctggcgagatcgccgggctgaaggtgcgccgtatcatcaacgagcctaccgcagccgcactggcctacggtatggacaagaagagcagcgatatgaagatcgccgtgtatgacctcggcggcggtacgttcgatatttcgatcctcgagctgggcgacggcgtcttcgaagtgaagtcgaccaacggcgatacccacctgggcggcgacgacttcgaccacgtgctgatcgactacatggccgaggcgttcaaggccgagcaccagatcgacctgcgccaggatccgatggccttgcagcgtctgaaggaagctgccgagaaggcgaagatcgaactttcgtcctcgacctccacggagatcaacctgccgtacatcatgcccgtcaacggcattccgcagcaccttgttatgtcgctcacgcgtgccaagttcgagcagttgtgcgaccatctgatccgcaagaccatcgagccttgcaaactcgctttgcgcgacgcgggcctcgacgcttcgcagatcaacgaggtgatcctcgtcggcggttcgacccgtatccccgcgatccagaagatcgtcgaggagttcttcggccgcacgcccaacaagagcgtgaaccccgacgaagtggtggccgtaggcgccgcgatccagggcggtgtgctcacgggcgaggtgaaggacgtgctgctgctcgacgttacgccgctgtcgctgggtatcgagaccttgggcggtgtgatgaccaagctcattgacgccaacaccacgatcccgacccgcaagtcggagaccttctccacggctgccgataaccagccttcggtcgagatcaacgtctgccagggcgaacgtccgctggcccgcgacaacaagtcgatcggccgcttccacctggacggcattcctgctgctccgcgcggtgtgccgcagatcgaggtgacgttcgatatcgacgccaacggtattctgaacgtctcggccaaggacaagggtacgggcaaggaacagaagatccgtatcgaggcttcttcgggccttaccgagcaggagatccagcgtatgcgcgacgaggccaaggccaacgaggcgaaggacaaggaggagaaggagcgtatcgacaagatcaacgccgccgactcgaacatctttgccacggagaagcagctcaaagagtatggcgacaagctccccgccgacaagaagtccgcgatcgagggtgcgctggccaagctgaaggaggcgcacaagaacgccgacgtggcggctatcgacacggccatcgccgagctgaacgccgcatggcaggctgcatcgcaggacatctacgcacagcagcaggcgcagggcgcacagcccggggccgatgccggccagtcgcagtcgcaggccaatgccggcggcgcgtcgaatggcggcgacagctctcagcccgaggacgttgagttcgaagaggtgaagtaatacgcgaagtgttcggggcacttcagccgcaaggccttcatataaattcccaggggtgcgatccggttttccgggtcgcacctttttttgcctatccccgttccgcccgccacatgccgtagaggatcagtgccgcgcctgccagtgccgcgggggtgatgcgctcgccgatgcaggccgccgccgtgatgatcgtcaccaacgggttgaaatagatgtagttggtcgtgcgcacggctcccagtctgtgcatcgcggcgttccacaggacatagcagagcatcgaggctacgatccccaggaacagcaggttgccccacacggcggggcgggccaacacctctgaagtgatcgaaaaaggctggaaaacgaataccggcaggatggtcagcagcccgtagaagaataccttgcgggtgatgaagacggcagggtagcggccgccgatgcgtttgatgaccagcgaatagaccatccacagcagcgccgccgacaatgccagcatgtcgcctcggggagagagccggagcacgaagcgtccgttgaggacgaccagcaccatgcctgcgaacgccagcgcagaacccacggcctgccgccgcgtcatccgttcgccgcggtagagcaggctcagcagtacggccgtccatacgggcgccgtgcagacgatcagcgagacgttcgacgccggggcgtattccagcgccatgttttcggtcaggaaatagagcgagccgcccgtgattccggccaccgagagcgtcagctcgtcgcgccatcccgatgcccacaaccgcctgccggacaggggccagatgcagatgtaggccatggcgaaccgcagcaggaatatctccgccggggtcagcgaattggcgatgagcaccttcgtcgaaacgaacgtcgctccccatactgccacgctgaagagcgccgcaaggtggtatttgtactccgtatattttatcatacggcttcaaaattacagtttttttatcttcccgacgcaaatcttaattcgttatttccgattttcaattcttttttcctatctttgcgtgctattatgcgtaatgacaataattacaacagataataacaaaatttttcaactcaaatgcaaagtaaaggtgctattaaattactcgcagtccttttggcgcttgcgtgtgtttaccagctctccttcacgttcaagacgcggagcgtagagaagaaggcgtcggagtacgccgcgcagttccccctcgaccagcagggcgaggccgaacagcattacctcgattcggttcagaatctgggtgtttataacctcgggttcaagaagttcacctacaaggagtgcaaggagaaggaactgaacctgggtctcgacctcaagggcggtatgaacgtcatgctggaggtgcaggtcgaggatgtcgtcaaggcgctcgccggcgacagccagcacgatcccgccttcgtcggcgccatcgccgaggccaacgcggccctgaaggacggcacctcgaaagactatatttccgacttcgtgaaggcctaccagcgcctttcgaacggcggttcgctggctgcgatcttcgtcagccccgaccgcaaggacatcacgctcgaaagctccgatgccgacgtcgagaaaatcctcaagaaggaaaccgatgccgccatcgccgcttcgttcaacgtcctgcgcagccgtatcgaccatttcggcgttacgcagcccaacatcatgcgtctgcccaactcgcaccgcatcctggtcgagctgccgggcgtgaaggagccgcagcgtgtgcgcgacctgttgcagggtaccgcgtcgctcgaattctggctgacctacgatgcccgcgaggtgcttcccgcactggcagcagccgataagctcgtcaaggccgagctggccgagctccccgccgccacgcagcccgagaccgcttcggccgaagccgaggccgtcggtgagcagaccgcttccggcgacgccgcaggcctgatcgccgagatcggcgccgattccgttgccgctgccgggcaggtggacgcaggccgctacgaccgtacgcagaacccgctgctggccgtgctcgacccgaattatgcggggggggccgccatcggtgccgcctataaggccgacatggctgccgtcaacgaatacctggcgaaccctgcggtgcgcgagctcttcccggccgacatcgacttcaagtggggtgtcaagggcgacgataagatcgacggccgctactacctctatgccatcaaggtttccacgcccgacggcaaggctccgctggacgggtcggtcgtgacgagcgccacggagcagtacgcccagcgcggcgctacggccgaggtgtcgatgaccatgaacggcgagggtacgcaggagtgggcgcgtctgacgggcgagaacatcggcaaatgcatcgccatcgtcctcgacgggtacgtatattccgcaccccgcgtgaacaccaagatcgacaagggttcctcgcagatcacgggcgacttcacgattcaggaggcgaaagaccttgccaacgtactcaactcgggtaaggttcccgctccggccaagatcatccaagataccgtcgtgggcccctcgctgggtcaggagtcgatcaacgcgggtatgctttcgttcgtgatcgccttcatcctcgtgctgctctacatgggcctgttctacaagaccgcaggctggatgtccgacgtcgccctgctgaccaacgtcttcctgctgatgggcgtcttggtgtcgttcggcgccgtgttgacgctgccgggtatcgcgggtatcgtcctgacgatgggtatggccgtcgatgccaacgtcatcatctacgaacgtatcaaggaggagctgcgcggcggcaaggggctctcgctggccatcaaggacggtttctcgaaagcctactcggccatcatcgacggtaacctgacgaccatcatcaccggtatcgtgctcttcatcttcggtaacggccccgtacagggcttcgccacgacccttatcatcggtatcatcacttcgttcttcagcgccgtgttcatcacgcgcctgctgatcgagtggatcgtcgccaggtggggacatatctccttctcgcgcaagtggtcggagaacttcctgaataacacgcatttcgatttcatccgcgtgcgtaaggtgggttatacgatcgccgtggtgctgatcgccctttcgtgcatctcgttcgtggcccgcggcctgaacctcggtgccgagttcaccggcggccgtgcctatgtgatccgcttcgacaaggccgtttcggccgaggaggtgcgccagaaccttggcgaggcgttctcgcagcacgccggtgccgacgcttcggcgatcagcttcgaggtgaagcagtacggcaacgagaaccagatgcgcatcgtgacgcagtaccgttacgacgacacgtcggacgaggctaccgccgaagtagagcagatcatcttcgacgccctgaagccgctctattcgtacgacatctccttcgagcagttccgtaatacccagaccgacgtcaacggtatcctcactgccgacaagatcggcccttcgatcgccaaggacatgacctggaacgccatctactcggtgttgttctcgctcatcgccatcggcctctacatcacgttccgcttcaagcgctggcagtgggcatcgggcgccacgctcgcactggtcgtcaacgcgctgttcatcatcggcctcttctcgatgctctacggtttcgtgcccttcaacctggaggtgaaccaggcgttcatcgccgcgatccttacgatcatcggctatgccatcaacgatacggtggtcgtcttcgaccgtatccgcgagtacctgggcctctatcccaagcgcaacctcaaggataacgtgaacaacgccatcaactcgacgctgtcgcgtacgatcaacacctcgggtacgacgctcgtgacgctgctcgccatcttcttcttcggcggcgagaccatccgcggcttcattttcgccctgacggtcggcgtcatcgtgggtactgtggctacgattttcatcgctacgccggtcgcttacgacttgatggccaagcgtgccaagatcgacaaggagtaacacacctatatttaatatgcaaataaagtggattgcacggttggtgcagtccattttatttttaactttgcgtcatggaactccaacgtgcaatagatagtttgctgaagtggatgcaccgctatgtctcgccggtctttctggcgttgctcatggcgtcgttcatcctgtggtatatcgccaaactgagttatatctacaccaccgaacagaaggtgcgtgtggatgtcgacgggcaggttttcgatgtgacgtgtaccgtcgaaggggtcggtaccaacctgttcggttaccaggtctacatgaacaagacgctgcgcatcccgctctcggcgctcaagtacaagcgctcgcgcgaggaggggcacgaggggcggatcatcatcgacccgcagtcgttgcagaatgcgatttccgtgaaattcagcgatattaagataacctctatcgacgcggttcccgagatagattttcccgacggacaggaatgatgaaagtaggaattacgggcggcatcggcagcggtaagagcactgtctgccgcctttttgcacagaagggcattgcggtttacgattcggacgctgcggccaaacggctgatgcaggaggatggggcgctgcggcggcagttggccggtcgtttcggcgaggggactttccgcgacggggtgctcgaccgggcttacctcgcgggcatcgtctttgccgatccgcaggcgctggccgacctcaatgcattggtgcatccggtcgttatgcgtgatttcgatgcctgggcggcgcggcaggagggtagctacgtgatcctcgaaagcgccatcctgttcgaagccgggctcgaaggttgtgtcgacaagacggtcgccgtcctcgcgccgcgcgaactgcgcatcgagcgcacctgccgccgcgacgggtgcggggccgaccaggtcgtgcgccgcatcgccgcgcagctcgacgacgatgcgctgagcgcccgtgcggactatgtggtcgtcaatatcttcgaggaagacctcgaaccagcagtagtcaaacttgaccggattttcagccatggcagcaaataaccccttgttcgatttctcacagccccgggtgatggcgatcctgaacgtcacccccgactcgtttttcgccggcagccgtatgcccgatgcgccgcatgtcgagcgccgcgtgcgcgaggccgtagccgaaggggcgtcgatcatcgacgtcggcggctactcgtcgcgtcccggggcggacgaagtatcccccggggaggagtggcggcgcgtggagctgggcgtgggtgccgtgcggcggctggcccccggcatggccgtttcggtcgatacgttccgcagcgaggtcgctgcccgggcgatcgaaaggttcggccccctgatcatcaacgacatttctgccggggaactcgatcccgccatgcctgccgtcgctgcgaaatacggggtgccctacatcgccatgcacatgaagggcgaccctaagaccatgcagtcgctcacggactacaaacgcgacatcacggccgaggtcgtcgcctatttcgaggccagggttgccgcgctgctcgccgccgggatcgcacgcgagcatctcgtcctcgaccccggtttcggcttcgccaagaccacggaacagaattacgaactgctcgccgggcttcaccgcctctgtgcgctgggctatcccgtactggcggggctctcgcgcaagtcgatgatctaccgtgtgctcggcgccacccccgcccaatccctcgcgggcaccgtagccctggggtgggagtgcctgcggcagggcgccgcgatcctgcgcgtgcacgacgtgcgggaagccgtcgatacggtgaggatcttcaacgcatacgtacaaaacagcggagagatatgccaaatgaaaaaataacggggaatccggcggagaaacctgcggaaaaggtgtcggaaaacggggcggggaaacctgccgggcgtcgtgacggacgacggggaaggccgcagggcggacagcaaaaccgatcgcagcagggcgcacagcgggacaagcagcatgatagcccgcagaacaagccgcaggccgaaacgcaaagcgggccgggcaggcagtccgaggtgcgggagtgtccgggcggcgagcaccgcggcgcaaggcaatccgcgtcccggggcggacgatccggtgaacgccaaaacctccgcacggcagacagccgtagcgggaattacggccgctccgggagttcccgtccggcggacgggacggcggtcgggaagcccgctttcaactggacatggcgcgactatgcgctgcaactctcggtggtcatcatcggcatcgtcgttacgttcgccggctcgggtctgatcgaacgctggcgcgtggcgcgcgaggtgcgtgcgacaatgctgctggtacatgccgaactggaaaccaaccgcgcggatttcatgcaggtctgggactatcagcaatgggaaatgcgcgtctgcaagttcttgacggacaaccgccgcgacctgaaacggataccgtccgatacgctggcctctttcgatccggtttacgggcggatccatttcttccatccgcgcagggatgctttcgaggtgctgaagaattccggcctgatgtcttcggtgcccgacaaggacttcctgctggccgttacgcagggatacgccgtgctggccgatttggaggagaatatctcgatgtactaccagttaaaactcactgcccagaacgacatgtccaaggacttcagcgaaaaacagcgggagcgtttctataccggggacatgtacgagcggtgggagtgtattttctcggtgccgtgttttgccgaattcatgctgacagcgccctattattttccggagggatatatcgaaggattgttggcggacgtcgatcggtcgatacgggcgatcgaagcgaaatacaaactggataaaaaaccgaccgatgattaaagttaccgatatacacaagcgcttcggcgacctcgaagtgctgaaaggcgtttcgctcgacgtcgcccggggcgaggtcgtttcgatcgtcggtgccagcggcgccggcaagaccacgctgttgcagatcgtgggtacgctttcgcggcccgacggcggacgggtcgaaatcgacgggcaggatgttttttcgctgggcgataagacgttgtcccgattccgcaacggacgcatcggtttcgtgttccagttccaccacctgctgcccgagttcacggccttcgagaacgtctgcatcccggggctgatcggcaaacacccccgtgcggaggtcgaacgccgcgccgcggagctgctggaaatgatgggtctcgccgggcgccgcgaccataagcccggccagctttccggcggcgagcagcagcgcgtggctatcgcacgggccctgatcaattcccccgccgtgctgctggccgacgaaccctcgggcaacctcgattcgcacaaccgcgacgagatacaccgtctttttttcgagctgcgcgaccggctggggcagaccatcgtgatcgtgacccacgatgaacacctcgccgccatggccgaccgccgcatcacgatgtccgacggccggattctgtaaggctgcgcccggtgggcggttcgccgcgccgtacgggttccccgggtgccctgccgtctgacatcgcttccggtatccggcggctttcccggcgtggcggggctgcttcgggctgttcccgaagccgtccggggttgcggatcattgcataaatacagttgtattatggatacagaactcagggagctgctcgaacggcttcacgacaaatacaaccgtcccgagtttatcgagtgcgacccgatttcggtgccgcaccgctatgcggggcgtgccgaccgggagatcgcgggatttttcgccgccacgatcgcctggggcaaccgcaaggcgatcgtggcgaacggccaccggatgatgcgctgcatggacgacgctccggcggatttcgtgcgcaacgcctcggagaaggagctggcatcgctttcgtcctatgcccaccgcacgttcaacggcggcgacctgcgtgacttcgtgctggcactgcgccgtatggaggagcttcacggcggcatcgggaatttcttcgagacccgttacgaggcgacgcggagcatcccggcggtctttgccgaattccggcgcgaattcttcggctgcgaccatgctccgcgttgcgaaaaacatctttcgtccatcgagaagggcgccgcctgcaaacggctctgcatgtatctgcgctggatggtgcgtagcgacgggcggggtgtggatttcggcgagtggacgcgcatcccgatgtcggcgctctatatcccgctcgacgtccatacaggcaatatgtcccgtgcgctggggttgctcacacgccgccagaacgactggcgtgccgtcgagcagaccaccgcttcgctccgcatgttcgatcccgccgaccctgtgcgttacgatttctcgctcttcggggcgggtatcgacggttacctcaaagcatagagacgatgttccgcttcaaacaattcgccatacgccaggatcgctgcccgatgaaggtcgggacggacggcgtgctgctgggtgcctgggtctcggtgcgtccgtcggacaggtgcatcctcgacatcggtaccggtacagggcttattgcactgatgatggcacaacgtgtccccggggcccggatcacgggtgtcgacgtggaagacatttcgcaggcgcgcgagaatgccgatgcctcgccgtggggcggcagggtagcgttcgtgcaatgccccgtccaggagttcgcgcctcaggagcggttcgatctggtcgtctccaacccgccgttctttgtcggttcgctcacctgtcccgacgcggggcgtaccacggcccgccatgccgtgcggctgccgttcggcgacctgcgcgacgccgttgtgcgtctgctctccgacgaggggcacttcgccgtggtcttacctgcggacgaggccgcccgtttcatcggcatctgccgggacgtgttgcttccggtgcgtcgtaccgacgtgcgcacgacgccccgccacgcagccaaacgggtgctgctcgaattcgtccatacgtcttccgccccggctcccgatcgcaccgagctggttatcggcacgggtgtgcacgagcagtatacccccgaataccgtgccctgacgcgcgatttttacctgaaattttgatagcacgacaaaataagttacatttgcgttagcgattaaaaaattcgaacccatgaaactcagacttctggcgctcgccctcgtcgtatgcggcggcgccgcggcgcaaaacccatacatagccctgcaaggggccgacgaaacatccggcggcatcgtcgtgtcgcagccccgcacggtgctggccgttgacgtcacggccgagcgcgacgtgaccctcagcggcccctatgcgcgctatgcgcagaaattcctcggcgtccgcgccccgctgaccgacaagatatcctgggctgttaccggggcttcggtcgccctgctcgaccccaaggcgtgcctcgacgcgcccgccccggcccagccttcgcgcacggtgatgtcccatgccacgtccgaggacgaattttcgcgcctccaggccgacaagaacgacatgacggtgctggcgttggaagacgccgcccgagaagccgccaacacgatcttttcgcttcgcaggcaccgtatcgagctcatcacgggcgaagcgggcgaaaatgtcttcggcgaggggctgaaagccgccctggccgagatcgaacgcctcgaacagagctatctggagctcttcctgggcaagcgtgtcgtcaccaccgagacccgccgctatgtggtctatccgcaatccgacaagaagcagtatatcgtctgccgtttcagcgccgccgcagggctgctccccgagagcgacctttcgggtgacatggtgctgttgcagatcgaaccctcaggcaatacggctaccgccgtcgaggcttcggccaaggagtccaataccgtgacctgtcgcgtggccgacccgtcggtctgcacggtcatcgcgggcggccgcgagtatgcccgcgcggtgcttccgctgttcgagttcggccgcacgatcaacgtcgcgcttccccgccgcaaatagcttttaccgatggattacacgtcgcgtatggtggcgctgctcagggagttgcgccgcgagcgtaacggtgccgtagccgattcgatgcgctattacggcacgccttacggactgaattacggggtgagcctgcccacattgcgccggatagcgcgtgcggaggcgcccgaccacggtttcgcccgttacctctaccggcaggatgtccgcgaactgcgccttgcggcgctgcatattgcatgtccggcgtgccttacgccggaggagttccccgcatgggccgccggcatcgtcaattccgaaatcgccgaggaagccgcttttgccctgctgagccgagccgaggcgttccccgtgctgttctcggcgtggatcgcctcgcccgatgcgttgttgcagtatgccgccctgctcgccgccgcgcgcagtccccgccttacggcctcatgggttgctccggccgtcgaagccgtgcaccgcaatgcaacggccgaggcgacgaccgaagcgactgccactgcaactgccgacggtgcaagtacccctgtcgccccggatacctttgtctctgatgcttctgttcaggaggcctcttccccggaagttaccgcgcctgtcgccggcgcttcttccgttgacgtgaccccttccgacgcaactgccccttccgctgcaattgtctcagccgccccaggcgcttctccggcctcagacccgcatgtcgcctccccgtgtgctgccgggcagcaggtttcctgccggcccgcggcacagcatcccgttcccgccgcccgccttacggcccagggtgcggtggcgctgctcgctgccgtcgcggcgcaaaacgaagagaaccggcaggcggtactccgcgcagccggttctctgggtaagctccctgccgaagactacgtccacgaggagctcgcctggcgtctggaggcataggcctccctttcatgcattgtttgtttcgcgcgggagttcatcgctgtgccacctgttcgcgcttttccagctcccgcagcacgtttaccaggtggtcgtaactcgcgagtccgctctcgcgccacagcacttcgccccggcggaaaaacatgagcgtcggcaccgacatgatgttgtagtggtgcactgcgtccagcattccgcggtcgtcgatatccaccttgtatacatccacgcggccgttcatctcccgttggaacttgtcgatggcggggtgcatcatctggcatggcccgcaccatgtggcgaaaaagtccacgaacgtcagcgcgtcccgccagatgatcttgtcaaaatccgttgttgtcattctgtcttccctttttagttcatctccgcccatgtgaccccggcgtaggctttgtccgccaactccttttccgcatagctgatcgtgcggcgcagcccttctgcgagcggtgtccggggcacccagcccagctccctgcgtgctgccgagatgtcgggtgcacgccgccttgcgtcgtcggcccgtgccgccgtgtgtacgatccgcgagcggctcccggtcagcgcgacgatcttctccgccagcgcccggatggagatttcatggttgctgcccaggttcaccgtgcgtaccgccccggccgacggcggtgtttccatcagcctgacgagcccctccacgaggtcttcgacccagcagaacgtgcgtagctgctccccgctgccgttgacgacgatgtcgcggttctgcaaggccgccacgaccatctttatcaccacgcgctgatccatcgggtcggcgccgctgccgtaggtgttgaatatgcgggcaatgcgcgtgtcgacgtcgtattcgctgtggtatgccctgtgcagtgcctcggcggcgcgcttgccttcgcagaggatgtagtgcgtcgagcagcagttgcccggttcgctcgccgggtcgcgctgcccgatgccgtagatgtttcccgccgaggcgaagaccacccgcgcatgttcgctgcgggctgtctcgagcgtgtttatggcacccagcacgctcacgcggagcgtctccaccgggagcgctttgttgtagcgtacgcgcgacggcgacgcgaggttgtatatctcgtcgcagcggatgctgaagccgttgatgatgttgtggtgtacataccggaacaggggatgctgtaacacgccccgcagcaggggcgagttgaccgcatcgcggatatcgacacagaaaacctcgtgcccttcctccagaaggcgcaggcagaggtgcgtgccgataaatcccaccccgccgagaacgactattcttttttgcatctcttactcctttttacaggtgtaagagcaaaatctattccacaaaaagggcccgtggcagttggtctacgctgtttatcgtcacgacctcgatccccttggggcgtttggcgcccttgcccagataccccgatacgacgatgcgtttgaatcccaggcgtgcggcctcgctgatgcgctgctcggtgcggggcgccgggcgcacttcgcccgatagtccgatctcgcccgcgcagcagaccccctcggcgacggggcggtcgtagtacgacgagatcaccgccgcgaccacggccaggtctaatcccgggtcggcgaccttgaacccgccggcgaaattcaggaagacgtccttctggaacatcttcattcctacgcgtttttccagcacggccagcagcatgttcatgcgcttggtgtcgtagcccgtcgtcgaacgctggggcgtaccgtatgccgcgccgctcaccagtgcctgcacctcgatcaggtaggggcgcacgccgtcggccgaagcgcccacggcgatgccgctcagcggttcctcgtagtgcgtcagcagtatctcggacgggttgtccacgctccgcaggccgctgtccagcatctcgaacacgccgatttcgaacgtcgcgccgaaacggttctttatgccgcgcaggatgcggtagatattgttgctgtcgccttcgaattgcaggacgacgtcgacgatgtgttccaggatcttgggtccggcgatgcttccgtccttggtgatgtggccgatgatgaagatcgacgtcccggtcgacttggcatacttgagcagcgtcgcggcgcattcgcgtatctgcgacacgcttcccgccgacgagtccagcaggtcggtatagatggtctgtatcgagtcgatcaccaccaggtcgggcctgtgttcgccgatctggttgacgatattttcgagcagcgtctcgggatagatcaggcattcgtcgttcccgatgccgaggcgggccgcacgcatcttgatctgttcggccgactcctcgcccgagacatagagcgttttcagtccgttcgccgccagtgcgatctgcagcgaaagggtcgacttgccgatgcccggctccccgcccaggaggatcagcgaccccggcaccatcccgccgcccagcacgcggttcacttcgctgttgcccacgtctatgcggcggtgttcgctttcgcggatgtcgcctacgtgctggggcttcgccgcgggcagcggcccagcgacggtggccgccacggaaccgctttcgcgggctatgatctcctccgtaaaggtgttccactcgccgcacgaggggcagcgccccagccatttgggggcttcgaacccgcagttcttgcagaaaaaggcctttttgacttttgccatcggtgtgttgtcggtttgtaaagggtcttcgcagctcttagaaggggtgcgtcgtgtattccagcctctcgaccttcgtgatgccggccgtggggtagagcgcctggtatttggccgtgaggtctacggtcagcagcgtgaggctcttgccctcctccgaatagtaggaaaccgcataggtgtagtcggcgtcctcgtagaagaaccgcagctggtcgggtttgtcgggttctttgttgaacgacccggtgatcggcgcggcgtccggtgcggatgtgatatagagccatccgctgttgtggtagaggaattcgagcacgtaaccgcccccggcctgtaccggggcttcggccagcacgtccgcgcgtatggcctcgattaccgggtcgggttcaggttcaggttcaggttcagggtcgggttccggctccggttcgggctcgtcttcggccgttgctgttgctgctgcgccgagcgtgacggtggcttcgacccggctcaccggatagcttgtcgtgtagtacggttccgatttctccccgcaggccgcgagtgccgccgcgaggatcagtatggctatgtatcttatggctttcatccttccggtatttgtcaaagtcccagttcctggtctatcagcacgaccagcacgcgccctgcgggccagcaccgcagcatctccatacgcgtgttgcacacgcggtcgggcgagttgcagtccgagcatacgcccgtccgggcgcacggcgtgcggaatcccgggtgccgtgcgacgttttgcggtgcggcgatcgtgcggatgcgctcctcggcctcggcacggtcggcgacgatcttgttgcgtccggccacgatgaccaccttgcggggcccgaacgccaccggggcgatgcggttgcccaccttgtcgagccagtggagcgagccttccatgctgatggcgttgactcccgtgatgaagaggtcggacatcagcgcctgccggcgtatctccaaccgttcgggatagctcatcgcggggtcgaacccgtcgagcagcttccagcgtccgtcgccgcgcagccacccgacgatgcccgtggcgtgcatcgtttccgagtcgccgaacgatactatttccggccgttcccgctccgcgatggctttcagcaccgcgaacgcctcggtggtgtccttcaccgtttcagcctcaaagtggtgtcgccgtaatgcttcggcgcagtttgttagtttcatctatttcgaattgtccgcccccgaggaatccctccgggctataattaaggtacgaaatcaaaagataaatcgccgccccgagtgccaggattaccatgatccatccgatgatccgttttctgcgccgttcccggcgggtctcttcccggatctcggctttgacgcgttcgaccgtttcgggcgggagttcttcccgacgtgtcggatgaccggccctgtccctgcccagcaggtcgagcatcttctctttcttgctgcggggctgccgtttgcggcggttggccgcgagccgttggatcatgtcctgtacatgccccagcaacatatgcctacttgataaagaacctgtatatgtcgttcccgttggcgtacagcagcaggaacaggatgatgaccagcccgacgtactgcgcgccttctagcaccttgtcgctcaccttgcgtcccgtgaccatctcccagaacgtgaagatcgcatgcccgccgtccaggcccggtatgggcaggatgttcatcaccgcgaggatgatcgataggaacgccgtcttcaaccagaaatcctcccagttccagtccccggggaaaatactgccgatggcgatgaacccgcccagctcctcgtacatcttggtcttgggctgcacgatcatcttcaactgttcccagtaggacgaaatgactttcccggccttttcgatgcctgccgggatcgactgccagaaggtgtactcctgtgtgcgcagcgtatagggattgcgtgctatcacgcccagcttgccctcgtcggacaccgggacggcgatctgcagcagcatgtcgccttcgcgcttcaccgtcagggtcacctccccgcccgcccgggtcttcagatattgctggtagccggagtattccagcccccgtgcgtcgtcgatggccacgatctcgtcgccgcgcctgagcgccgccgccgattcgtacaccgcgctgtcgatcaggaacggcacacgcagcgtaaagaggtcttcgtaacctttggcctggcgcatctcgatcagctcgtccagcggcaacgtcagctccacgtgcttcccgccgcgctcgacgacgaccttccgctcgccttcggtgatgagcagcgaattgagtatcttgttgatatcgtcgaccggctcgccgtcgatggtcacgaacttgtcgccgtcctcgaagccgagcttgtgccccgcctcgttgaagttgtacccccatttggcgtcctcgttcgagaagtagttgtcgccccacacgtagcagacgccgcagtagatgacgatcgccagcaggacgttcatcaccacgcccgcgatcatcaccagaaaacgctgccatgcgggtttggtgcggaattcgtcgggcttggggggctgtttcatctgctccttgtccatcgactcgtcgatcatgccggcgatcttgcagtatccgcccagcggcagccagcccagcccgtactcggtgtcgccgcgcttgaacttgaagatcgaaaaccacgggtcgaagaagatatagaacttgtcgacgcggatcctgaaaacccgcgccataaggaagtgccccaattcgtgaatgcccaccaggatggtgaagcagaggaaaaactgaatgatcttgatgattatatccatgtctgtcttttggttacaacgctaagtattccgcagccagctgccgggcctcgtcgttcgcctcggcgtagtccccgagggtgggggcggcggcgaacgaggcgcgccccagggcgtactcgatggcacgcacgatatccagccatgcgcacttgcggccgaggaacgccgcgacggccacctcgttggcgccgttcatcgtgcaggccgccgtgccgcggcggcgcaggcactcgcaggcgatctccagcgccgggtatttcgcccggtcgaccccggcgaatgtcagctgcgggtgcgccatgaaatcgaaccgctcgccggggcgggtcgcccgccgggggtacatcagcgcgaaactgatcggcatacgcatgtcgggcgtgcccagctgcgccttgatcgccccgtcctcgaactccaccatcgagtgtacgatcgactgcgggtgcagcagcaccgttattttctccaccggggtgccgaacagccagtgtgcctcgatcacctcgaagcctttgttcaccagcgtcgacgagtctatcgtgatctttgcgcccatctcccactgggggtggcgcagcgcctgttccacggtcacgtcggccagtttttcgcacggcaggtcgcggaatgcgccgccgctgcacgtgatgatgagcctccgtatgggcgactgctcgcccgccaggcactggaagatggccgaatgttccgagtcgatcggcaggatcggggcacgcttttcggccgccagccgcatcacgtattcgccgcccaccacgagcgactccttgttggccagcgccagtttcttcccggcgccgagcgcggccaccgtcggcgccagcccggcgtagcctaccagcgcgttgaccaccacgtccgtatcgccgcccgccgcgacctgggccacggcatcctctccggcgtacaccttcacgtcggtgccggccagcgcatcgcgcagctgcccgtaatagcgttcgtcggcgatgaccgccgtgtccgcgtcgaattcccgtgcttgtgccgcgagccgctgccagttgcggttggccgtcagcacgcgcacttcgaataaggcggggttctcacgcacgatgtcgagcgtctgcacgccgatcgagcccgtcgaacccagtattgcaagtcgttgtttcatgcctgtgcgtcagaatacgatgtacccttctgggtctacgggcttgccgttgttccagagttcgaattcgaaaagccgcacctcgccctcttccgcctcggcgttgtagccgaccatctcgcccgcgcggatggtctgccccgtggtgacgagcgactgcgaaagccccttgtagaccgagaggaggttgttcgcatgctgcaactcgaccatgtagcctgtctcgggcgtccagaggctcagcaccaccgtgccgttgtcgatggccgtgatgcggtcgctggccgccgccgcgatgcgtaccccgaaattgccgttgcggatgtcgaagcggtcggtgatgatcccctccacgggtttggccagctcgatcgcctcgcgtaccgaacgccgcgacccgccgctacggcccgcgatggcgtacgggccgtcgccctccatctgtgcccgcaggagcgagtcttcgggcgagggcatcaccagcaccttgctggtgcgggtgctgtccgatgtggcgagcgtgcgcgccacgggagttttgccctccatgatcagcgcgatatgctggttgtaggtgagcatgtcgttcatcatgcgttccatcgagtcgagccggatgatgttctgcacgaggctttcgcgcgaacggtctgcctcggtgcggtatcccggcaggaattccaggatcggggagtaggccaccagcgacaggacgaggatgaacagcagcagcacgaacgacaggaaggccgcgaagatgctggccggcgagaggtgcatgtgccactcctcgctgttgtccgtggcattgagcatgttgaaacggcgtttgcggaaaagcccgcgccaccatgcccgtatggatttgaaaaatctcatcggtttatgacattatgaatgcaaagataaccaatttcatagaaaacctttgcggaacgcgccgaattttttaactttgtgatcgtttagaatcaacgcaaaaaacagctgaaaagtatggtaaaacctacattactcgtcctcgccgcaggtatgggctcccgttacggttcgctcaagcagatggacggagtcggccctaacaacgaggccatcatagattattcggtctacgacgccatccgcgccggtttcggcaaggtcgttttcgtcatccgccactctttcgaaaaggagttccgcgaggtcttctccgcggagcgtttcggcggccgcatcgccgtggagttcgtgttccaggagctggactacctgcccgaaggggctgccgttcccgaaggtcgcgtcaagccgtggggcaccaaccatgccgtgatgatggcggccgacgccatccgcgaacccttcgccgtgatcaatgccgacgacttctacggtgccgaagcctacaagaccatcggcgactacctttcgcagctgggtgagagccggaaccgctactgcatggtcgcctacgacctcgacaagactctttcggacaacggtaccgtttcgcgcggcgtctgcggcgtggatgctgcgggcaacctcacctcgatggtcgagcgcacgcagatcgagcgtatgcccgacggcaggatcgtcttccacgacggcggcgccgacgaagtactggccggggacacgccggtgtcgatgaacctctttggcttcacccccgatttcttcacctattccagggagtatttcaagacgtggctcgcccgcaacaaggagaacctcaaggccgagttctatatcccgacgatggtcaacaaactcgtcggcgaaggcacggcctcgttgcgtgtgctccgctcggcggcgcagtggcacggcgtcacctacaaggaggacaaacccgcgctggtggcctcgatcgagaagatgatcgccgagggcaaatatccccgcaacctctgggcataattgccggttgcggcatcgcatatgcaaaagggcggatgttttcatccgcccttttgcatattgcttgtgcagtgccgtttggcagtcggcttcggaaagcctgatgtgccttcggtttggccggctcccgcggcggctcagtccaggaaaccttccctgaccaactgctcccggatgcgcgtccagtccgctacggggcgtttcacaccgtccacgaaccggatcgggcagccgaggctgctgtcgtcgatgtagaggtcggcgtggactttcggcgaggatgtccagcgctgctgcgaggggttctcgttcacggcgtagagcgggattccccgctcgcggaaccaccggatcgcgtcgtcgagcagcttgccgtggcgcatcgtgtaaagtatcaggcggcaaccgttgtccgtaagttctttcagtacgggaaccgccccggcgtcgtcgccgatttcgggatatgcgtgtgtcacgaccgttccgtcgaaatcgacggcgatcaatgcattgcgtatagccatttattccttgttcctaattctacgtccgattttgctgaagaaaagtttcaggcgcttgcggtagctggtctccttgtaatcgtcgtaaccatacccgtatccgtacccgtaaccatatccgtacccatagccgtaaccgtatccgtggcggcgggtgcgcgtgccgttgagtacgacgcacatgttgcggaatttcttctcgcggtaaagccgttcgatgtcgggcagctgccggcggtcgagcacgccttcgcgcacgatatagatacagaggtcagccagccggtcggtgatgacagcgtcggcgaccgacatggccggggtgctgtcgatgaatacatagtcgtagctctcccgcagctctgcgatcagtttgtccaggcgatccgaaagcagcatctccgtggggttgggcggctggatgccggcgcagatcacgtcgaggttcttgtgtacgtccatcggcgtaatcagttcgccgatgtcggtgatcgtcccggccaggtagctcgtgatgcctttcttgctgttgctgcggcccagcgtcgtggagagcgcgtggcggcgcaggtcgaggtcgatcagtacgacccgcttcccggccgtggcgagcgtcatcgccaggttcatcgccacgaacgtcttgcccgcatgggggtcggacgaagtgaagagcacgcacttgatctccttgcccgacgacacgttcatgaaggtcatgttcgaacgcaggatgcggaaagcctcggacaatgcgtcgcggccggtttcccggacgacgatgccgcccttgttctcgccttcgaggaagggaatgtcccccaggaacggggcgctgatgttctcttcgatgtccttgcggccgcggatggtcgtgtcgagaatgccgatcaggtagatgatgccgaaggggatcgcaaggccggccagcaggctgatgcccaggatgatcatcgaacggggcgacacgggcctggggctgccgtatgcctggtcgatcgtacgcgaattgctttcggcgacggcatagttgagctgcgtctcctcctgtttgttgagcaggtagaggaacagctcctccttgatcttctgctggcgcatgatgtctaacaggactttctcctgcgacggcatggtggatatgcggtgattggccagcgcctcctccttgcgcatgttcgaaagctgtatttcgagcgtcgagacgtgcgagttgagcgaagcgatgatcgagcggcgcacggcagccagcacgttgtccatgtcctggatcacggggttgcgttccgaactgttttcgagcagtttctggcggcgcaggatggcgtcgttatattcggtgatctgggcgacgatcccgttgttggtcagcgaggcgaccatcgggatcagatcccccgcgtgcgacgggtcgtcgaggtagtcgcggatgtagttggcgacgctgatctggttttcgatcgaaagcccttcgaccttgaatttgctgctctcggtgatggatcgggtagcctccgaggtgatgtcgatcatctggttgctcttcttgatcccctcgatttcgctgtccacgacgcccagttcccgcccgatggccagcatacgctccttgataaaggcgttcgtcacgaccgatacctgccgcttgtcggcgatggcgtcctcttcgtacacggcgatcagcgtgttgatcacgtcctcggcacgcttgggcacggagctgttcatcgagatggtgacgatcgacgcctgtttgttggccacgtcgctctttacggtggcgcggtaggcgttcgtcgtgaccatcggcgaactcttggtgacggtgatgggcctgtccacgtaggtcgagtccatgaacggcgtcttgtgtacgaccatctgccccagcggggtggggatcgtgtcgccgtactgggcgcggatgaccctgcgcttctcctgcttggtgaggtacttgtcgtcgaagtccgccagcttgatccggccgtcctcgagttcggtcacctccagcgaaaggcgctggttgtcgtcgtcgatgaaatcgacctcgatgggcgagcggccgtagaggtcgagcgtccgcagcccgtcccgtacggaatagttgaccgtcaggtggaggcgcttcaccacctccgacatcagcctgtgcgactggaggatgtagacctcgttgttgacgttgcggcggttctggaaacctaccaggtcgctgaaagcgcccagctccatgtcgccgcccttgcggctgtcctttacgaggatggtggccgtacggctgtatatcttcggggtgctggccaggtagtaataggccacgccgaggcagatgagcaccgacaaggcgaaccagtaccagttggccagaaccatctgtaacaggtcgtgcagcgtgaggccgctgccgttttcgtactcgtcgttctgcaggtgttgctgctggttgttgtattcggtcatggcccggcttatttggttaaggttatgataagcgtcgccacggagatggccgtacctacgagcgagaggtagaagttgcggttctggctgatctcaccggcctgtgccttgtatttattgggcttgacatagatcacgtcgttctgctggatgtagaacgccggcgagttgaagaggtctttcgatgtgaggtcgaggtattcgatcgtgcgtacgccgtccacttcgcgggccacggccacgtccgtacggatgccgtagatcgtcaggtcgccggccatggccagggcgtcgaagatcgagatcttgtcgcgcgtgacgtcgtactgtcccgggcgggctacttcgccgacgaccgaaatcttcatatcggcgaactgcacgttgaccgacgggtcgttgatatacccgccctcgacgatcttgtcggcgatgagctgcgccagttcgctgcgggtttttcccttgcagtcgatcttcccgatcacgggcatgtcgagcatgccgttctcgtccaccgtgcggatctgcagcgactggttggtcgccgaactgtatgaggcgactcccgtcacggaactcagcgaggtcgatgagttgaacggcacggccagttcggggtctttgctgttgaccacgatcgtcagccggtcgaggggcttgatccgtatctggccgctttcggcgatttgttcgggcgtaaacgggttcgcgtcctgcaggtaccaggcacgtttctgcgaggcgcaggacgagaccagcagggccaggatggccgggactaagaggcggaaatgcttcattttattacttagagcgttttgtttttgtatcaggcgttttatatcgtgcgcaaaggtagtaattttttatgaaataaacatacccgcctgcccagctattttgtcccattttcacccgattcggccgcagcccggattttttccggaaaaaaacgtacatttgacgtcccggaatccggttacgtattaaaattcgcaaattatgctgcatcccgagtggagctaccaggctgtaatctatgaaatgaacgtgcgccagctgacgcgcgaaggtaccctcagggccgccgccgcgaagctcggcttcttgcgcgacatgggcatcgacgccgtgtggctgatgcccgtctatccgatcggtgccgaggggcgcaagggctcgctgggctcttactattcgatccgcgactattgcgccgtcgaccccgggctggggacgatgggggatttcgatgcgtttgtcgccgaggcgcaccgcctgggcatgaaggtgctgctggactgggtcgccaaccatacggcgcgcgacgcccgctgggtcggcgagaagcctgccgactggtatgagcgcgatgccgcgggggcgcccgccgtgccctgggactggacggacaccgccaaactcaactatgcgaaccgcgacgtatggcgggccgaggccgacgccatggagttctgggtgcgccggcacgccgtcgacggtttccgctgcgacatggcgatgctcgtgcccgtggagttctggaatgagactgcccgccgcctgcggaaggtgaaccccggcctgtttctgctggccgaggccgaggagacttaccttttcgaagcgggtgccttcgacgcctgctatgcctgggagatgcaccacctgatgaacgacgtggcgcagcagaaggtgcgcgtgaccgccctgcgcgactacatttatgccgaccgtaaccgttacccgcagtccgccatgcgcctggtgttcacctccaaccacgacgagaattcgtggaacggctcggagttcacgcgcatgggcgacgcccgcgagatcatggccgccttcacgttcgtcgtgccgcgcggcctgccgctggtctataccgggcaggagatcggctacgaccattcgttcgccttcttcgaccgcgacccgatcccctcctatgcggccaattcgttcacggatttctaccgccgcctggcggggctccggcatgccaaccctgcgctcgccgccggggaggcgggcggcgagatggtcgagatacgcaacaacgccgaggattgcctgatgaccttcgtgcgcgaagtgaagggcaaccgcgtcgtcgccgtgatgaacctctcgccctacgccatccatgccgattattacacgggcatctatgccggcatgtacaccgatgccatgacgggcgttgcctgcgaactgcgcgtgcatgtcgaggaggacttggcgccgtggagctaccgcatcctgacgcgctgacccctgcggccgcggaggcagcggccgcatccccgcccgatgcctggctgcggcctgcaaatccggcccggggcgcccgctcggggccggcgtaccgtttttatccgccgcggaatacgaatccccgcgcggtcgcgttccttttatggaatttttcctatttttgcccatgattatgaaacgcttccttctcctcttctgcctgctgttcgtcccgtgcctcgcggcacaggccgaaacctaccgcgtcgaagacatccccaatgtccagcgcgccgaccgtacgcgttacgtctcgaaccccgacgggatactctcggacgaggccgtggcgcgtatcgaccgcctgtgcgctgcgctgcgcgagcgggccgtcgcccaggtcgccgtggtcgccgtcgatgacatcgcaggcggcgacgtcttcgacttcgccatcgacctcttctccgcctggggcgtagggcaggcccgcaacgacaacgggctgggcatcctgctggtcaaagaccgccgcgagatccgtttcgtcacgggcggcgggctggagggcgtgctgcccgatgcgatctgcaagcgcatccagctcaaatacatgcttccggcattccgccagggcgattacagcctcggcatggtgcagggggtcgaagccgtgtcgcagctgctcgaagggagcgaactggatctgggcggcaccgatacggccggcgacgagctgcccgcatgggcggttttcctgatcgtcaccgggttcgtcgtggtgccgatgggcgtgatcctgctgggttactacgcccgcaagcgttgcccgaaatgccataaactgacactccggcagcagtcgagcgacatcctgaaggtgacgcccaactaccggctggtcgaatatacctacgtctgctcgaattgcggcgccgtggtcaaacggcaggccaaaaacctgcgcgacgacaatttcggcggtggcgcgggcggcggtatgattatcgggggacgtggtttcggcggtttcggcggcgggtcgcgcggcggtggtttcggcggcggttcgttcggtggcggcggtgccggctcgcgctggtaaaggccgcagggcgtgcagggcggctttgccggttgcgggcggctgtttgccggacaaaggctggctttgcgggcggacgggatgcctttccggttcggaggggataagattggaacgaatttaaaacacgatattatgaagaaatggatttggattggagtcgtcgccgtcgtggtgatcttcttctacgcaacgtacaacggatttgtaaataaggaggaggggctgaagaccgcgtggtcgaacgtcgaaacgcagtaccagcgccgtgccgacctgattcccaacctggtgaacacggtcaagggctatgccgcacacgagtcgcagactttcgaggtcgtgaccgaggcccgtgcgaaagccacctcgatcaacctttcggccgacgacctcacgcccgggaaactcgccgagttccagcaggcgcaggcgcaggtgcgctcggcgctggggcgcctgattgccgtgtcggagagttatcccgacctgaaggccaaccagaatttcctcgaactgcaagcgcagctcgaaggcaccgagaaccgtatttcagtggcccgcaaggagtttaacgaagtggccaagacctacaacgtcgccgtgcgccgcttcccggccaacctggtggccaagttgttcgggttcgggcagaagccttacttcgaggctgccgaagacaccgaaaccgcaccccgggtgcagttttagcccggctccgggtagaaagcaaagggacgggacgcgccagcgtatcccgtcccttttatgttgccggcgcctgcctacttacggctcccgagaatccggagcaggtagaggaacaggttgatgaagtccaggtagagggtcagcgatcccagcagtgcgattttctgcgtcgattcgtccacgacttcggcgttcatcaccatcttcttgatcttctgcgtgtcataggccgtgagggcgacgaacaccagcacgccgatgtaggttatcacccacatcatcgtttcgctgcgcaggaaaaggttcaccaccgttgcgatgatgatgccgataagcgccatgtaacccatgttcccgatgcccgagaggtcgcgcttggtgaaatacccgaacaacgccatggcgccgaacgtgccggccgtcacgaagaaggtcgatgcgatggacgatgcggtgtagagcaggaagatcgaagccagcgtcgcgccgttgaggatcgagtaggcaatgaacatcagcgtcgccgtgaggaacgacatgcggaagatgaacgacgagaggatgatgaccagcgccagttcggcgatgatcaggccgaagaatgtgactttgctgccgaagatcgcattgagcagcgtcggcgagtcggagaccgtcagggccgttgcgcccgtgatgaagagggccatcgtcatccataggtagacgttgcggaacagggtggtgttctcggacttgtcagccctgcgcacgccggctgtcttgctgtaattggtgcttgtttccataaagttttcctgtgtatacctgaaattacgtttcgtcgcggtttttccgctgtcggcgcaaaggtaacgattaaatcggagttttcgggcaaagccgcgtaaatttcacggccggccgccggggatgcggtgcggctacatccctttttttatgccggcccggatcaggaggatatttacgggcagcgccacgaggaacccgcatgccatggcgatctgcatcgtgaaccagaatacgaacgaggtgcggggcattgcctcaccgccgttgagcgcgaagatcgccacggccatccagccgtacatgccggcctgccatgccgtgagcgagagtatgtcggctttggcggcacggcgtatcgcttcgccgcgcgggagcgtgcgttccatgccccggatcgcggcgtactggaacccgatgccgaatgccagggccaggaggtaatccacgacccatgtccctgccagtatgcttccgccgatggctacggggacgaagaagaggaaccattcgccgacgatatcggccagcgtacaccccgccccgcagtggagcgtcgacaagacgaccgactgccaccgcggccgccccttcatccccggcatattccccatcccgtccatgccttccatagtcccggacatgttcggctcgtttgtcatccccggcatgtccgccctgtcagccatccccggcatatccaccctgtttgtcattcccggtatgtccgccttgtctgccgtatccgttttgcccgccgtccccttcatcccgggcatatcttccgcaccgtccgcttctgtcgtggttccgttctccatctgcatcccggtcatcgccggttccggcatgttcatggctggttccggctccgagaccttccatggattcgtccccgctacggacaggtctttccgtcggcccgtgccgggctttctgttctccgtttcctgcccggcgctgtcgaccttccgctcgtttccgttttccccgatgccgccgtcttttcccagttcgctgattttcgctgagcctttctgctttccggtgccgtcgttttgcgcgggcatgtgccgtgcggcgcgtccgaaggcgaaataggcccatagcccgaaaaaactggcccagagggcggtgagtacccatacgctttccataatgcgcatcggttgccggcgggtgcgcaggtcggcagcgacgatgagcgccgagccgatgccgcccgctacgaacaggactgccaaataatagaattgctgcatgacgaggtgtttttcccgtcatgcagcaatttatataccgtgctttacgtaccggcttgcctcttcgggtgcggtgccgtcattccatcgtcacgcacatgttttcgaaatcgatccgtatccgacgtacatcgacgatgttgttcatctgcccgtcataaccgggtacctccgccgtatgcatgtcctctgtgtcgaaaacgacccgcacctccggcaggatcacctcccgcgatcctatcttcgcgcaaatgccgccgagtgcatggtaacggtattccgctgccccggccgcggttatttccgaccccctgcggacagaacccagtttcgggagcgacgatgcgtgttccgcatagaacttgcccgataagcggggtttggcgttcatccccgtgtcccagtgcatcatcgccggaatcccgttcagttccagccacaggtaggggatgttgtctttcagcatgaagttggcaatcccggtttgcggttgcttcccggtgtcgaacgtgatggttccgtgctctacatccacggtcagggccgatagtttcctcagcgtcgaaatccccagcatcgcccggatccgtgtgatgcccgaatcggcggtcgcttcccgattccgtgccgccagaccgtcggggaagacacagcaaatctcgtttttgagggtgatggatccgatttgcagggagtcgagaattcccagtttcatgtatgatgccggggccatccacagcgaatcctgaaatatacggacacccagttcgtcggccaggctctggtctatcgaagtgtattcggccccgatatccagcagggtcttcacgcttttgccgcaatagcccgcgttcaggtagaatagaccctcctccagcttcatgccgaccgtgccggggggaaccctcccgcgagcggtcgatcacctccgtccggggcagccgggctatcttccggcattgctccagccccgaggcaatccccttccgggtctggtcgtcgaggtagggggagtcgtaggccagcatataggtgaatacagaatccattttcgcataggcgcgcacagaggcaaaattcttggcagccagcatcctgtacatgacggcttgtcccccgagctgtccgccgtatttggccagcagctcttcgatggcggacaccccttcggccggcctgttgaaatatgctcccaggaatgcgccggaaatcaggcggataacctcggacaggtcgtcgtggcgggtgtcgtaaagggatttggcatcgaaccatttttcctggttgatgtattggaaaatttgctggtcatactcctcctgggcataagtatggacggaagcacccagaatcgggaaaatgagcagcccgaaaattttttgtaacatggtcgaccttgttttagttgcaatttactgtgtagtaccgattttcgttatgaaaatctgcaatcgtccgtcaaaaacccgaatccggtttgagccgggagtcgccgcacgaccggtttgttgcacaggccggaatccggccagctatgatccgggtattccggaaggatgttgctttttgattttcagactcgggatgagcggggtgtaatgtgttgttgggtttgtggttgtaaaataatttaaattgaatatatgaataaataatttattttacaattattcagtcgactaaatacttttttattttttaactgcatcctgcaattgccgtctgcctttccctgccggcctttggcaaccggacaaacgccccctcccggccgactggtcgggagggggcgtttcaggatgctgcttttcgggttgctgtgttccccgtcacgcgatccgggttgtatcccgcgatgctgtgtcctgctgtgcacgtttggggatgttgtgtgccgcggtgctgtgtacgttccgggatattgtgtttcgggtcatgcgatccgggtcgtgtgtcccgtgatgctgccccgggaactttacaggcggtttttctcgtcggccgaacctgcttcgaccgccttgcgtttgaaggttttgcccgacttgaagttgtaggtcaccccgatcgtgaagctgcggtcgttccactgctgtttgacgtcgaccatgcgcacgaacccgtcgccgcgggcaccgatgtgctgcgggcgctcgatcaggttgcgcaccgagaacgaggcggtgaacttgtcgccgaaacgcttcttgattccggcgttcaggaaatggagcggttttacccagcagttgccgaagtccatgcggctctggaaccggtacgacaggtcgatgtagaatttcgcgggcagcgagaaggtcgtcgagctgtttacgaaatagaagttgtaatgtttttcggcgctgtgctcgtcgatgcgctgcccctgccggatgtaggtgaggttgaggttcatcgtccaccatttggtgaactggaacggtgcgttggccgtgaggtaatagtttttcgtcgtgtcgaagttggtccacgccaggcacaggcgcgccgggtcgtccgcgtcggggcgtatcgtctgctgtatctcgtcgcgctggatcgtcatgccgcccgtgagggtgtacttgtgcttgagcaccagcgtcaggctgatgtcctgcttgtaagccgggtcgagttcggggtttcccgtctggtaggtgtagtccgagatctggaaccgctgcgggttgaggctccagaagcgcgggcgctcgatcgtgcgggcatactgggcgatgagcgagtaggccccgtctttggtcagggcataggagacgttcgcgttggggaagaggctgaagtagttctgcgagatgtcgccgcccttgccccgggtgtgggtatattcgcccctcagccctgccacgaggctccagcgcccgaggttggccgaggcgatgccgtaagccgccgcgatgttctccgtatagttgatcgtgaagctctggttgtcgttgcacacccacgcgccgtccttcacgtattcgtagagcgcgtcgttgtgcatgtcgttgtaggtgaacttggcgcctgcgcgcagcgaccagcggggcgaaaatttcttgtcgagggccagcgtggcggtcgtgatgtcgtagaggctcgacgagttgtcgcggtaggtcgagtcgacggccgtggtgggggaggtgatgcggctgaaattgtcgttgccggcctccgtttcgcggcgcgtgtagtcggccagcagcttgagcgtcgacccgagcgtgtcgagcttgtagatgtagttgaacgtcgccgaatagttgttgcggatgttgcgcgtgtcgtaacggctttgcgtacgggtcacgacgcccgcgtccgtgaagtcggtgtaggagtcgttcgggcccttttcgttgttgcgccagtattcgaactctgcgccgatgctgtgcttggggcttatttcgaataccgagccgatgctgccgccgaagttgcggtcgcgttcggtgatttccgaatgggacgtgaggttcgtgtcgcccgtggtgtagtcggtgtgttcgtccgagacggccgtgtcctttcccaggtcggcccatgccgaggcatagaggtcgaggcgccccgtgtggatgttgatgttgccgctcggcgtatagaagtggtggcgcccgttctgtgtggtgcgcatcgacagcgatccgtccaacccgttttcgcggcgcttgcggagcgtgatcctgatgatgccgcccgatgaatcggcgtcgtagtcggcgcccgtcgtcggtacgacctcgatcttctggatctcctcggcgcgcagcgagcgcaggtaggtgagcagctgctcgggctccatgcgcagttcgcggtcgttgacatagaccttcgagcccgacttgccgtttatcgagatcttctcgtcgtcgatccaaacgcccggagcgcgttccagcagctcgatgccgtccttgccgatcgccgccggggcgttggccacgtcgaccacgaagcggtcggcctcgcggcggatgagctgcgccttgaccaccacgccttcgatccgggtcgtcgagcttttcatcacgatctcgcccaggtcgttgttctcctcgacctgcacctgccgcacgacggggtcgaacccgaggtattgtaccgacagggtatactcgcccgaaggcactttcagcacgaagcggcccgtgtcgtcggtggccatgcccgccacctggtcgctgcctttcagcagcacgaccgtagcgtactccacggcctgtccctgttcgtccaccacgcggccctcggccggatagatgcgggctgcgaatgcgtttgcggcggccagcgccagtattacgatgaggaagataagttttttcatactattctgtcattgtttgtaatatgcactgcattttagttgacgaggcaaagatatgtaaaaatatttgtactttgcaatacatagtactaaattttacgaaaaaaattatcctttcccggggaggggcggccgttcatgcatgaaaaaacgcggactcccctctgtcggtagatgggtacgaccaagcacccgaagccaaacaggtagagcccgcgcgtgacgcgggaatactactgttttcttggcttcgttaaaattggtcgttttatctacccaaaaacaatagctttcgctaatatgtatggcacaaagttataaaaaaggcaggaaattcaaaacggaatctcccgctttgctgcctattacctgcggcgaccggccggctgccgcgtcccgcacccccgtcagcattccgcctttgtatagtcgtcggcgtacgctttctgcgccgcggaaaagcgggggagggctgtccccgataaaataggtgtcgtcgaaattttgttgaaaaatcgtgcgccgcggggctggaatcccgcgaataattcctaaatttgcaaattgaattattgtggctcattgtcccccgatgtgattccgaacgctccgccatgccgtttccgacgcgatccggcaacagggcaggcacggcggggcgggaatgcccggcaaaaaatgctgaaactatgataagcgcggtttattatatcttcctggtgctgctgtgcaccttcttcatgatcctgtcggccctggcgctggtcgtgtgctatcccttcgacaagggccgccgcgtggtgcacgagctgtcacgcatcctggtgcgcaccttcttcgccattccgccccgctggcggcagcgtgtggaggggctcgaacatgtcgaccggaagaaaagctacgtcatcgtgctgaaccacaatacggtgatcgacatcccgacgctctattacatcccgctcaatttccgctgggtctccaagcgcgaggtcttcaagacgcctttcttcgggcagtacctcatcctccacggcgacatctgtatcaaccgcggccgcgcctccgaggcgctggagcagatggtgcgcgacggcaaactgtggatttcgcgcggcgcttcggtggccgtcttccccgagggtacgcgttccaaggacggcgagatacaccgcttcaaggcgggcgccttcacgctggcccgggaggcgggcgtggagatactccccgtggtgctggacggcaccaagacgcttatccgcaagaacgcgatgttcaactggggcaaccgcatcaccatccgcgtgctgccccccgtatcggccgcgaaggtcgtctcgaccgagacgcacgtgctgatggaggaggtgcacgacgccatgagcgcggcccttgcccagatccgaaaccgaaaatagactatggcagatttactcaataccaatcctaacgacagctacggcgacgacgccatcgttacgctttcgccgcgggagcatatccgtctgcgccccggcatgtatatcggcaagctgggcgacggcacgcaggccgacgacggcatttacgtcctcatcaaggaggtcgtcgacaactcggtcgatgaatttatcatgggggccggccgccagatcgacatttcgatcgaggacaaggtggtgtcggtgcgcgactacggccgcggcatccccctcaaatcgctcgcggcggccgtcagcgagatgaacaccggcggtaagtacggcggctcggccttcaagaagaccgtcggcctgaacggcgtcggcgtcaaggccgtcaacatgctttccggcgagttcacggcccgttcggtacgcgacggcgaggcccgcacggtgaccttcgccaaggggctcgaggtgagcgacaagtgggagagcggcgtgcgcgagaaaaacggcaccttcatctcgttccgcgtcgacgaggaggtcttcggcgagtatgcctacaacctcgaatacgtcgagcagatggtgcgcaactatacgtacctgaacctggggctgacgttcaatttcaacggcaacagctacgtttcgaaaaacggcctgctggatctgctcaacgaaaacatgaccgaggagccgctctatgcgccgatccacctttcgggcgacgacatcgaggtagccatcgcccacggcacgggctacggcgagagctatttctcgttcgtcaacggccagtacacctcgcagggcggtacgcatcaggcggctttccgagaggccatcgccaagaccgtcaaggagttctaccacaaggactacgacccgtcggacatccgcacgtcgatcatcgccgccatttcggtcaaggtcaccgacccggtcttcgaatcgcagaccaagatcaagctcggatcgaaggagatcgagccgggcgtgtcgatgcgcaatttcgtcatcgatttcctgggcaagcacctcgacgactacctgcacaagcattccgagacggcgcaggtgctccagcggaagatcgtcgagaacgagaaggagcgcaaggccatttcgggcatccagaagaaggcgcgcgagacggccaagaaggtttcgctcaacaacaagaaactgcgcgactgcaagatacaccgcaccgacaagcacgagctggccgaacagtcgatgatcttcatcaccgagggcaactcggcctcgggttcgatcaccaagagccgcgacgtgcgcacgcaggccgtcttttcgctgcgcggcaagccgctcaactgctacgggctgaccaaaaaggtggtctacgagaacgaggagttcaacctgcttcaggctgcgctcaatatcgaggaggatatggacaacctgcgctacaacaaggtgattatcgccaccgatgccgatgtcgacggcatgcacatccgccttttgatgatgaccttcttcctgcagttcttccccgacgtaatccgccaggggcacctgttcgtgctgcaaacccccctgttccgcgtgcgtaacaagaaggagacgttttactgctactccgaggaggagcggcagaaagccgtcggacgctgcggcgccaatgccgagatcacgcgcttcaagggcctcggcgagatttcgcccgacgagttccgcgaattcatcggcgagaacatccgcctggacaaggttcgcatcaccaaggacgacccgatccatgacctgctcgagttctacatgggcaagaacacctacgaacggcagggcttcatcatcgacaacctgcgcatcgaggaggacatcgtcgagcaggatcttgcaatcaattaacgaatatggcagaagaaaaagatatcatcgggcgggacgagccgctcaacgaggacgcatcgaccccggaaactgacggcgcggcagacgaaagccctgccgccgacgccccggccagggcgggcaagttcgaccgcctgacgcaggacgaagggggcgtgcgcaaactgacgggcatgtataagaactggttcctggactacgcttcgtacgtgattctcgaacgcgccgtaccccatgtcgaggacggcctcaaacccgtgcaacggcgtatcctgcacgccatgaaggtcgtcgacgacggacgctacaacaaggtggccaacatcgtgggacagaccatgcagtaccacccgcacggcgatgcgtcgatcaaggacgcactggtgcagctggggcagaaagacctgctgatcgactgccagggtaactggggcaatatcctcacgggcgacgaggccgccgcggggcgttacatcgaggcgcgcctgtcgaagttcgcctccgaagtggtcttcaacaagaaaaccaccgagtggatgctgtcgtacgacggccgcaaggaggagcccgtcacgctgccgatcaagttcccgctgctgctggcgcagggctccgacggcatcgccgtgggtctggcgtcgaagatcctgccccacaacttcgtggagctcatcaatgcctgcatcgcacatctcgaggggcgcgaattccagctttatcccgacttcccgacgggcggcatggccgatgtgagccgctataacgacggcctgcggggcggggcggtgaaggtgcgcgccaagatttcgaagatcgacaaacgcacgctcgccatcaccgaaataccctataccacgaccaccgagtcgatcaaggattcgatcatcaaggccaacgacaagggcaagatcaaaatcaggaaggtcgacgacaatacggccgacaaggtcgaaatcatcatccaggtttcgcccgacgagtcgagcgacaaaaccatcgacgccctctacgccttcaccgactgcgaggtttcgatctctcccaacgcctgcgtcatctgggaggagaaaccccatttcctgggcgtgagcgaaatcctgcgccgctcggccgagcataccaagtggctactgggacgcgagctggagatccggctcggcgaactgaacgaagcctggcatgccgcatcgctcgaacgcattttcatcgagaacaagctctaccagctcatcgagggctgcaagagccgcgaagaggcctacgccgccgtggacaaggggctggagccgttcaagaaacggctgcgccgcgaggtcacgctctccgacgtgcagcgcctgacggagctgaagttcatccgcatctcgcgttacgacagcgacaaggccgacaacgagatccgtcagatcgaggaggacatcaaggccacgcagtacgacattgaccatctcaccgaatacgccgtggcctattacgagcgtatccgcgacaaatacggcaagggcaaggagcgccgcaccgagctgcgtgagttcgacaacatcgaggccacgaaggtcgccgtgaccaatgccaagctctacgtcgaccgcgccgagggcttcttcggcatcggtaagtcgatgaaggacgccgaattcgtatgcgactgctcggacatcgacgacgtgatcgtcttcacgaaggacggccgctacgtcatcaccaaggtgagcgacaaggccttcttcgagaagggcatctactacatcggggtcttcaagcgcaacgacgagcgcacgatctacaacgtgctgtaccgcgacggcaagaacggcccgatcatgatgaagcgctgcgccatcaaggccatcacgcgcgacaaggagtacgacatcaccaagggtacgcccaagagcgagatactctatatgtctgtcaatccgaatggtgaggccgaggtgctgaaggtttacttcaagccccgtccgcgcctgaaaaaggtgatcgtcgacctcgatttctcgaccctcgccatcaaggggcgccagagccagggcaacctcttctcgcgctacggcatccacaagatcgtcctcaaggagcgaggcacctcgacgctcggcggccagaatgtctggttcgacgaggatgtccgccgcctgaacgccgacggccgcggcaagctgctgggcgagttcaagggcgacgaccggatcatcgtctggacgtcgaagaaccagtactatatcacgggttacgacctcgggcagcatttccccgacgagaccgtgcgcgtgagccgctatgagcccgaccgcgtttacagcgtctgctactacgaccgctcgcagcagttctattacatgaagcgcttcacggccgagatgagcgacaagatgcagtttttcctcgacgaggacggacaggccgacctggtcgccgtgacggaacgcacgggcgccaaactcgaaatcacctacaagggggcgcatgcgtcgcgtcccgcggacgaggtcgacgtcgacgaattcgtcggcgtcaagagccaccgcgccaagggcaagcgcctgacgacctacgaggtcgctacgctgcgcttcatcgaacccgaactgccgcccgagcccgaaccttcggacgacgacgatgccggggagattcccgacggcctgctctccggcggcggggcggatgacggggcggcggatgccggtgccggcgacgctgcggctgtttccggcggggtggagttcgagatcgaacgcgcccggggcgatgccgacgaggtgatcgaccccgaacaactgaacctgttttgacttgccggcgatgaaacccctctttttggtcggttacatgggatgcggcaagagcaccctcgggcgcaagctggcgcgcaggctgggcgtcggcttcgtggataccgatgcgctggtcgaggagcaggagggagcctccgtcgccgatgtcttccgttacgaaggcgaggcgcggttccgcgaagcggagcgtgaggcactcgaacgggcgatcgccgcaggcggcgaagccgtggtttcgacgggcggggggctccccacgtggggcgataacatgcagcgcatgaacggcgtggggcataccgtcttcctgcggcgcagcgcggcgcagatcgccagccgcctgagcccttacgggcgccggaaacgtccccggctgcgggggctggacgatgccgggctggtggcgttcatggagggggacatggccgtgcgcgaacccttctatgcgcaggcgcagctggtcgtcgactgcgatgcgatgtccgacgaccaggtcgtggagcatatcctgcggcggctcggcctgaattagagaatcccctgcggcttccgtcccgggagtacccggggtagcggaaatcgcagcgaacgatacgacgcggccgtgccgcggacgatgatattctgcaactcctgaaagacgtggataaactttcaaataacgcacccatcggtgttttcgattcggggctgggcgggctgaccgtctggcgcgaggtgcgccgtgcgctccccgcggagtcgctcgtctacctgggtgacggtaagaactgcccctacgggtcgcgcccccgcgaggaggtgcggcgccttgccgacgaagcggtcgccttccttgtggcgcaggggtgcaagctggtcgtcgtggcctgcaataccgccacggccgccgccatcgacttcctgcgcgaaaaatacgtccccatgccgatcgtgggcatggagccggccgtgaaacccgcctgcctggcgacccgcagcggggtggtgggggtactggctaccgaacggagcctcgacggcgagctcttccgccgcacggcggccaggtacggcgacggtgtagaccttgtcacggcgcccggccggggcttcgtcgaactggtcgaaaacgacctcgaagctacgcccgaggccgaggctaccgtccgtgccgccgtcgcggagatgctggagcacggggccgaccagatcgtgctcggctgcacgcactatcctttcctgcttcccgtcctcgaacgtgtcgtcgcgggccgcggcgtcacggtcgtcgacccttcgcccgccgtcgcccgccgcgtcgtgcagctgctcgaccgttacggcctgcacgccgaccccgcccaccgcgcggaatatacgttccgcacctttgccgacgaggcctaccgcctccgcctggaacgcaaggccttgggggcactttaatagcgccggatttgcttccgaacccgattttacatcgctatattccgaaatgtcgaaaaaaatgcgtaacttcgcttgataaaaatcaagcgcaacacagatggcatctaaaaatacatcctcatcccccaacggacggcagaaagtccagcgttccaacagcgacagtgcgcgctgggtcgcaggattgctgctgcttttcatcgggctgttcgccgcctcggccgtactgttctcgttcttcacctggtcggccgaccagagcgggctgctgctctcgcccgaggaacgtgccacgctgggcgtcgagcccggaaacctctgcggctgggcgggtgccaggctgggacgcctgctggtcgacaactcgttcggcgtatccggcatcctgatcccggtgatggtgctgctcgtcggtgtgcgcgtcatccgccagcgcccgctgctgttcaaccattcgatcctctcgcttttcctcgtcctgatcctcagttcgctgacgctgggcttcgccttctcggacaagtggagcctttgcagttcgacggggtggggcggtgccttcggcatcgagaccgcggcgctgctgcgcacgcatatcggggtgctggggacgttgatcctgctgctgggctgctggatccttacgggggtattcatcaaccgcaatttcatcaacaaggtcaaccgtgcgggcaacgtcatggtcgacaagagcggcaggatcgtagagatcgtcaaacataaggtcgtgcacgcgcacgggcaaccgtccgatgccgccggggatgcggctgtcgtagccgcggaatccgtcgggaatcccggagagaggcctgccaagcggtcggccgacactccggccgtggagtctgccgtgaaggcggagcccgaggtggtcgtgcgccgtcccgaacccgaactggccgtgcagcgtccggtgccggaaatgccccgcgccgtacgtactcccgggcctgctgccgccgggactcccgccgccccgcaggccgcccgccgcgatgcggacgacgatccgttcgtggaactgggccccgacggcatgcccattgtgcccgaagccccgcaggcggcagaggccgccgcatccgatgacgacggcgagtttaccgaggtcgacctgtcgcgccccgaaggccggctggttatcggccccagcgggcttgtcgagctggaacgccccgcggtgcgtcctgccgccggcactgctgtccggcctgctgcgcccgtgtccgacgaacctttcaccgaattatccctgggcggggaagaccccgttgggacaccggccccggctgccgggatgccctctgttgccggggtgccctccgctgccgctcctgtatccggggagccgctccccgacgggccgtttaccgagatacccgttcctgccgggggcgtcgtcgtgaccgtcgaggccaacgaagcccgcctggtcgacgaaaaggcgatcccgaccgagagctacgacccgctgaaagacctcgtgaactaccacaagccgcccgtgacgctgctcgaagactatgtttccgactcggaagtgagcgacgaggagattttcgagaacaagaccaagatcgaggatacgctccgcaatttcggcatccccatccagcgtatcaaggccacggtcggccccaccgtgacgctctatgagatcgtgcaggcgcagggcgtcaagatctcgaagatccaggggctcgaaaacgacatcgcccagagcctcaaggcgctgggtatccgcatcatcgcccctatccccggcaagggaaccatcggcatcgaggtgcccaaccgcgataagcaggtggtgtcgatgtactccgccgtgcgttcgctgcgttttcaggagtcgaaggccgagctcccggtggtgatcggccgtacgatccagaacgagaattacgtgttcgacctggccaagatgccgcacctgctggtggcgggcgccacgggacagggtaagtccgtggggctgaacgccatcattacctcgctgctctaccgcaagcaccccgcgcagctcaagttcgtgatgatcgaccccaagatggtcgagttctcgctctatgccaagatcgagcgccacttcctcgccaagatggagtccgaggacgatgccatcatcaccgaccccaagaaggcggtctacacgctcaattcgctctgcacggagatggacagccgcctggaactttgcaagaaagccggggcgcgcaacatcgccgagtacaacgagaaattcaccgcccggcggctcagcccgctcaacgggcaccgctacctgccctatatcgtcgtggtggtcgacgagttcgccgatctgatcatgaccgcccgcgaggtcgaggggcccgtcatgcgcctcgcgcagaaggcgcgtgccgtcggcatccacctgatcatcgccacgcagcgccccgacgtgaaggtcatcacgggcggtatcaaggccaatttccccgcgcgtatcgccttccgcgtgatgcagatgatcgactcgcgtacgatcatcgaccagccgggggccaaccagcttatcggccgcggcgacatgctcttctcgaaggacggggaactgatccgtatccagtgcgcgctggtcgaaaccaaggaggtcgaacgcatcgtcgagtatatatctaagcagcagggctatacctcggcctattcgctgcccgactatacgcccgatacgggcgattcttcggggagcatgggcagcgaggactccgcccccgtgaaatacgattcgctcttcgccgagatcgcccgcgacgccgtttcgggcggcaatatctcgacctcgatgatccagcgcaactacgaggtgggcttcaaccgtgccgggcgcatcatgatgcagctcgaacgtgccggcatcgtcggccgccagcagggagccaagccgcgcgacatccttttccatgacatgccctcgctcgaagccaagttgcaggagctgggcctattctgatgctgccatgaaacgactcctgtccctcctgttgctgctttccgcgatgcaatccgtcgccgcagtcccggctgccgcggatgttccggctgccgcaaataatgttccggccgccggccgtgccgacgcgatcctggccggggtcagcgacggcttccgagcgctgggtgcctacggggtgtcgttcgaggttcgctcggacgaatacgtcacgcgcgggcgctatgccgtcgagggggagaattattacctcgtgctgggcgatgccgaggtctactgcgatggagccgtgcgctacgaggtggacaaccgccgccgcgaggtgacgatcgacgtggtcgacaccggcagccgcaatatcctcaataaccccgtccatgccttcgatttcctcggcagcgaatatgcggcctcgctcgccggcgagcaggagggccgtgccgtggtgcggctgacccctgcgccggggaatacctcctcggcgggcaatatcgtccttacggtcgataccgccgcgatgcgccccgtgtcgctccgctacgattacgacggcgagcaggtgcaggtttcggtgctgggcatcaagcccctcgaaacgccgctcaaggcctttgcaaaagataactacgccgggtacgaattcatagacttccgctgactatgttgcactgccgacccatcatgctgctgttgttcgtcgccatccccgcggcgatgctggctgcggcgccggaagacccgtcgccggcgggcgggcatacccctgccgccggacatgaccgccctgcggcggctatgcccggttcggttcccggtgccggaagcccgcccgggcagctgccttccggcacggcatgggagcttacctccgagcgcgatctgctctatgcggcatctttcgtaggggattccataccggtgcgggtgttcctcgaatcgggcgtctattttccgctgatcgacagcgcgctggtctggtcgcaccccgggcttttcgaacccgtcgaactcgaacgccccgtgcgtttccgcatggccggcggcacggactattcggcccgctataaactggcgccggggctcagggtgggggatacgcgcagtttgcgcgagagctatgtcgtcgacctcaggcgacgcaagccctgcgacctgctctacccgctccataccttcacgaccgacagcgtggccgcgcccggtattttcgagctcgatgtccgccgcggcattttccgtccgctctcatcagggagcctgccgcaacccggtgacgggtgggaggcctacgaactggtgcccgacgggcattcggggatgttctgggtcatggatacggtgcgcttgtccgacgaccggggacgcagccgtgcgatgccgatgcggctggtcgtcgatttgggcaacgccaacctgctggcactctttgcgttcaaacctgaggtcggaaaattcgtgtcacgcgcccctgtcgatctggtggaaggccatacgccgggcgggatgaccctgcgggtgctgatgcccgccgtcgccactttcatggggtgttactccttcggcgggctgcccgtcgtggtgctcgacaaaccgatggaactccccggcgacgggttcctcggcgtaaaattcttctccgccttccgggtggttttcgatttccgccacgggcggttgtggctcaggcaggcggactgacccctatttccggttgaggtaccagtagagcccgccgacgaagatgccgccgcccgcgatgttcccgagcgtggcgggaaccaggtttgcggcgaccatgtccgccaccgtcaccggggcgcccagcatcatccccagcgggatgaagaacatgttggcgatgcagtgctcgtagccgatcaccacgaagcacatgaccggaaaaaacaaccccatcatacggccagccgcgtcgtcggcactcagcccgagccataccgccaggcataccagccagttggcgcccacgccgcgcaggaataccgtcagccacggcatcgaaaccttggcctgcgccacgttgcaggccgcttcgcgccacagctccgacgagagtacgccgggcagcaccaccaggaaataggcaaagaaagccgccccgatgaaattccccgcgtataccagcccccagttgcgcagcaccttgccccatccgtacctgcggcccagcgccccgggtacgagcacggcgttgttgcccgtgaagagctccgccccggcgaataccaccaggatgagccccagcgggaataccagccccgaaagcaggcgctggaggccgggcgcttcggccgctgcggggaacccgaaccccgccatcagcgagaagagtccgcccatggcgatgtatgcgccggccaggaatgccagcaggagggttttgcccgccgggagttgcattttgcccgttgccgactgctgagccagcgcgagtacttccttgggtgtgtttatctgtgccatgttcggggaatagaggccgcaaaggtagtgaaacgatccggaacgcgcaagcggacgccgtcagtctgccgggaattttttttgaggccgtcagatcgccggaaaaggggcaaaaacggggcgtcgtcccggaaatcttccgcgcggaggcgatatttatcggcttaaagttgctcagatcggaaataaatcgtatttttgttcgttaaaagactgtaattttaaagagataagatgctaactgaagaagaaaagaatgcaggtttgacaggacgtatcattcctatcaatatcgaagagcagatgaagtcggcgtacatcgactattcgatgtcggtcatcgtgtcgcgtgcgcttcccgacgtgcgcgacggcatgaagcccgtgcaccgccgtatcctctacgatatgagcgcggagctcaacctctactccgacaaaccgacccgtaagtcggcgcgtatcgtcggcgacgtgctcggtaagttccacccccacggcgactggtcggtctacgacgcgatggtgcgtctggcacaggagtggtcgatgcgctacccgctggtcgacggccagggtaacttcggttcgatggacggtgactcaccggccgccatgcgttacaccgaggcccgcatgaagaagatcaccgacgaggtgatggccgacatcgacaaggagaccgtcgactggacgctcaacttcgacgatacgatccccgaacccacggtgctgcccaccaagatcccgctgctgatcgtcaacggcgccagcggtatcgccgtaggtatggccaccaacatggccccgcataacctctgcgaagtggtcgacgcctgctgcgcctatatcgacaaccccgaaatcacgggcgaggagatgctccagtatatcaagggccccgatttccccacgggcggtatcatctacggctacgagggtgttcgggaggccatgcttacgggccgcggccgcgtcatgatgcgcgccaagaccgacatcgagcatacccccagcggccgcgagtgcatcgtcatcaccgaaatcccctacatgatcaacaaggccgagatgatcaagaagatcgccgacatgatcaacgagaagaagatcgacggcatctcctacatcaacgacgagtccgaccgtgacggcctgcggatcatcatcatcctcaaacacgacgccgtggcgagcgtcgtgctcaacaccctttataagaatacgccgctgcaaacctcgtttgcagtgaacaatatcgcgctggtgaacggacgtccgcagctgctgccgatgcgcgacctggtcatgcacttcgtcaaccaccgccacgacgtggtggtgcgccgcacgcgctacgacctgcgcaaggccgaggagcgcctgcatatcgtgctgggtctcttgatcgcacaggacaacatcgacgagatcgtgcacatcatccgctcgtcgcagacgcccgacgctgccaagcaggccatgatcgagcgtttcgagctgagcgacatccaggcttcggccatcatcgagatgcgcctgcgcgccctgacggggctggagtacggcaaactgaccgccgagcgcgacgatcttaccaagttgatcgcccacctgaaggacgtgctggagaatgtcggcatgcagatgcagatcatcaaggacgaactgctcgaaatcaaggaaaaatacggcgacgagcgccgttcggagatcgtctatgcctccgaggagttcaaccccgaggatttctatgccgacgacgacatggtcatcaccatctcgcacatgggctacatcaagcgcaccccgctggccgaataccgcacgcagaaccgcggcggcgtcggcgccaagggcagtgctacgcgtgacgaggacttcatcgagcatatctacgtggcttcgatgcacaatacgatgctcttcttcaccgagaaggggcgctgctactggctcaaggtctacgagatccccgagggcgcacgctcctcgaagggacgcgccatccagaacgtcatccagatcgaacccgacgacaaggttcgcgcctatatcaacgtcaagcgcctgaacgacgccgagtatgtgaacaacaacttcatcatcatgtgtaccaaggacggtacgatcaagaagacgaagctcgaagcctactcgcgcccgcgccagaacggcgtgaacgccatcgtcatccgcgagggcgaccagctgatcgaggccaagctcaccagcggcaacgccgaagtgatgattgcggcccgcgaaggcaaggccatccgtttcaacgagtcgacggtgcgcccgatcgggcgtgtcggcgccggtgtgcgcggcatctcgatcgaggagtccgacgaggtggtcggcatgatctgtgtggaacccgattcgacgcaggacgtgctggtgctgagcgaaaacggttacggcaagcgtaccgacctcgacgaataccgcatcaccaaccgcggcggtaagggtgtgaagacgatcaacgtgacggagaaaaccggtaaacttatctccatacaggccgttacggacgacaacgacctgatgattatcaaccgttcgggacttaccatacgtacggccgtgtcgcagatccgcctggcgggtcgtgccacgcagggcgtgcgtatcatcaacctgcgcgacggcgatgccattgcctcggtgatggctgtgcctgctgccggcgatgaagaagaagtacagtccgcggaggctgctgaaaacgggggcgcaacgcccgaagcaggacagccggccgaggaatagatgaaatgaatttgaaaactttaaattaaattttgttatgaagaaaacatttttgacggctttcgcggcgctgctcgtggctatccctgccgtgcaggcgcagaaagtcaacaagagcgggctcctcaccaagatcgagaagagcgacgccgacatcgccgacgcgaagaagaacgccaaggcctccacgtggatcaaccgtggcaaagcattgtacgaggctgccgtggaaccgacgaagagcctcttcgtcaacatggacgccgcgatgctgaagctggccgtgggcgaaccttcggccaccaagcaggtgacgcttctcaacgttccctacgaagcgtgggagtacccctatttcatcgcctacatcaaggacggcaaggtcgttacctggacgcagaccgactgggtgctgaaagaggctcccgccatggccatcgaggcttacaacaaggcttacgagatcgaccccaagagcgctgcgaaggcgaaggacgggttgcagcagatcagcgatttctgttcgcaggttggtaatacgggtatcgacacgggcgagtacgttgccgccgccgatgcctatgccacggctttccgggcacagtcgagccccgcttacggcgcagccgcagatcccgcgctgctctactatgccggttacctgcgcacagtggacggttcggcgcacccctcgtcgttcggacagggtgccgagtacctcaagaaagcgatcgacctggggtataccgacgaggagggtaacatctactactacctcttccactgctattacggcctgaagaacgtcagccaggacaacgtcatgctggccaaggacgccctgatcacgggtatcgggaaattcccgaagaacgagcgtatcctcgacggcctgatgcagctttacacggccgaagagggcgtgggcgaccctgccgacctggtaacgctgatcgactcggccattgccgacaaccccgagaacgtagacctctggttcggccgcggccgtatcttctatgcgctgaaaaactacgacgagagcatcgcatcgttcaagaaggtcgtggagctgaagcccgacctgttcgaaggcaattattacctgggcgtgttctacacgatcaaggccgacgagatgaacaaggtgatgaacgagaagcagtacagcagccagactgcctacgataccgacctgaaggaggtgaatgcggtctatatggaggcggtgccctggttcgaaaaggcatacgagctgaagaaggacgacgtcaacacgctcgacttcctcaagtcgatctgcttccgcctgcgcgacgaggagggtatgatggacaagtacaacaagtacaataccctgctcaaggaagccaaaggcgaagagtaattctctgcgggggcggcgctgccgccctgcgcttacaggaatcccggctccgcgtttcggagccgggatttttcatgcgccgatgtgcctgtcgtgatgtccgtgccgtcgaattcgtagggtaatatccgtgcgagacgtccgtgcaaatcctgtgcggcatccgtgcgaaatgcctgtgcggttgtgccgatctccgggacattcggcctgtggcgcgacccgcgcttcaagattccgggatgccgaaccccaactgccggagcataccttcgtggtcgaggcaaaagcgtttcatcagcaggtaatgcggcgtttgctccagttcggtgagttgcagcccgttgtccgcgatctcgtagatgtcggcgccggggtaggccatgacgataggcgagtgggtgctgacgatgaactgcgatccgctttccacgagctgttttatccggcacagcatatacatctgccgcgacggcgagagggcggcctcgggctcgtcgaagatatagagcccgttcccgcggagcctgtgttcgagcaggctcaggaaactttcgccgtgcgactgcctgtggagcgacttgtcgccgtaatagcggtgtatgccgtcggctatctggtcgacctcggtggcgacgttgtagaaactctcggcacgcaggaaatagccgtcgcgcggctgcaacccgcgtccgagcacgaggttcccgtatagcggggaatgagtctcgcgcgttgcgaaccgaaagttcttcgacccgccctcggcattgaatcccgcttttacggcgatggcttccagcagcgtcgatttgcccatgccgttctcgcccacgatgaacgtcaccgggcggcggaaccgcaatccgctgaaccccgccagcgcgggcaccgtataggggtattcgtgcggcaaatctccggtctctttcagccggatgtatttgatgtagagcgtcgtttcggataaggtcatggcctggtgtttggatcccgtcccgctaatttagtgatttcccccgaatatgcggcctgttatcgcaggaaacctttcaggtgccggacgttgcctctcccgggccgttccggcctctccctgcccggggattcaccgttcctcccttatgcgccggctttgcggtagatcgtccgcaggctgtgcgtcatgaagtattgcagtacgccgcgcaggaacatatacagcgtgaaggccagccacagggcgttgttgcctatgagcgtatgcccgatatagaagatgccgaaataggctgccgtagcccagaacatcgagttgcgcatgacgcgcgtctgcgtggcgcccaccatgatgccgtccatgatgaagggcatggcgctggctacggggatcaggatgatccatacgatataccgtccggcgacctccacgatcgtcgcggcgtttgcggccgaatcgtcgatgaacagccccaccaggtcgcgccaccagacgatgtagattcccacgaacagtaccgacacggccgtgccccatgcgatgcagcgccgcaggcagtcgcgcagcgcctttacgtcccgggcgccgatgaaccgtccggtcagcgcttcggcggcatatgcgaagccgtcgttcatgtacgagaagagcgtgaagagctgcagcagcagggtgttcacggccagcagcaccgggtcttccatgcgggccgaagcccccgtgaagaaggtgtagaccgccacgatgcagagcgtacgcagcatgatgtcgcggttgacgatgaagaaggttttgagcggtttcatgtcgaatacctcggcccagtcgatgcccgtcagcaccttgcggtagcgcagcatgagcagcagcagcgaaagtcccacgcccgtccactgtgcgatcaccgaggcgtaggcgatgccgacgatccccatgtccatgccgaaggcgaaccaaaggctgcacaagacatgcaccgcgttgaccgaaatagccgtgaacatcggtatcatggcattctgcatacccgtgaaccagccgttgaacccgaacaggaggatgcccgccggtacggcccagatgcgggcgtagaaatattcgcgcgtcatttcgttgccgttcagtccccacagggccagctcgcccagcgggtattgcagggcgagcatcagcaatcccatgcctgccgccacgaccatcgcccttacgagcatgttggtgcattcgtggaaattccctgcgccgaacgcctgtgccgtgagtccgctggttcccatgcgcacgaacgagcagttccagtagatgaagttgaagatcgataccccgatggccagtgcgccgatcgtcgccgccgaatccgcgccccagtgcccggcgatggccgtcgacacgattcccatcagcggcacggtgatgttcgaaacgatattcgggagcgcgatgcgcagtatttcgcggttcatgttcataggtgcggggcggggatgtccggcaacccctgccggacgtcgtttacgggtgcaaagataaggcaaaagcggcgaatttgtaacggcccctgtcttttatcgccaaatcgggtctgcaatatgccgtaatccggaaaaatggattacctttgccccacaaactcattcaaatacgtatgaaagacaacaaaaacgactcgaccacggtactttcgcgtttcggacgcgacaagcgccagcgtaccgtgactgctacggcggagcgtgtcgagcgtcgcccgcgtttacagcgtgatgctgccgattcggagcaaccgtccagcgaggggccccgtgagcgggcctcctacaatccccatttcacggcggacaaccgccctgcattcgacaaaccgcgccgccagttcggcgacaaaccggcttacggcgagcgtaagtccggcgataaaccccgttacgaacaccgcgacggcgacaaaccgcgccgccagttcggcgacaaaccggcttacggcgagcgtaagtccggcgataaaccccgctatgagcaccgcgacggcgacaaaccgcgccgccagtacggtgacaagcctgcttacggcgaacgtagtttcggcgataaaccccgctacgagcaccgcgacggcgacaaaccgcgccgccagtacggcgacaagcccgcctacggcgagcgtaaatttggcgacaagccccgctacgagcaccgcgacggcgacaagccgcgccgccagtatggcgacaagcccgcctacggcgaacgcaagttcggggataagaaatacggcgaccgtaaattcggtgacaaaccctataagccggggccgaggaagcacgacgacaaatctgcttcctacccgaaattcacgcccgaaaagcaggtcggcgaaatgcgcctgaaccgttttctcgcgcagtcgggcctctgctcgcgtcgcgaggccgacgattttatcaccgcgggcctggtcacggtcaacggccagatcgtcacccagctgggcaccaaggtgcttcccaccgacgaggtgaaattcaacgacagccgcgtgcagggcgagaagaaggtctacctcgtgctcaacaagcccaagggttatgtcacgtcgctcgacgacccccatgccggtaagaccgtcatggatctggtcgaaggtgcctgcacggagcgcatctaccccgtaggccgtctggacaagaacagcctcgggttgctgcttttcaccaacgacggcgaccttacgaagcagctcacgcacccctcgtatctgaaaaagaaaatctaccaggtgacgctcgacaagcccctggcgcgtgccgatatggatcgcatcgccgagggcatcacgctcgaagacggcgaaatcttcgccgacgaaatttcctatgtcaaggagaacaaacaggagatcggcatcgagatacactccggccgcaaccgtatcgtgcgtcgtattttcgaattcctgggttacacggtcaccaagctcgaccgtgtctactacgccggcctgaccaagaagaacctcaagcgcggagcctggcgtttcctctcccgcgaggaggtcgaacggctcaaatccggccagtacgaataggtccctgcattccggtctttgccggaggtatgagtcgggtagaataagaaggaggctcctgtcgagggagcctccttctgttttaacagcgataatcccggcatatccgggtggttgcgggatgtccccgtattcctgcggtatgacggcaattccggtgtgcccggaaaaccccggccttccgcgcggcggaagcgtatggtgacgggccgtacctgttgccgccgtacctgttgccgtcgtgcctgttgccgctatgccagctgcacccgtcggccgccgtctcccggctgctgtctcccggcctttgctgtctcccggccgccgccgtttcttgtcctccgtcgtttcttgtccgcgccgtctcctgtccgccatgccgccgggcaaaagccgcctgcccgcacttgcccgcgctccgggcgtcagtgcgtcgccttataccagcctgtgtgctggatattgttcaccacgatcccgctcgtgctcggcgcgctggtcgaaatgcccgaataggtcgtgatcggccgcttgccgcccgaatagaaatactccgtatgcagccggtagcgttcggggacggtgcgtgcgagctgttcgtcgaattcctttagcagggcggtgtcgtcgcacagttggtagacgtaatccgccaggtcgtagaaccgcgtcggggcgtagaggtactcgtattgctgcaacggtttctccgggtcggggatatacgcgggcgatgcattgttgatgaggcgcatgacttctgccatctgttccacctggtcgcataccgtcacggcgatcgccccgcagttatagttcggggcctcgtattgctcgtagaattcgtagaaactccggcatacgccgtccaggtcgtatcccgtgccgccgtcggcgaacaggtagggcatcaccaggtcgtaaggataaccgtaggccatcacctcgcagggcgaggcgatcaggtgcctggtgattttgcgtaggtcgtacgccacctcgatcgacgacatgaaacagtcgtcgaagaggatgtattcgaaccggattcctgcggccgttatcgcctcggcgaaggtcgtcgtgttggtacaccgcgaaccgccgtcgccgaaccagcgggtgaactgcccgtcgggcgaaacgtattcccagtgccatttctcggggacggttgtcgccgtcggttccgtaccggccttcgcgtcggccgtgctccggcccgagcccgatgcggggatccacgccatgccgtgcgacccgatcgtgatgccgtagcgttcggcgggtgcggtctgcttgatgtagtcgaaaatcccggtgatggtctcggcctgcgtcacgtcgaggtcttcgtacgcgcgcagttccgtttcgcggcactccccgttatcgtagtacagttcgcgtagcgaccctttggtggtgctcgtttgcaggaataccacaagacggctgtcccggaggatattccccgccacggctttcttcacgtcctcgatgttctggaggaaatgcgtgtacaggttccccgaccacggcaggtacatgacgaccgtctggggtgcgacggccgggctctgcaccaccgagatcgtggcctcggcccttcccgacgacaggcgcagcgccatgctgcccagcgccttgcgccgggtcgtcgtgttgtcgtcctgtgccctcaccgttaccgtcgtctccccgcggccgcctcgggtgggggagacgtcgaagccgcttcccgtggtggtgagcgaccacgcttcggtcgacgacaccgtgaatgccgcctccgaacccgccgtgctgcgcaataccacttcgtcctgcgtcgtggtcagccctgcgcgttcctctgttttttcgcacccggcgagcagcgtcactgccagcagcagccacagcgtgcgccggattatttgtaggtacggggtttcaggttgttgaattgccatgtgcggtcacgtttataggtatatccttcgggcttgttccagtatacgcggccgaagtcgtaatagagccctttgcgtttcttgtcgccgaccatccggggcgccgtgaaggggatgaattccaccgtacggctgatgatgcggctcttgccgtaggtgtaaccctccgatgccatcacgtcgagcgcatggtcgaacatcaggatatggcgcggggtcttttgcgtgagggcatctcccgaatcctcgatcgcgcggagcacccccttcaccttgttgtaatacatcttctcctgcagcttgttgcccagtgccccgtgggcataggccatcaggttcagaatcttggggctgaacgggtcgcgggcgagcgcatcttcgcccacgtagagcatcgcgtcgagcgtttcggccagcgggttgtcgggatcgagccccgatgccagcatcagcagcttgtccaggtcggggttcgcctccatcggtttgtagctctcctggtgggcgtagccgtagtagaggtagtggtaatcctcgtcggtgagcgtctcgtcgcccgcgttgtagcgcatcatcagcgaagtgtagtagaacggcgaatcggggtcggacgtcttggcgacgatgtcctcctcgacggggactttcgccgcggccagcgccgggagcaggagcaatgtcagcagtaaatttttcatattcgtattttaggcactaacgctcaaatcagcgcaaatcgtattccgcgatcagtttgcggaacttttcgcgcagcgcccccgaaccttcgacgagcggcagccgcatcgtcgggccgattatgcccatttcggccagtgcgcacttcacccccacggggttgccctcttcgaacagggcgtgcaccgcttcgtcgaggcattcgtatgccttttccgcacggtcgaactctccggccttggcgtagttcacacactccatgaaccgcttgggaaaagcgttcgcggccaccgagatcacgccgtcgccgccgcggcgcatcagctcgagcgtcatgccgtcgtcgcccgacagcacgatgaacccttcggggcgccggtcgaggatgtgctgcatctgttcgatgtcgcccgatgcctccttgatgccgatcacgttcttcatcccgcgagccagtcgcagcgtcgtctcggccgtcatgttgacgcccgagcgtcccgggatgttgtagaggatcaccggcagcggcgagtgctccgacacggtgcggaaatgctggtagagtccctcctgcgagggcttgttgtagtagggtgtaacgctcaggatggcgtcggcgccccgcaggtcgaattcgcgcagctgatccagtacctccgacgtcgaattgccgccgcagcccattaccagcggtacgcgtcccgcgatgtggttggtgatgaacatggctatcacggcgcgttcgggcatgtagagcgtcggcgtttcggccgtggtgcccaacgccacgatgtagtccacgccgccttcgatcacatagtcgatcatgcgtgccagcgcctgatagtcaacttttccttcgggtgtaaagggggttatcatggcggcccccacgccgcagagcttgtgtcgtatcatatgattctgtttggcattatgtagttttttatgcgtattccttttccgcggggctcagaacaactcgccttgttggacgggttcgccgtccccgctgtccgtcgcggccggggcgccattgttcctgcctccggtatttgccgttgttgcgccgtcggcttccgtcccgtttgccgccggggcttcctctccgccgaccatggcgatgaactcctcttcggaaatgatcttcacgcccagcttctccgctttcctgagcttcgccgggcccatgttgtcgcccgccacgatgtaatcgacgttggccgatacggccgcgaggttcctgcccccgtgcatttcgatcagctccttcatttcgtcgcggctacgcgagaacttgcccgacaccacgaaactgcggcctgcgagcgactccgacgccagctcccgcgcctcctcctcgaacttcagccccgcggcacgcaggcggcggatgatggcgtggttctgctcgtcggcgaaatattcgatgatcgcgtcggcgatgcgcccgcccacctcgtcggcctgggtcagctcctcgcgcgtggcccgcatcacggcgtcgagcgagcggaaatgctccgcgaggtatttggccgtcgtttcgcccacgaagcggatgccgagtccgaacagcacgcggcggaacggcacctcgaccgatccgcggatgctgcgtatgatgttgtcggccgacttctcgcccagccgcggcaattccgctagctgtccggccttcaggtcgtacaggtcggccacgtcgtgcaccagcccgttttcatagagcagttccacggtctcctcgcccagcccctcgatgtccatcgccttgcggcggatgaaatggatgatgcgtccgacgatctgcggcgggcatcccccctggttggggcagtagtgcttcgcctcgccctcgtagcgcaccagcggcgtgccgcattcggggcatacggtgatgtattcgaacggtttgctgtccgcaggccgctgcgagaggtctacccccgtgatcttggggatgatctcgccgcccttctcgacgtatatcatgtcgcccgggcggatgtccagcagggccatctgctcggcgttgtgcagcgtcgcacgccgcacggtcgtcccggccagcagcaccggttcgaagttcgccacaggcgttatggcccccgtgcgtcccacctggaacgacacgctgtccagccgcgtgagcgcctgctcggccttgaacttgtaggccacggcccatttcggggccttggccgtgaatcccagctgccgccttacggcgaagttgttgaccttgatcaccacgccgtctgtcgggaagggcagggcatggcgcccctcgtcccagtgtgcgatgtaggcgtcgatctgctccgcagtgcggcatatgcgcgccgcgtccgagactttgaatccccactcgcgggctttctgcaggctttcccagtggttcgtgaagggcaggtcgtcgcccgccaactggtagagcgtgcagtccaggccgcggcgtgcgaccaccgacgacgcctgctgcttgagcgtccccgccgcggcgttgcgcgggtttgcgaagagcgtctccccggccgcctcgcgctcggcgttgattttgtcgaacgaggcgtagggcatcaggatctcgccccgtatttcgaagtagggcggccagtcgtcgcccctcaggcgcaggggaaccgtgcgcaccgtacgtacgttggccgtcacgtcgtcgccctgcgtgccgtcgccgcgcgtcacggcacgcagcagccgcccgtcctcgtaggtgagcgatatggccgtgccgtcgaatttcagttcgcagacgaactccgtcggcccggcctccttttcgatacgggcgatgaattcatgcagttcgtcgagcgaataggtgttgccgagcgaaagcatcgggaaccggtgctttacgctccggaactccgacgtgatgtcgcttccgacacgcaccgagggcgaattggggtcggacagtttggggtgcgcccgttccagatcctgcaattcgcgcatcatcgtgtcgaattcgaagtcggagatctcaggggcgttttcgacgtaatatctgaagttatggtactcgagctgccgccgcagctcttcgattttctcgcgtatcataatataagtataacctgcgtaaaggtacgtattttgtttataacatcctgcaaattcaaaaaaaatgcaaaaaaaaattacggatgtggtgcgatatgtaaattttgcttataattgcagaaaatttccaagcattactatggctaaacagaatacgacgaagaaacatatcgtaacgagctttcacaacctgactcccgaactgcaggatgccgtaaaggaaaaatacccgctggggttcaccgaagcgatgatgcgcgtggacaaacccaacggcgattttttctatgccgtgccgttcgataccgacgagatcgcctatatggtgaagatcgacgtgaagatcgacgacaatgcgcaggaggaggacgacaaggattactacgacgacgaaatcaagggcgccgacgaaatccaggacgacgccaattccgatgacggcggcggcgactccgacgacgacgtgaatatctgatccggccatgctgcgctttatccctgttctcgctctgttgctgttcacggcctgcggccttgcagagaacgagcaggatgataagaacaagcgtatttatatcaccttcgcagatcccgccttcgaacgattctgtctcggaatgttcgatttggatcacgacggacgcatttcgcgctacgaggcgcagcgcgtcctggcgatggattgctccggccgcaacatctccgcgatgtgggagatcggcgagttttcccgcctgcgcgagctcgattgcagcggcaataacctcacgcggctcgacctgcgcaaatgccccgacctgcaaaagctcgattgcggcgacaacgaaatcacgtcgctcgacatcgacggcctgcgcgggctggcggtgctcgattgtgccgggaacctgctcgcacgcctcgacctgaaatccaactcttccctgcgccagctcgattgccgcggcaacctgctggtgacgctcgacctgaccccctgctcggggcagttgcaggccgacacgcgcgacaaccctttccttacgaccgtctatcgcctcggctcgcagggcgtcgattataacgggccgaccgaggtggtcgtccgctgaccggagcctccgtttcctgcccccccccgcatcgttttccgctggctgcccgcgtccgtttcctgctggctgccgtgtccgttccccgccgcctgcccgcgtcgttccccgctggcagcccgcattgttccccgcgtcgcttcccgtcacctgtccgcgtccgcccccccccgcatcgtttcccgctgcccacatcgttccccgttggctgcccacgtcgcttcccgccgcccgaccgcatcgcttcccgtcggttgtcgcgtccgtttcctgccgttcccggcgttgtcttttgccttccgcagcgggtttgcggcacgcttatttctgatacattgttgaaaagtcgccgccgcgggttgggtatttcggataataattcttacctttgggtgcaaaaaatgtcttttgcgccataaatattaccggatacaatgaaaaaagttgacgttatcctcggcctgcaatggggtgacgagggcaagggaaaagttgtggatgtgctgacgcctggctaccaggtcgtagcccgcttccagggcggccccaatgccggtcatacattggaattcaacggcgagaaatacgtgctccgctcgatcccttcgggcatattccagggcggtaagaccaatatcatcggtaacggtgtggtgatcgacgccgtccttttccgtgaagaggccgaagcgctcgcggccagcggccacgacctcaccaagcagctctgcatttcgaagaaggcccacctcatcctgcccacgcaccgcatcctcgacgctgcgtacgaggcggccaagggcagcgccaggatcggcaccaccggcaagggcatcggcccgacctataccgacaaggtcagccgcaacggcatgcgcgtgggcgatgtgctgagcgccgatttcgaaaagatatacgcccgcgccaaggctcgccacgagaagatcctgcgcggcctggcctacgagtacgacatcaccgagttggaacagaagtggtttgcggcggtcgagtacctgcgtcgtttcaacatcatcgacagcgagtatttcgtcaacgagtgcctcgccgcggacaagagcatcctggccgaaggcgcccagggtacgctgctcgacgtggatttcggttcctatcccttcgtcacctcgtcgaacacggtctgcgccggcgcctgcatcgggctgggcatcgccccgaaccgcatcggcgaggtctacggtatcttcaaggcctactgcacacgcgtcggcagcggcccgttccccacggagctgttcgacgaaacgggtgcccggctgcgcgacatcggtcatgagtacggagccgtcacggggcgcgagcgccgttgcggatggctcgacatggtggcgctcaggtattcgatcatgattaacggcgtgacgcagctcatcatgatgaagtccgacgtcatgaacgatttcgagaccatccgcgtcgccaccgaatacgaggtcggcggcaaacgtacgtcgtatttcccctatgaggtcggcgacgacctgaaacccgtctaccgcgagttcccggggtggaaatgcgacctgcgcgccttcacccgctacgaggacttccccgcggagttcaaggcctatgtcgagttcatcgaacgcgagacgggtgttccggtgaagatcatctccgtcggccccgaccgcggcgaaaccatcgtaagatagctattaaccataaatacctactatgaaaaaacagctgaaaattgttgtattggcaaagcaggtgcccgatacccgcaacgtgggtaaggatgcgatgacccccgaagggacggtcaaccgcgcggcgctgccggccatcttcaatcccgaagatctcaatgcgctcgaaatggcgctcgcgcttaaagaccgcaccgacgcttcgacggttcatatcctgacgatggggccccagcgtgccgccgacatcatccgcgacgcgatgttccgcggcgccgacggcggttacctactttcgggccgcgaattcgccggttcggacacgctcgccacgtcgtacgccttgtcgtgcgccctgaaaaagatccgccccgacatcattttcgccggccgccaggccatcgacggcgatacggcgcaggtcggcccccaggtcgccgagaaactcggcctgccgcaggttacctatgccgaagagatcctcgacatcaaggacagcacgctggttatccggcgccgcctgaactgcggtaccgaaaccgtcgagtgccccgtcccggctgtcattacggtcaatgcctcggctcccgagtgccgtccgcgcaacgccaagcgcgtgatgacctacaaattcgccctctccgggtctgaaatcgccgcggcgcccgaatcggaagccgcgcggcgcgccgccgccaagccctacctgcagatcgtcgagtgggctgccgccgacgtcgatcccgacccgcagcagctcggccttcagggttcgcccacgaaggtcaagaagatcgagaacgtggttttccaggccaaggaggccaagaagctcaccgctgccgacgaggatatcaattcactgatggtcgaacttatcgcgagccacacgctcggttaatacgtgcacaggagatgaacaacatattcgtatatatcgagaacgagggcggcaaggccgccgaggtgtgcctcgaactgatgaccaagggccgcgaactggccacgacgctgggcgtgaaactcgaagccgtggtgctgggcgagaacctcgccggcatcgagcacgagctcgccaaatacggcgccgataccgtatggatcgccgacgacaaggtgttcgcaccgttccgtacgctgccccatacggccgtcatgtgcggcctgatcgagcaggagaaaccccagatcgtgctgttcggcgcgacgtgcaacggccgcgatttcgcgccgcgcgtgtcgtcggcgctttacagcggccttacggccgactgtacgcagctggtgatcggcgatcataaggacgccaagagcggcagggagtacaaagacctgctctaccagatccgccccgccttcggcggcaacattatcgccacgatcgtcaaccccgacaaccgtccgcagatggccaccgtccgcgaaggcgttatgcgccgcgaatatgccgccaagccgggtgccggcgaggtgaagaagatccagtggcagaaattcgtgaaggacgcagacctcgcggtgaagatcatcgaccgtgagattgccgagagcaagatcgacatcaagggtgccggcgtcatcgtcgcgggcggctacggcatgggttcgaaggagaacttcgacctggtgttcgagctggccgacgtgctgggtgccgaggtgggcgcgagccgcgcagccgtcgacgccgggttcgcagaccatgcgcgccaggtgggtcagaccggtgtgacggtacgccccaaactctacatcgcctgcggtatctcggggcagatccagcatacggccggcatggacggctcggccatggtcatttcgatcaacaccgaccccgaagccccgatcaacaagattgccgactacgccatcacgggcgacgtcaacgaggtgatccccaagatgattaagtactacaaacaaaattcgaagtaatggctaatttcttttcagacaataaggatttgcagttccacctccagcatccgatgatgcgcaagatcgtggagctgaaagagcgcggcttcgccgagaaagacctctacgatttcgcgccgcaggatttcgaagacgccatggactcctaccgccgcgtgctggagatcgccggtgaagtctgcggcgaggtcattgctcccaatgccgagggcgtggatcacgaaggcccccgcgtcgtgaacgaccacgtggagtacgctgcgggcacggttcagaacatgaaggccatcgtcgacgcgggcctgagcggccttacgctgccccgcaagtacgacggcctgaacttcccgctggtctgcttcgtgatggccaacgagatggtcgcccgcgccgatgccagcttcgagaacatctggggtttgcaggactgtgccgagacgctcaacgagttcgcctcggaggagctcaaggccaaatacctgccgtgggtttctgcgggtgctacttgcgccatggatcttaccgagccggatgcgggttccgacctgggcgccgtgatgctcaaggctacgtggtccgaggagaagcagacctggctgctgaacggcgtcaagcgcttcatcaccaacggcgacggcgacgtttcgctcgtgctggcgcgtactgaagagggtaccaccgacgcccgcgggctgtcgatgctcgtctatgacaagcgcgacggcggcgtgaaggtacgccgtatcgagaacaaaatgggtatcaagggctctccgacgtgcgagctggtcttcaccaacgcccccgcgcagctggtcggcgaccgcaagatgggccttatcaaatacgtgatgtcgctgatgaacgccgcccgcctgggtatcggtgcgcagtcggtgggcttgtgcgaagccgcctaccgcgaggcgctgaaatacgcccaggagcgcgagcagttcggcaagccgatcatccgcttcgcggccgttgcggagatgctctccaacatgaaggccaagttgcagggtgtccgtgcgctgttgtacgagacgacgcgcttcgtcgaggtctacaagcagtacggccatattgcgcacgagcgtccgctcgaaggcgacgaacgccaggagatgaagttctacaaccgcctggccgacggcttcacgccgctcgtcaagctcttctcgtctgagtacgccaaccagcaggcctacgacgccatccagatccacggcggctcgggcttcatgaaggactatccctgcgagcgcctctaccgcgacgcacgtatcatgaatatctacgagggtacttcgcagctgcaggtcgtggcggcgatcaacgccgtgaccaagggcaccttcatggagcagatcgagcgttacgctgccgccgaatacaaccagcccatgcagcccgtcgttgcgaagctgaaggagctgaccgcgaagttctcggaaatgaccgcccatgtcgaagccggggacaaggaactttgcggcttcaaggatttccacgcacgccgtctggtcgagaccgccggccatatcatcatcacctacctgctggcccgtcaggccggcgagtcggaggagtatgccgattcggcgaaaatcttctgcaaacttgccgagggtaagatctcggaggcctatacctacgtcatgaactccacgctcgaagacgtcgcgctgttccgcgccgttgccgaagaggcggagtaaggcgccgtatagcagtatgtaaaaaggttccgcttttgcggaacctttttttttgtacgttgtcagttgccggttgttgccgccggttcttgcttgctgtttatctgtttttcggttatctgcttgccggttatcgggtttgccccggcgatagccgccgccgaagcccccgaggggtttatttttctttcggcgggtaatggagcggggcgaaaaattcgtcgagggtaatattgtaaaacttgcaaataatcgaaatagtcgtcagattcgggaaattcttgccggattcgagttgtgcaattcccagctcggtcgcttcggccaactgctcctgcgattggtggttgtgcatgtgccttagttccttcacccgcagaatgattttttgaagcaattcttcgtcgcggcgttgttttttccgttccattttacaaaaaaatggaataagtcgattttttgcacttaaacatgtttaagtattaagtaatttacttatatttgtaccagtaaaattcagaatacagaaattatgctaactttgcagaacaatacggcatcgccgtaacgacataccataaggttaagacaacctttacgccgttaacaaacttccgactgttgctatgacaggtttatgcgtggtgtaaatattgtctgaaacccttgctatgtcccggcctcgtgccggggcgggctcgggcgtaagggcaactaccatgcaaggctcggaaggcctgttaacgggagtttgcacctgcgcccttgctttttttcgcaggccgtatgccgcctccgggtacggttcgggcgatgaattcttctccccctgaacagcgtcactattgttcgtccggccgtacctgtttttttcgccccccccctgtttttgcctcccggtgcatcccgcaatggaaaaggcctgcgcacgtcatgcgcaggccttttgcccagttgccgttgcaggcctacgcctgcgcagcttccttttcggccatcacgcagcgcgtggtgccgaaaatattgaggttgaggtgcccggcgatgtaggccagcgccttctgtgccttgaccgagttgccggcttcgtcgagcggcggggcgaaggccgctacgcccatcacgcccgggacgacgcccatgatgccgccgcccacgcccgtcttggccgggagccccgtcgtgaaaagccagtcgcccgtgtgctcgtagaaacccacggtcgccatcatcgaggcgattttgggcgacagctcgggcttgaagacctgttgtttggtcacggggttcttgcctccgttggcgatcgtcgccgccatcgtggcgagctgcttggccgtcacgccgatcgaacactggcgcgtgtagatgtccagcgccatgtccgggtcgtcgtagatgcggttgtaattcttcagcagccatgcgatcgacttgttgttgaagttggtcgccgtctccgacttgtacaactcgtcgatcacctcgacctgcgagcctgcgagcccttcgatgaagcccgtgatcgccttccatttgccgtcgctgtcgcctacgggctgcaccatcgagcaggcgctgatcgctccggcattcaccagcggcgtcgagggatggtcgttttcgagcaggatcgccatgatcgaattgaaaggcagccccgtcgcatcggcgccgatcttcgtcagcacctcctgtgcgctgtactggttcatcgccaggatggccgtcgggactttcgataccgattcgatgccgaatttgtaatcggtgtcgcccacggcgatcacctccccgtcgggcaggcaggccgcgatgccgaagagggtcgacggtacgttggccaggtaggggatatagtcggcattcttgccgcccgtttcgttcttgcagcgctcgtaggcctgctgtacggcctcgcgaaccgttgcgttgtcgattttctggatcattgtctgatgtatttaccgatttatttgttgtgaagttccgtatccgaaggtttcgccatcggttcgggagcgttggtatgtaccggagccgctacgacgggctgctgctcccagtggaacggggcgaagtcggccgcggcctcggggtctttccacgacggtttgcgcatggcgtagatcacgaacggggcgcccacgactaccacgcaaccgatgatgagcaccgagaaccaaacggtgttgctgccggtcgagatctggctgggcggtacgaagctcaggacgaaggccagcagggctccgcagaaacccagacagcccaggaaccacatcaggccgttgcccttgcccaggcggaacgggcggtcggtgttcttcatcttgtagcgcagcacgatcgctgccgagaacatcagcatgtacatgatcaggtacagcagtacggtcagctgcgaaagtatctggtagaacgactgcaccgagggcatcaccacgaacagcagcgccagcagcgtcacgacgcagccctgaatgagcaggatattcttctgtacgccgttcttgttggtcttctggaagaacgggggcaggtaacccgccttacccacggcgaagatacccttcgaggggccggccacccaggtcagcacgccggctagcacaccgaacatcagggcgatggcgatgatcgggcccgcccacgacatgtgcaggtagtggaaatagttgtcgaagcccaccagcagcgactgcgtgaggctgatgtccttggccgggatgatgaagcccagcgagaaagtacccagcacgaagatgcagaccgttacgagcgaaccgatgatgatggccttggggtagttccgcgacgggttcttcacgtccatgacgtgtatacccatcatctccatacccgcatagaacaggaagatactgctggccagcaccaggttgtcgaatttcgacaggtcggggaagaaaccctgcgacatgtccatgtggttgtgtccgccggtcgaaatgtagatgatgcccagcaggatcagcaggcctgcgggaatgatcgtaccgatcataccgccccatttgctgatcttgccgacccatcccaggcccttgagtgcgatgaaggtggcgatccagtagattgccagcaccatgcagagcgtgaagaccttgttcgaggccagcgtcgcgtcgtgcgcgtcgttcatgccgatgaaggcgatcgacacggcaccgaacgtcagtacggtggggtaccagatcgtcgactcgatccattgcagccagatggccaggaaccccgtgcgggcgccgtacgcctcgccgacccagcggaatacaccgccctgtttggtggagaacatcgcggccagctccgcggcgaccatggccgtcgggatgaggaagacgatggcggcaaacagatagtagaatgccgatgaaagtccgtagacggcctcggcggggaggccgcgcagacttactacggcagtcacgttcataatcgcgagtgtcatgacactcagtttgaaccctgtgcttgtggtagttttctttacatccataattcggtttgattgaaattggttttaacgctcattgaggttgcaactaccgtgcaaatctgccgtacaggctctttttgcccgggcgatagcggccgtattgccgaaaaaaactatatttgcacataaactttacgcctatgtaccgtatcgcgctaatcctggccctgtccctcttcgccgcttcctgcggcggacgccgttctcggccgcagcagacggctagcgtgccgcagcctcgcgtattcctcccggcgatcgcgccggcgcgcctctcgccccaggagcagcgcgactacctgcgctggcactattgggatcgcttcgatttcgccgataccctgttcgtccgcgaggccgataccgcgcaaatggtcgaggcctatgcccggtgggtggccctgatctccgaccgtccggccgacgccgcgccgatggattcgctcatgcgccgcgcctccgcctcgcgcccgatgctcgactacttcacgatgctcgcccaacaggtgatccacgaccccaattccccgctgcgcaacgacgaattcttcatccccgtgatgcaggccgtgctggcgagtccctattacgacgaatacgaacgcatcgggccggcctacgacctcgctatggcgtcgcagaaccgcctcgggcagcgtgccaacgatttccgctatacgctcgcctcgggcgccacgggcacgctctacggcgtgaaggccgaatatacgctgctgttcatcaacaaccccggctgtgcgatgtgcaagcagttgcgcgagcagatcgccggctcgcccatgctttcggaaatgatcgagcgcggccgcctcaaaatactggcgctttatcccgacgaagacctcaccgagtggcggaactaccgcgaccatatccccgcgagctggatcaacgcctacgatgccggctgcttcgtccgcgaaaacggcacctacgacctgacggccattccgtcgctctacctgctggacagcgacaagcgcgtgctggtgaaggattccaccgacgtgccctatatcgaagaggttatcgaccggagagggtagggcgtcccgccctctccgccgtccttccccatcatttcccctctctgtcgttcccgtcccgccatatcctctcttcctgctttcttttcgctgctgtttctttttctgctgtccttcctctgccgttcctccccgccgtccccgcttctgcgcgtgcgggcatatcgcatccgctataagcgttgcttatcgccctataaaaaaagacaatcgggattttatccggattttgtgcctaatcgttacctttgcactgcacaaacagaaaaactaacactcaaacattattacgattatggcaaagaaatggcgttgtaccgtatgcggttacattcacgaaggccccgaggcacccgaccagtgcccgatgtgtaaagttggcaaggagaaattcgtcgaggtcatggagcaggagggcaacctcgaatttgtgaccgagcatgtcattggtgatggcaagggcgccagcaaggagctttgggaaggtctccagaaccactttatgggcgagtgcaccgaggtgggcatgtatcttgcgatgagccgccaggccgaccgcgaagggtatcccgagatcgccgaggcatacaagcgttacgcatgggaagaggccgagcacgcctcgaagttcgccgaactgatcggtgaggtggtctgggacaccaagaccaacctctacaagcgcatgaacgccgagagcggcgcctgcgaggacaaaatgcgcctggcccgcatggccaaggagcagaacctcgacgccgtgcacgacaccgtacatgaaatggccaaggacgaagcccgccacggcaaaggtttcgaaggcctctacaagcgttatttcggcaaatagtattaggtattgcaccatatgcgaaaagggcggcaccaatgtgccgcccttttcatttgcgcatttcgcgcagcttcataaacagtaaaaacttgtctgtgagccactcgtacccctcctttgcggcacgtgccacgtcgtagaccgtttcgacctggtcgcggatgcgctccacgccctcgcgtatggcgagcaggtagatcactgctgcgagcacggcgaagaatcccccgacgatgagcgacgaaaggatgaaggagcccgtcacctccgacagccatacgaccagtgccgtaagcagcaggaagatggcgatcgaggctgtcatcacgaagaagaccagcgccgcgacgaaggagccgcccgaagtttttctgttatccatccccatgagacgtcattcaggcgatgtttacttttcctcgcatttgcagcgtgcctcctcgaccttgccgcgcacttcgtccactttttcgcgtaccttgtcgacttcgtcgccgatcaggtctttgatttgtttgcggagttccgcacccgactggggcgtgaagagcatcgtgagggccgatccgataatcatgccgcccacgagcgatgcgatgacgattcctgtgtttttcatagctgttggtgtttatttgattcagcccttcgagttgcaaagtccgcgccaaattgttacctttgggaacatgatccccgatccctgcacaaccgtggccttcaccggccaccgtacctattgcggcgaggccgccgccgcgcttgccgccgccatccgcgggcttcatgcccatggtttcaggacgttcctctgcggcatggccgtaggcttcgacctggccgccgccgaggcggtgctcgaactgcgcggttccctccccgggctgcggctcgtcgccgtagtgcccttcggcgggcaggaggcgcgcttctcccatgccgaccgcgcccgctaccgcgctgcgatggcttcggccgacgatgccgtcgtcctgtctccggtctaccgtgcagggtgttatgccgtgcgcaacaactacctcgtcgaccatgcctcgctgctcgtcgcctggtacgacggttcgcccggcggcacgcgccatacggtttcccgcgccctgcgccggggcttggaattcgtgaacctccacccgctgcgtgccggagtcgcgctgaccgaaccgacgcttttctgacacggttcctcccgcggcacaaaaggctcggacaaattgtaaataatatatgaataattcatcggaacaactcatcggcaagcacccgcgcatagaggccgtggatgttttacggggttttgccgttatggctattctcctggttcacaacctggaacattttatcttcccggtctatcctgccgattccccgggctggctgaatgcattggatcagggggtcttcaacgtcgtctttaccctgtttgccggaaaggcctacgcgattttcgccctcctgttcggattcacgttctacattcaaagcgacaacctgaagcggcggggcggggacttcggctgtcgtttcctgtggcggctggtgctgctggccggtttcgcgaccctgaacgcggcttttttcccggccggggatgttctgctgctgttcgtcgttgcgggactcgtcctgttttttacgcgcaactggggcgacggggctatcctcgccgccgccgtcgttttcctgttgcagcctgtcgaatggtaccactgcatagccggcctgctgaatccggcccaccggttgcccgacctgggggtcggtgaaatgtatgcccgagtggccgaatacacgaaagccgggaattttggggatttcatcctgggcaatgtcaccttggggcagaaggccagcctgttgtgggcggtaaacgccgggcgtttcgtccagaccgctgggttgttcctgctgggtttctatatcggcaggaaacagttgttcgccgccaccgaaaagaatctccgcttctgggtgaaaacgctgatcgtctccgccattaccttcgcccctttgtatacgctcagggagcttgtcacgaacaacggtgcaatcgtcgggcagacagccggaacggcgctcgacatgtggcagaagctggcttttacgctggtcttggtcgcttcgttcatcctgctttaccagcgcaggaagttctgtgccgccgttgccggcctgcgcttctacggcaggatgagccttacgaactacctctcccaatccgtcatcggggccttcgtctatttcccgttcggcctctaccttgcccctcggtgcggatatacggccagcctgttggtcgggattctggtgttcctgctgcaggtgcggttctgcaaatggtggctggggaggcacaaacaggggccgttggaatatatctggcataaatggacttggatcggaaccgataaatagcctgccggtttccgcttcccgctgccgcttctcctcccgcttcccgctgcctgctgcaaagcaaaatccccggaggcgatagcctccggggattttcaaaatgtccctgcgcgggattatttccagttcagaatcttgtggaaatcgtattcctcggggtttgcgacatactgcttcgcagcctcgtagtccgcaggcgtgatggcgttgatgatgttgtccaccaccgacgagaacttgtccgacttgatgtccaccagacggggcggtatcttgcccgtcgtcggatcctgcaggtctttcaggtagagcgggttgacgttgccttccgaatccacgtagaccatgcatccggtcttgccctcggcaaagagcttgtgtacgccgatacccagttccgagcagtacgtcaggtcgtatgcgatcggggtctggcagcggatctcgtaacccagctccacggggcggctcttgaccttgaggccgatctccttgagctttttctcgatcatctcgttgaagatgtgcgccttcgagaccttgcccagctcggggtgcccgtgctcgtcataggtgaaatggatgccgctcttgcggatctcctcgtcgctcagtgcgtggaatacgccttccgagatgacggcggcgccgtagtccatgcccatgatcttacgcttgatgatcgacgagatgacgaggttcacgattttttcgaccgtgatttccgtcttgtcgaacatttcggggatgacgatcatcgggtagtggcaggcctcgccgatgccgaatgccaggtggccggcgctgcggcccatggcagccagtacgaaccagttgccgctcgtgcgggcgtccacgtagacggcgcgtgcgatgacggcacccttgtccttggccgattcgtaaccgaacgtcggcgtgcctttgggcagcggcaggtcgttgtcgatggtcttgggcacgtggatgtttgcgatggggtatttcttggcctccaggaacttggcgatgcggttcgcggtcgatgccgtgtcgtcgccgccgaccgtcacgagcagcttgacgttgttgtcggtgaagaacttgaggttgaagttgttttcgaaatccgaatccttgggcttgaaacggctcatctgcaggaacgaacctccctggttgaagatgccgtcggccatggggtagtcgatgtccaccatgcggggcgacgggttgaagagccccgtgtagccctcgtgcaggccgattacgcggtaacctttgcggaggaaagtctttgcgacgctgcctaccacggtgttcataccaggtgcggggccgccgccagtcagaattgcgattgcttctttcatgattgtgattgggtttttatgtttgaacctgaattaacctaaattgccgcccaaaattacgatttatttttcaaacgggcaaaaaaatgcccgccctcttgcagaatgcaattttatttattatattgtgaataaaataaagcgcaggctttataataaacatgtctcactaaaaaaaatgttgtcatgaaaaagttcctttttctccgaaaaagcttattcttggtcttcatgtttgctggtggaggagtgcttatgtgtggttgtggcaaaaatgatttgattctagaccaaactattccatgtgattctaaaacgaggggagccgatgaatatcattggcggtgtcctagaccaggatgtggatttttaaattcatgttggcagcaaaaatgtctggtctgtggtgaggattatagtgaacctcatgggtatttgttaactgaattgatgagtataattgtgaacaaggtgacaactggcccagatttcggggtgactcctgataagatcgagttaccgaatggcgattttcttctttcgcagcctgaagagtggtatgaaacttcttgcgccttgaaatattataataatctaaaaaattcatcgacctacaggttgacaccagggtatgctgaaggggtcgattttgcatggtttcggacaacacatgtacttttcccgaaataccatagtgtaattgcggtggagagagcgtatgataggtttcgattgaatgaagggcgtaatctgacgggttttaaaggacagggaattttagatggcagtaaggctgcagtagaggcatttgccacatgtagataaatagtgtaattcaccttaatatttttgctatgaaaatcatatcaaaatttctgtatttggtcatcctgatgccaatattggctggctgtgcggcaaccaaatccgcctctgcccccgaaccccgatccgttgacggggacgccgcctcggccgccctgcacgagcaggcgctccgggcgctcgatgcccgcatgttcatcatcaaaggggatgagttttacctgccgggcgataaaatcccggtgaaacaatctccggacagttacatttccatgcaggggacgcatgccgtcatccggctgtcgcccaacctctttccccgcagtacgtggcgcaccctgaacatcgaggacgatgctgccgaaatgacgttgctcaaacgcaagcgcaacggcgacctgcagtaccggctcctgatcgtcggcccccaaaacgcgcaggaccgggaggtgatcgtgacgttgtataagggttcgaacaagtgctttgtccggatcaataaagatctcaacagacgcagccattacctcaatttcaccgggcatatccttccggcaggggagtgatgggcctgcggccgcccgtcgcacaggctgcgccccgcccgcaaagaaaaacggtgtccggaattccggacaccgtaaattacataaaattcagtgcttggatatattgagtaaatacagctcttattccctgaatttggaggacgccgggttattcaaccacggttacgttcacagcctgctcgcctttggcaccgctgccgacttcgaattcgactgcctgcccttcgttgagcgacttgaaaccgtccgtcacgatacccgagaaatgaacgaagatttccttgccgttctctcccgtaatgaatccgtagccttttttgctatcgaaccatttaactttgcctgtcataaaaatgtaaattaaaaagtttgtacttggcaaagtaaaataaaaaacattggctttcaaaactttttggcatgttttttcatctttggcagaaaatttttatctttgtcctgaagattgtttttaacgtcgacgcaatatgaacaaaaaactgaaactcgcacttgcgaccctgctgggattctcggcagcctgttccacggtcaagaatgcgcccgccaagggcgagggcgaacagcaacaggaagccggtgcgcccgaagtcagggattcggttgcacccccgcgcgtgatggtgatgtacggggttcgccctcccggacagaaaacgatcggcgtgcctctcaaggagtcggcggtcggccctgccgaagacgagcagctcgaccccgtagccgagagacccgccgacgacacgccctatatggacacgaagggcaagaaggctcccgaaggggggaagtaacccatgtcccgtcgccgcctggggctgcgcaagcgtctggccctcaatattttttccgacctttactcctcgactgtcgccgagcacaggctcgatacgctcttctgggaatgtacgttgcgctgcaacctctcgtgccgccactgcggcagcgattgccgcgtggatcccggtgtgcgggacatgccgctcgaagatttcctgaaggtgctcgacgaggaggttacgccccatgtcgaccctgcgcaggtgctcgtcatcttttcgggcggcgaggtgctggtacgccccgacctcgaacgcgccggggcggaggtcacccgccgcggctatgcgtggggcatggtgaccaacgggctggggctgaccgaatcccgtttccgcagcctgctcgatgcggggctgcgtacggtctcggtgagcctcgacggcttcgaacgcgagcacaactatatccgctgtaatcccctcagttacgaacgggcgctcggcgccctgcgcatgatcgtccgcgagccgtcgctcgcctgcgacgtggtgacctgcgtcacgggggcgatggtgcccaggctcggcgatttttgcgggatgctcgtcgccgagggcctgaaacactggcggctcttctcgatcttccccatgggccgtgccaaggacgacccgtcgctgcgcatgaccgacgaacagttccgtgcgatgctggagtttatccggcagacccgccgtgaggggcgcatcgacgtcagctatgcctgcgaaggcttcctcggcgggtatgaaaccgaggtgcgcgaccatttctaccagtgcgccgcgggcgtttccgtcgcctcgatccgcgtcgacggcgccatttcgggctgcacgtcgatccgtgccaatttcaaccagggcaatatctaccgcgatcggttctgggacgtgtggcaaaaccgcttcgaacccttccgcaaccgcgagtgggcgcggcgcggcgaatgcgcctcctgcaagatgttccgctattgcctcggcggcggtatgcacctgcacggcgacgacggcgggttgctctattgccactatcaccggctttgacgcatatcccttcctgaaaaaggggccgccccgtgtgggcggctgtttttttctcggttgtccctttccttgtcggctccgatcttagctattccgatctcgacggctcatcctcggatgttctttcctcggcggcttttacccacggcattgccagggcacctgtgcccgtgcccgtttattcgggcagaagcccgtccaatgcgagcccctcgtcaaacagcctcgtcttgtaatcgacccccagcttgtcgagcagccggacgatattgaaccctgtggcatacatatactgggatatgtccgtccggtagagccagtcgttcgcgtcaaggtcgtagccgcccggacaggcatggaactcgatgtaacgcgccgtgccctccatcgtttcgtaaacccgttccgctccgactgcttccggggccagttcgcgccgcattcttgcatggcgctccgcgcgcagtttccggaacccgtcgatgtccctgcggataatctctgcatcggtttgcctgagtgcatccagcaggaatgcgttttcccggtctacggattctttgtaccagccgtatctttgatagtgtcctaccagctccgacgaagggatgaggctcgctcccgaagcttcgaattgcgcgagatacgccggatgccggaattggaacccgtggaaatattcatgcagcaccatcgtccgccatatggctacctcttccgtgccgggaatgcagcgggccgtaatctcgggcgaactgcacagcaggtatgccgaacggtagtcgtatgccgaaccggcatcggccgggtctaaggaaatcgttccctgcatgtggaattcgagcgagtcgatcgtgggcgtcgtatagattttcaactcaccgtccctgtaacgcagcgttgccggatattgcgccagaaaccgcgcttcgggatttacggtatagcaaagcgagtcggtgaagtagaccagcggcacttcgaattgcggatcgtcgaatcccggccagacggctgcggcaacctgggctttcagctccagcacctcgcaaattcgtgtcacggcgatccggtcttgggcggtcatcggtatttcacaaccggatagcgcggtgccgaacagcaggcaaaaacagatatggagtagtttcatcgtggggtaggttaggatcaatacgaaaaaagaggatatcgaatatcctcttttttcttgtcggggagactggattcgaaccagcgacctccaactcccgaagctggcgcgctaaccggactgcgctacaccccgaacatttggggctcttatcgttttaagagcgcacaaagataagtcgaaaatccgaaaagtcaaaataatttctgcaaaaaacgccttcccggttatatttcggctgccgactcttccgtcagcgcttgcagtaccccttctgttgcctatccccgttgcctttctctgttgccccttccatcatcccttgcggtacctttccaatcgtcctttccgtcgtcccttccattgtctcaccctgtttccccgttccgtctcccgcctgcaagccccgtgctttcgaactgctgctgccgggtggctgcgatacatggtcgcggacggtctgcggggcggacagtttccgcagttcactatacccgccgctgcacatcggtttacacaaatagtcgaaaaacgtgttaaccgagcaaaaaccggcaaaataggatgctttgtggcaaaacacaaaaaagccttccagagctgtctgaaaggcttttttctcgtgtcggggtagcgggattcgaacccacgaccccctgctcccaaagcgtaattcggcgatttttgccgattttcagcagtttttattttattttgtaaatagctgtttttcagatgcaaatgtagtgattttatttcgatttgtttttggtgatttgatttaattatgtatatttgtttcgaaattgtttacccgaatccaaatttataaacagatgaactactcgaaagatggggtaactgtcgccgtggtgattgatacaagccacccaaagaaaaacggtttgtttccggtgcgtattcgtgtcacttatcgcaggcgattgtgttattacactactggtaaagatttgaccgctgaagaatgggaaatgttgccgactacaaaggtgcgtgcacttgtggcgatccgtaaggacatcgaaagcagctaccagatcgtgcgggcggctgttgaggagttggcaggggctggcgggttctcgctcgacgctctcaataaccgactaaaaggcgcagcatccgatacggttaatacgatgtttcgggcgaaaatagcagaattggagaaggccggacgcataggaaatatgttgatatacgacaatgtattgaaggggttggagcggtttgccgggatgcggattcggttcgatgttatcacggtggcgtggttgggaaagtatgccgatttcatgcgtaaagaagggaagcggcaaactacaatagcaattcacctgcgaacgttgcgcgcagtcctcaacgatgcaaagcgcttgggcgtgctcaaagaatcgcaatacccgtttggccggggacgatacgaaatacaagccggtacggggcgcaaaatggcccttactttggagcaaatagggcaaatagccaattatgacgatgggagcgaggcgacggccaaataccgcgattattggctatttctctacctgtgcaatgggattaatgttgccgacttcgtgaagttgaggtatagggacattgtgaacggcgaaatttgtttcgtccggcaaaagactgaatccaccagtcgaacattgcgggatatacaggcggtattgacgcctccgatgcagactattatcgaccgctgggggcaaacaccataccccgacgcgtttattttcccaatcttgaccggtaaagaagatgcgataacccgtaagaataaaaccaagtacctgacccgtgcgatcaacaagcgcatgaaggaggtcggtgaaaagctcggcatcggtaatatctcgacctatacggcccggcattcgttcgccacggtgttaaagcgggcgggagctaacattgcctatatctcggaaagcctcggtcatcaagacctcaaaacaacggagaattacctcgccagctttgagcgggaggagcgggtaaagaatgcagaaatattaactaaattttaataacatatgaaatatagtaatttgtataaattggaaatatgcgatgccgtattccgcgttttgcgattgcttagggatattggggagacaaatttagaagatggcgaaatagatgccgattccgataaaatagattatttggacgaggcggaatgtgtgcaaacactaaataatatttgctccgttatatgcgcagaatataagaaatgcgaatgtccatatatagaatttttcgacgacaaattagacgatatagaaaccgctatgatgccgttggatgataaggggaggaatgtcttgttatcacgagcgattcgttttgcgccggtgtgtcaatatgtagaatttgcaaatgcggaatttggtcgtaaggcattcgatgtattgaaaaaaatatatcctcacgaagaatatgcggatttttcatgcatgcttgatgcattagaggagtatatgtcaggattaaaaatgtttgccattgattttggcctcatagataccttattaatagacgatgaaatcaagcaggcgttattggaaatgccagacaggtattttgtgcttgattgtttttatgcagaaggaggcaatccacgtaagaagcaaggtaaaaccattcctcgtacccacagaatcgccgcagtttgggggttgattaataaattgaacctccaagcacatatggataaaacaaacctcgctgcttttgttgaagcggttacaggcggaaatatagagtgcaaacccaaagatacggtagcttataaagagcccgagtccactgcaaaagaggccgccgcagaatggctaaaaaaaataggggtgaaatgaaaatttaggacgtccgacgtttagtccgacgtcttttttgtttgctcctttgcatcgtgatcgatcactaacgcccggacgcgggcaagtgttcaatttttaaaacttcacgatgctatggataacaccgtaatcgtaacaactcccgcgcaactgcaatccatcattaccgatgcagtaaacgcgattcttcccaaactcgccgacttccggcgcaaaaatgagcccgtcgagacagacggagtgaatattgaggacgccgcccgtttcctgaccgagcagggcgtccccactactcgggcaacgctctacaatcacgtatacaaaaatacgatcccgtacaagaaggtcggacgtcgcatagtgttctcgaaaaaggcgcttttgacgtggattgattcacgcaccgttcggccggaggatgaacgggctgctgctactttgcgtattgccgaaagtgccaaccgtaaataacaccagggctatgtatgaaatgaagatcgccgccggcgctcgaagcgagcgcgcagcggcaacccttggtgtccataccgacaaaggtacgcaaaaaactttggctttccaccagcagagggtctatgatttgcttcaatcaggcaaaaaatattccgccgcagacatttccgtcgccctacgattatccgatcctcggagctgcatacgcgatttgagggccaaaggcatcgacatcctcgatgaatgggtgcccagcgagcacggttctcgtttcaaacggtattacctcataaccccatcgggccaaagtaatattgattgggagagggttggcgaactttcccaggcggcagaacggtatgaaactgcaatattatctactcgttcggatattgcgggctgcgtttctgctgcggttttggctgttataggaagggaaacgccgcctgtacttactggcgagattaaacgcatttttgaggaatatggacggccgttcgcaaagttggtgcgcgaggctttggatagcggaaactcacgcgacaatgcgggaaaggaggtgcgacatgaataagcgcgtaaacaagtttgtaaccatttcggacgacggcaaggtaacgtatgaaaaattccgatggcttgccgaatgggtgggatattgcacaactctgcatgacgacatggaacaactcgcgttccacgaatctatcgcaaaatatggccttaaaggagaggaacccaccgaaataacgggggcagcacttgaatatttcaacagggaaatacggccggaactcgaccgccagcacgaacgaatgatgaaagggcgtgatatatgaaacaagcaaaacaagcaaaacaagcacttgaaaacgagtgcggcgatacgttcgtattttgcccgtctttttatcaccagctgcgtgcaataaagagtgttgaaacgcggctgatggtgtacgaagcagtcgttgaatatggcgtattaggtaaggttcccgacttctctacggttgacccttttgggctgatagatggtatatttgcggctattaaatacgtgattgacagcacgaaatcaaaacgcgtttatatctcgaacgaacgaagtaaggccggtaaaaatggcggtgccccgaaagggaatcagaacgcacgcaaacacccgaaaacaagcaaaacaagcaaaacaagcaaaacaagcgtagatgtagatgtagatgtagatggaaaaataaataaactctctaacgagagtaaagaaagcgcggacaagccgcgccgagggactaccaaacgcacggcgtttgtcgtcccctcgctcgaaatagtcaaagattattttttgaggatcgagggaacgaatacggatgcggaatgcttttacgactatttcacggctaacggctggcgaaccggtaaaaatccgataaaagattgggaagccgccgcgcgaaattggatgcgccgcaaatccgaattcagcaacacgacccaaaatcaaactaaccatgaaacgaagcgaatctatcaagacttataaccgcccggcgcccgctgagggacttccggaatcgcccgagcttgaaagagccgttttgggtgctttgattctcgaaccggatcaactgcccgacgtggcggaaatcgtcgaaatttcggcattcgtagacgcaaaaaacggcaaaatctacggcgagatgctctcgatgttggagcgaggcgataaaatcgacctctatacgctttcgcaacggccggaactgaaagaccgtgatatgttgcgctacttctcggagctgaccagcgcagtaggttccggcgttaacgtgctggatcacgcccggcagctcgcagacaccgaaacccggcggcgtttatgccttttcggctacgaactcgcggcacgcgctgtgtcggatcccgactgcgttgtggattgggccacatcggagataagcgcaattgcagaccgggtctcgcggccggatgacattgcgccgttgtcggatgtcgtgcgagctaccctcgacgatctggagcgacgacagcaggccaggcaggcgggcgagtgtatcggcattcctaccgggttgcaacggcttgacgcattgaccggcggctggagaggcgggcagctcgtggtattggcaggcaggccgggaatgggcaaaagtgctacgatgctacattttgcccatgctgcggccgcgtcgggcattccggtgtgtgtctattcgctggaaatgcccgccgggcagctggccgggcggatgctggtcggcagctcgggtgtagattcgggagcgtttcgcaccggtaatgtcgacgcttcggggtggacgaagatagagaaggccggcgccaccctttcggctatgcctattttcctcaacgatagcgccaacttcacgataggggctatacgctcgcaatgtaaggcgatgcaccgccggggacggtgcgggatggtcgttatcgactacctgcaacttctcgacacctcgacccgcaatccgaacagcacccgcgagcgggagatcgctgccgccagccgttcggccaaactgctggccaaggaactcgatgttccggttatcttgttgtcgcagttgtcgcgcaaggttgaggagcgcgccgataaaacaccgttgctgtccgacctccgggaatcgggagctatcgagcaggacgccgatatggtcgtatttatcgatcgtccggtcatgtatggtgcgcaaatgattaccacgacccgctacgggcttatatcgtccgaaggcgtcggggtgctgcatgtagccaaaaatagagagggcgcgacgggtcggatatactttcggcacaatgagagcctgacccggatagccgactacgacagccccgcgacggatgtagctgaggtggccgagccattttgacgtaatgcgcgatttgagcacctaaaatttcacgggtgggacaagtgcccacgacgtgaaagaaaatagaaatttgaaagaatacaccatgaaaaaacgaatattatacaatcctctgacggatgaatttaccacgttgggcgataagtttgagaaaatcgcccataataaggtcaacggaatgtactgttacaagcaaaacataggcggctctacgccgcctatgcccaacccaaaatcgtaaccatcctatgaaagccacaggcaaatgtaattgtgaaacattaaaaaacaactaaaaccatgcaagagcaagacaaacagcggggtgtgtacatccccgagtatgaagaagaggacaaggcattagcgaaagagtgggcgcaggcacttcccgacgccgagcatcccggttatgtccccaaagattcggccataaatccgaatatccggttttgaaccaatgcaaactaaactattatcgaatatgaaagcaaagacaaacaagtacgaagagtatattaaagcccacgcagccgctattccccaacttgaggccgcaatccagcaactgaaagtggcgcgcctggacgtatccaccgaaagcattgcggacattgtgctgtctgacagcaaggcgatccgaacacaggcgaaacggcttgccgccgaagacgcgaagcagatcaagatcgtaacgacacgggaggagctcacagcgcgggcaaatgagtacatgaatagcgtcatcgacaattcacaacaggcggtcaaaaatgcgctgcgtgtcggtgaggctgatgccctcgaccctaaggcatttatcgtaagcggggataaggtcaaattgtctaccgactggctggccgaccagcaccaacggcgtacgctcgaagtggcagtaatgcgcggacgtgtacttcagcaatgcgaacaggtgcgccgtgcggttgaagcattgaatactttgatcgcggatcatccgagtttcaagactgcgatcctgccggaagacacggactaccgtagtgtcattagggtatcatacgaaggtaccatagaactccatcccgacgcgttggattgcctcaaagaataagagagggggatagtccctctctcttataaggcattgtcgaacgaagcattgcattattcgcaaaggtaaggattataaacataattagcaagcggataatggggagaaggacggaagggtggccaactatcgccgactattcggtgtggacaaatgaactgagccgggaggaactgatgataattatagacggcatacgcaatcatcggatcaaccaagcgaagaggaagctccagtttctacgggcgcaacgcgacctccaccgagggtatggccggatgagaaataaacaaataaatcaaaaaccaatcaaggtattacaccatggaaaaagtaaacaaagagattatgatacagaccttagcggaacttgcagatatgttacccgctgatggcaggaaaagggattttatcagcatccgtattgcccggagaggctacacgatatacaggatgacccctcagaccacagcggagatcatgacagcccggcatattaataaagagccggataagagcgaagcatgcatagcagcgatggcgcatagtgtcgctctggctatcgttggcagccgcaatgtattcgccgggatcagaatatggtttttgcgtcgtcggataatgcggcgggcatcattgcccgagctgttcgatgcatacaataaaaccctggcgatgcttcctattgaggacatatcgcaaataaccgctattatgctcggtttagccgaaacgatagccaaagaaccctaaaataaacaacccgcgttatggtttttaccgtaacgcgggtaatccaaacttgcaactatggagttcccttagaatagcaaattaatgaattttttaataagtagcaatgagtgcattatcattcaaaataaatgcggacaccgcaaagttaaataattttatcaaatcgctgaaactgttatatcagttgttggagaaatttccgtctaactcagacgggtttaaagtcataaatcgccatattgccgatatggaggctcgcgtcgaacaggcaatgcgcaaaatcgcccagatggagcagcaggcaatggatgcggcgtccaaggctaccacctcggccacgaccggaactgctggcggcaactctacggcaggaacagcggctacccaggccgaaactgcggcacaccatgacctgcttggtgagctaaaagccgctaacgacgaaaaaacaaaggcaatggcccaaattaggctatattcgaatgagatcgcacgattaaaagcggatgtcgccgcgctcaataaggaagagcagcagaacgggcaattgtctgcaaagaaaagggcgcaagtattggacgctgccgtatctatcgaggaatacaagcaggaaatatcccaattgaagcgggagctcgccaaccaaatcaaattggagaaggccgccgtcggctcgatcaacgaaatgtcccaggcacttacccgtatgcgtgcggtgtatgaaaatatgagcgccgcggaacgtgagggggtgcaagggcaaacgatgcttaaaaacatcgaatcgctcgacacgaagatcaaagaactggatgcgtcgatgggcgtccatactcgcaatgtcggcaattatgcctcgggattcaatatgctgggattccaaattcagcaagttgcccgcgagttgccgtcgctggcatatggcccgcaaatattctttgccgccatatccaacaacctgccgatgctggccgatgaaatagcacgggcgaagaaatcggttgatgaattgaagaaagccgggcaaaccttcacgcccgtatggaaacagatagcatcgtcgatcttctcctggcaaaccctgcttgtggccggcgtaaccgtgcttaccctttacggcaaggagataaccagctgggtagcaagtctttttagagcagacaaatcgctggattcggtaattaagaatgtcgatcagttcaatagccaagttgcgaccagcagaggggaattacaacgcgaatttcgtgctttatcccaagcaaagaaaggcaccacagaatatgcattagcacgccagacaataatggataaatacgataaatatttgtccaatcagcgtgctgaaatacagaatctggaggatatgcgtggtgcctatgaagtgctgttgagaaacgttactgccacgtctgtagccaaaggattggaggaagcgaatgctaacgctgcaactgaatatagtgaggctttaaataaagcatttgaaggcgttcaggctaaatttattgcaaagttcggcaaagaaacaggaataacttactttacaagattccgcgaaggattacaaagcggggttcctgaattagagaaagaagcgctggagatatacaagatgtttgagggggcgcctgacggcatgaatgttattgacacgtggaaagagatatttacaggcaaagcgatagggacaactactcataacgcattggaaaacagctttaatagcgcacgtgaagctacaatgcgctataatgaaactctttctgccaataaagttgcaatgcaagctctgttagatatgtataatatctcggcaaaagatattggtaaggatggcaaagcgacagaagatatagtagagcagaagaaaaaggaaatcgcagaaatagaaaaaaccattgccaagaccccggaagaggtggctgcccggaacagaaaattaggagtcctaaaaaaagagttgcaagcacttgaagaattaggggtaacaactaaagggcaaatcgaattagacgaaaaacgcaaacaaatacggcgcgaaatgcgtgatcttgcattcgaaaccagacagactgagattaatacgatgcctgatggtacggataagaatatagcccaaatagaacttgattttcaaaagcgagaagcggcaatcatagatagcgctgaaagaatccgagaactacagcagcaagaacttaccaaagagcagcgggaacttatccaagctcgccggaaagctaatgcagcgataaagaatgaagattgggatgccgcgttcctatctgaagctggcattgaaaacacagaggaatatctcaacaagcaactgcaagcatggaacgagtactacatgaaatatgggacgctcctcgaaaaaatacaggctacaaagtcctattatgacaagaagatcagcgaaaccgaagatgcgggtgcagttgcagctttggaggcagaaaagaacgccgccctggccacgctcgaagtcgaaggaggtacttttgtggatgatcttgtcggtaaaaccgaggaatacataacaaggattaaagatgaaataaaagctgctattagcgccctggaaggcgaatataataagttgccgtcgtccgattccaaacagggagaacaaatacggaatcaaataaacgtcctacgggcacagttatcggcgcttcaaaggatggatccagtgagcgatgatgaacacagcgaatcatttaagaaatggcaaaagctatataatactctcaccaaaattgaggggcaatttaacgatataggcgaagctgctggcggagcaatgggggaagtaatatccacggcgagcaaaattactaccagctcgttgcaaatgattaacagcattaaaacacttgcggaaagttcggcggaaggtattgaaacaacgggagaagcagcagctaccactatccagaaagtagaacgagcatccgtgattctcgctattatacaggctgcactacaaatcatacaaagcatcgcaagtcttttcggagatacagaaacctcgatggagcgaaatatccgggaagcgcaagaactgaacgaggaactgcgggtaatgaatgagcgtgcccgcctgaacgccgatatgttctcaactattttcggcgaagatgcttttggaagctataccaacaatgtcaaagccctaagcgatgccatgagggactatcaggccacgatggataaaataaagaatcgcggcatagaaaagacaatcggcggcataggcagtaatacaggactggcaaatctctataattatgattttgtgtgggaaagcatatcggaatctatagccaacatgatgaaccaagtgcggcattctacatggttaagggatgcaaaatataaaaagttaaaagatgttgtccccgaactgtttgaagaaagtggaatgataaatatgcaagcccttaaagaattcgtagaagggaatagcgatactttcaaacacctctccaaagaaaatcaaacctatcttaaagagttggttaataattgggaaacctatgaagaagccgtaaaagcagcaaacgactatcttaacggtctgttcggcgatttaggctctacaatcacagatgccttggttgattcctttgaaaaagggataaatgctgctgacgctttcggagaagccgcgggggatgtgttaaaaaacctggcaaaacaggtgttatacactgcgacaatcgcgcctgcgattgaagacgcacaaaagaagatagacgagataaacagggatgcagggcttagcgatgaacaacggttcgatgccttggcaggcgtggtgggcgatcttttggacgatgttatggcacaacagcaattgggccaagagctatgggatcgacttcaacaggccgcagaagagcgcgggatagactgggacgaaggagccgccagccaacaagcaacatcccgaggctttcaaacgatgtcacaagatacgggcgatgaattaaacggtcgtttcaccgacattcaaggcaaagtaaccgacatccgaaacgctgtaatgtcacaacttcaaatgcgcgattcggtagaaggaattatagaatcaatacacaattgtctgaatatggattcgagaatcgacgaattgtcagccgcttattacgaaagtttgcgtattgatgtggaaacccttttagaggttagggaaataaacgtaagcaccaaaagcatggataagacattggggcgcatagaggacggtataaacaggattcggaaaaatactgaatcactttaatttgataacatctatcccggaatgtatctttgaaatagattccgggatatttttgtaagcgattattatttcctatatttggttgtataaactatctatctatctatctatgaaaaaaaataatatcatttacattattgccatattggtattttcaggctgtaaaaacattggaaaacaggaatatatatacactcaaacaacgataaatggagcggaagaatcttcgtctatttatgaaaaatcggattcagcagcatattgggaagcattaagcaaatttcaatttttcaaaactacagcacgacaaactaatgcccttgatcgcacgcctatatatttcgtattgaaggataaaaaaggaaagacaatctattttcctgatgcggaaaaggaatacaacgaaattatccaaaaattatatgcgggtgatgataaatttactcccgaaaatattaataaaacgtatggaggtgccgaatttggtatgagcatagagcaagttagagatttacccacttttcgtaattggacagtttatgatgatagaattgtaaaatacaaccatactttgggtgagcgaaaatatgatgtaaaactattatttggtaataatcaattatatgcgataagattcacgtcaacgtcttttgaaaatgcagttcacctcaatacgtcaataaaaaatgatgtcgataatttcaaaaatattatcgccaaagtatacggagaacctattttttattatggaatgccttctgcgaaacaattaacggaaggatatactcgatgggtgtaccgatggaaaatcgctaacaaacatattaacattggagttgccgagagccagaatggagctgaatatataatgaatgctgaaattattgatactcaaagggaaaatgctttaaaattagatatggaaagaatgaagttaaaaagtatagaggaagctacaaaacaattctaagaccaaataaaggccggatacattccggcctttatacttaattggctacgcttactaactttgttagcgtccgctatgcctcgtacccctcgtaatagtacgattgttctattcccttgaaaataacatcccgatcatccgtgcggtcggtcaatgcctggccgagcaaggcgcgtaattcaaggtcattgatcgggctgcgttccatagcctgcaaatacaaatccttatccaccttccgccagtccacaacctgcatcaatcgttttttcagtatcatgtcaagccagatacgggtggcccgaccgttgccctccatgaacgggtgggcgatgttcatttcgacatattttgcgatgatctcctcaaaggttgttgccggcatttgctcgatcaccgggaggatggcacccagataaaggcaatttgcaaatcggaaaccaccctttgcgatattcagcgtccggatttttccggcaaagtcgtacaacccaccgaacaaatagcggtgaatctcacaaagcccggacacggttccgacctctatgcggtcgatgtcccccgattcgaatagggcgcgcgcctgttcgaggctggccgcatcaatctggtatgttttcttgttcatgatgttgattttgcgtgttatcgacaatagacagataccgccgcagggacgctatttccgcccctattacaagcctttgaaaggcatcggggtgttgctctacgtgtgattgttccaatgctttgtaatagcctattttcgcttcgtccgagcctttgaggttgacaagcgtgtagccgttgcgcaataggtatagattcatcaacagacgggatgtgcgcccgtttccgtcgataaacggatggattcgtaccaactcgtcgtgaagatatgcagctaccaaaacggggtgcacggcctgtgcctccatttcggcaaacctcgacatgaaagcctccatttgcggggcgataaggtacggttgcggcggtgtgtgggtgctgcccgaaatcatgacaggcacggtacgataacgtccggcgttctccctgtcgatcccgtgcagtataagggcgtgtatctcctttatcgttcgatcgcttatctccgtactgctgcgcgcaaaatctttgatgtagtcgatggcttcggcgtggttgatcgcttcgaggtgttcgcgcatcgacttgcccgcgatcgttacgccctcgttcactacaagctccgtttcttgcagggtcagcgtgttcccctcgatacggttgctttcgtaggtgtattcgattgcgaacgccccctcgatctttttcaaagcctcaacgggcagcgggcgcaatgcggacaaacgagcctttaatgcgtcgcattcctgcaatagttcgtgtatcgttttcatattattctcccttctccaccttgataagtttgccgcaatgcgggcaatgtattacaccctctttcggggcggcgaacaactccgacacctcaacacccaacacgcccgcaatcttttcgagcaacggcaacgatgtactaccatttgctgccctgcttaatgtaacctccgaaacacccaatttttcggccaattccttttgcgtggtattgcacatttggcatacctccttgattctcaatttcattatcgcgtgatgttaattgtttgtacctgcaaatatacaataatatagcactaaacgataattaaggccaaaaaaaatacatttcgtgataatttttttgtcgatttattttgttgttattatcattaaatgtatatttgcagtagagaattaaagttaaacgataataaccatgaaagcaacctacaacctctcgaagatcatgaaaaacgcctggtatctgaaacgcgccaacgtctcaatgtcgttctcgacctgcctcaagaaggcttggcgcaacgagaagttggcgatgctgacggcgaagatcgagaaccgcccgacggagcagccgaaggccacggagtaccgccccgagctgctgatagtgcccgcggactattacggcaacagcagaacgtactacggcgactaaaaaaatagcgagattcaaccaaaatcacgataaaattatgaaaaagaacgtaaacacgacgagttccccggagatagattggcgggcggagtattggaaaggtgtacgcgattacatcgaacagggtgatcgccttatcaaggcagagcagcgaatagtcgaactaacaaaagagcttatagaatgccgtgatattttggccggcaggcacacaatcaatcaataccagtgcaaaaccagcaaactaagttaataccatgaccacagcattaaccccgtccgacattcggacaatggcccgcaaagcggccgattacattaccttctactgcgacggcctcagcaggggatttgagattacccacaagggatatatagccttcatcaactacgaggcgaagatgtgcaacgacgagaggcaagacctcgtgctggtgccggcggtttgggacgccgaaggcaaagagtatcccgatatatccgaagccttgcaattaatgttgaactaatcatctacggttatgatctacgaactatcctttgaagggcacacggtgggatatttccccaccgaggccgaagccgtccgccgggcgggttacctcccgaaaggcaggtacacgatccgagaatgggaaagggacggcgatgttttgatgtttcacccacaaacaaacagggaatatgagttcacaaacgaataaaccctccgactttaacagcctttcggaactttacatgaaagccagcgaagcccggtttcaattactccaagaacgtagcgaattagtcatggagattatcgaactacggatgcaactgcaagaactgcgggcgcaggtatcgccgagcaaggccgcccaaaagccgaaaggattattaatgaaacttacccgataaaaaactattgtattatgaacagagaccaaattttacgacggaacgacgagataactgcggagacagatgcggtaatacgcagagggaaagagattgtgtccaaattggagagcggcgcaataaaaccggatgatccacaggtaaaggaggtactccagcagcttatagagcgacggaggatcggcaacgaatttaatgccgaactaacccggttggtgcatgaacagagcgacgaacccacccgcaccccacgttgaggaattccgcatataccccgaggatgccccagccgtcaatccgggcggctgggttggttgttggcgtctattgtgtccaaaatacacaaaggttacacaaagggtaaaaggttgtgccggcgtcgttattcccgacgctctaacgattcgttataccgattggataaaacccctaaaaaccgctaaggttttgctaagggtaaaatggtgagattacggggtggttacggggagggtattttcaatttgggcaccgaaaaatcgactttgaaacgacttgatgaccccaaggttaccccaaggaaaaacaagcctaaaacaagcctaaaacgtaaaacaacggggtggttacggggagggtaaaacaaaaacaacgtcaaggttacgtcaagggtaaaacggaaacgacggtaaggttacggtaagggtaaaacggaaacaacggcaagattacggcaagggtataaagaattacaacgaggttacaacgagggaaaaacaaccccaagcaaggataatttttgcacgtcactacgcgcgcgtgcgcgaggcaatagaactcacgaaacacttttacaggtatatataatgaattttccgacgtctatgcgcgcgcgtgcgagatgaacccggacgccggcagctcttaatacggtttgtgcgacttatcgaacaatttaatgcatttgtgtggtgtttttacgggatgttgtgtgaacttttagaacaataagacggaaatacgccggccagcccgtgctgtctttgtattcaaccagcggaaatttccgtccgttgggggggcagcggtcgaactggtgtttgtaggggatcgacggctttaaaaatgggcgaagttgttttgaaattgtttacccgtcctaaaacgaatcaaccacctacatcgctgtaaatggttgattttcatctgtcggggtagcgggattcgaacccacgaccccctgctcccaaagcaggtgcgctaaccggactgcgctacaccccgtcgttcccgaccttgaccccgtgattggccttgtgcaaccccgcgaggctgttgtgtgtcaatcccgggcattccggccgggggaaccatccgggttccgggttgcaaagataaccgctttttttcgttccggcaaacttttgccccgaaatccgcccttcccggccgtgtgccggattcctgttgggcggggctgtctgtttgcttgccggacgttttttgcagtcctgtttttcggaaacaggcggctttcccggatataactttgccgcgatccgtatgcgttgcctttcggcaggagccctgtggcctccgtatttgcccggttgcggccctgcctccgggcattccggacggcgctgctatttcgttgcggctatctcttccaacaggtgtccgaaatcctcacccggtgcgggcttgtacaccgcgaaccccagcgcctgcgccgcgtccacattcttctgcccgtcgtcgatgaagagtgtttgcgcggggacgatgccgctgtcggcgatcaccttgcggaagatcgcttccgagggtttcagctcgcgcagttcgtaggagaggtataccttgtcgaaatagtcgtccatcgtgtgcccgtcggccgtgaattcgccgcggatgacctccatcgacgccgggttgttgttcgacaatacgtaggtgcgaatccccgccccgcgcagccgttccacctggcgcagtttccagaccggaacccccaccaggaacgcgccgtatgccccggcgatctgggcgtcggtgacgtcgtaccgcccgtcgagcttccgcatcgcgtcgcatgcctcgtggaacgacaggtcgccccgttccagccgtccgatcatctcggcggggtagcaggggtttatcagtccggcgacccggttcatgccgagctccctgaatgccgctgtgcagcgctctatgtcgaggtctacgaggacacccccgaggtcgaaaattacatttttaatatctttcatatttatctaatgtcttgtccgtgcgccgcgtccgcggagtttggctccgccgtactgcttcctgcttctccccggcgacgcagcccgtgcccgtgccgtgtgctgcccggcaggacagcacgcttcctgcggtggctgcctgcgtcgttccgccttatttctggaacttcatcgtgaaacgccgtaccggacgcagcacccacatcggcaataccttgcaaaaggggatccaggcgcggttccaccagtcgggtacgatgcaccgcctgcccctccacaacgctttcagccccctgcgcgcacaactgtcgggggtgatgagcacgcccagtttgcagccgatacgctgccagtagggtgtcagcccgtagaggtctgtcgccacgcctgccgggcataccgccgtgacgcggatgccccgttctcgcacctccttggcgaatgccacggaaaacgaacgcatgtaggctttcgaggcgctgtatagcgccagccccgggaacggcatccatagcgagtaggacgacatgttgaggatgtgcccccgtacgccgcggcgtaccatgtccgcggcgaagaggcggcatagctgcgtgacggtcaggtcgtgcagcaggatgatgcgctcgatgcgctccgccggcgtggcgaggatgtcgcagaacgagaatatcccggcgttgttgatcaccacgtcgaccccgatcccctcggctgccatgcggtcgtacagctcctgtgccgccccgacccgcgccagatctatcgcaatcacccgcacgtcgggcgtcacggccgccgttgccctgttgccgcactcctttccgctgccgacgccttgctgcgcactaccggctgcgagcgccccgttcccgtccgtttcagccccgggttcccccgtagcttcggcaatcgcagccgccggttcgcgtcccggcgccccgcttccgtctgcggatgctgcaactcccagtccttccgcaactttcgatttttcggcaacttccgatccttccgcggcttccggctctttcgcggctgcttttcgcccggccggccgggcattccgtatctcttccgccacggcttcgagcggtgcgcggttgtcgcccgcgatcaccagccggtagcccagcgctgccagccgcagggcgtagcagcgcccgatgcccgacccggcgcccgtcaccagcgcccatgcgctgcccggcgccactgcgccgcgttccatccggcggccttgcggctcggccgcgtgttccctgcacccggccttgtctccgaggttccggtatccggctggcgtcccgccttgtgccgcggccccggccgtttcgctgttccgtttacgtttctccatgtgttccatgcttacggcagtttggccagttcttcccgtatcctgcgtggcagcccgtcgcaatgcttgcagcatttcatgtccaccgagtacatccgcgcgatgcagtagttgcggtggtcgcagccgctgcgtgtcgaagcgtcgccctcgcggagcttgtttacgaacgccgggtcgttgaccagcgcccgggccatctgcaccagttcgaaccctgcgtccagcgccttgtcgatcccttcgcggctcaccagcccgccgacatataccagcgggcatttcagctcggcgcggaatttcttggcgtcttccaggaaatagcactcctcgaagggaaactgccggatcatgaagggcccgcaccagcggatgaaatagcgcagccacaggggcgagtagtagctcatcgtgtagatcgggatcagcccccgcatcacggccatcggggccttggacacgaacccgcccgaaagcacgatgccgtcgacaccgaagcgttcgatctcgcgggctatggcgatgctttcgggaatctcgatgccgcccttgaacccgtcgtacatgttgtgcttcaccaatacggccgtccccgttttcgccgcggcctccatcacttctgtgaggcacatccgcatgaagcgcatcctgttttccaaagtcccgccgtactcgtccttccggtgattggtgtagggcgagaggaactgcgagatcaggtagccgtgcccggcatgtacctccaccgagtcgaaccccgcgtcgtgcgcggtgtggacggccttcccgaaatcccgtgccacctgcgcgatctcgtccttgcgcataccccgcacgggggtgtaggcatagaggttgaaccccgtcgacgcgccgatcgggatctgcccggcggtcgtcaaatgggtcatgttgccgcagtgcccgatctggatgccggccgccgcgccttcgcggtgtacggcgtcggttatcccgcgcagcccgggcacgatctctgggcgcagccacaactgcttgtcgaacgacagcccgctgcggctcaccgcggcgtaggccagcgtggtcatccccacgccgccgcgcgccaccgaaacgtggtactccttgagctgctccgtggggccgaaatgacgccccatcgactcgaacgccgccgaacgtaccgtgcggttgcgcagtgtcacggggcctaatttataaggggtgaacagtgatgacattttccggtaggttaatagatgaaaggtatgatcttttttcgtttcagcgccgtgaattcctccccgaactcctgtgcgtaacgcttgtagagcgatgccgcacggggtgcgaggttggcgaacgtccaccaggcgaataccgccccggcccacgaccacgaagccacggcgaagcccgtccattcgagcagttcgccgaaatagttggccgacgagacatatcggaacatccccccgcggggaatgtagtggcgcgtgtcgcccggcttgcgcaggttgcggatgatatggtcggaatggaggtttacggccatccccgccatgaacagggctcccccgacgtaaatgtagggctttgcgaaccagtcggcgtaatagccttcgggcgagacgtagaagatccacccgccctgcatcagcgcgttgagggtgttgaacgccatgcccatcacgacgatccccagcggcatcttcgactctccgcgcagcagcagcgggaagatgaaggcgcgctgcaggtagtgtgtctggaacagcacgaagagcgccagcggcccggcctcccatgtccgcccggacatgagccagagcacgcacattgcgacgaacacgggcgactccatcacgacccagcccaccttgttgggtaccggggggccgtatttcgggttgaacagatagccgtacccggcttcgaaaaagtgcagggcgacgtaaaccccggcggccagcacggccatgacgatcaggaagatattgaatgtttctgccatttgtctgcggttggataaaaacgtcgtaaagttacaaaacaaatcggtataatgaaaatcgcatccgcctcccctccggttgtttttctcctttccgggcacatatttgtcttattggtcgcagcgtctctctcgccggccggattgtccctttacggccggtgcccgccctgtgtccgggctgaatgctttcttcctgtgccccggccagtgcggatgcccctctgagggcctgtgtgattccgcggtcgtcctttgtgcccctcggctgcatcccgataaaaaaagacggcctccactgcgagtggaagccgtctgcgcgacccttcgcaaccccgcagggcgcgaaatgctttggctgcaggcgccggggcgcccactttccggcattcgttccggggtgccggagccctctcgtaaaaacccctgccgaagcaggggtgccgggacggtgacctgtgacgcttcggcgtcacgccgtacgtacagtccgatatgggagttgcccgctcccggctgtcggtctgccgtccggtgccggcggcccggcatgcccttcccggacacgcctgcggccggacggggcatattagtgcgtaaagacttttcctttctggtgttccttgttctcgtacttgatgcgcgaggtagtggggtactccagctgttcgaattcggcgatggcgttgcggatgtcgcccatcagcatgtcggccatgtcgcgcgacatgccctggcgcaccacgatacgcattacgaccacgtcctcgatgttcttgggcatcgtataggcgggaaccatccagccgctctgctgcagtttggcctgcaggtcgaacagcgtccacttggccttcttgtcgtactcgggattcatcatccagatgaacagcgggttgacgacctccgtcgagtagttcttgaagcatttcatcgtgccgatctgctggtggcagtacttggcgatgtccatcgagttctgctggatctccttgtatccctcgaatcccaggcggatgaagttgtagtactggccgagtatctgcgctgcggggcgcgagaagttgaggccgacctgcgtgatgttggcgcccaggtagtttaccgagaacgacatttcctcgggcaggtatttcttgtccttccataccacccatcccaggccgggatataccaggccgtacttgtggcccgacgtggagatcgacaatacccacttgaggcggaagtcccacttcttctcgggtttgaggaacggcaggatgaaaccgcccgacgctgcgtcgacgtggatcgggatttcatagccggtcttggcgttgtactcgtcgagcgccttgtccagcccctcgatgtcgtcgtccaggcccgtccacgtgacgcctgcgatcggcacgatgcagatcgtgttctcgtcgcacatctccagcgcctgcttggggtcgagcgtgatgtggtcgagcgtcaggggcacggtgcgcatttcgatctgccacagctggcagaacttctcccatacgacctggaacccggcgctcatcaccaggttcggtttgtcgaagggcttgcctgcggccttgcggcgctggcgccagcggagccatgcggccacgccgcccagcatacatgcctccgacgaaccgatgcccagtgcaccggtcttccattcggccttctcgggggtgttccacatgttggcgacgatgttcaggcagcggccgcacatcaccgcgacacgcgggtactccgtttcgtcgatgtagttgatgttgatggcctcgttcatcagccgtgtggcgtaatcgtccatgtaggtcgttacgaacgtggcgaggttcagccgcggctgtgtctgcggataggtctcgtccttgactaactggtaggcgatctcgggagccgtcttgcccttggggatgaattccgtgggtgccggactgcgcatttcctccgaaccgaaaatgtcggtcagcgtgtcttcgttggtgtgtctttgctgattcatgatgtaaattttgttttggtttacgccctccaaccttgcatgaactgtgccacggagcggtttttttcggcctaaaccgggctgcggggcctcttttgcttcggccgaagccggttgtgaaaaaaaatgtccggaaaatttgcaaatcccaaaatgttcgatatatttgtgatatcaaaataatatcactaaaactgtacggatatggaaaatggaaatttcgtttacaaaggctggaaatgcaacggtttcctggcattggtgctgatcctcggcgggttggccttgggggtttacgcgatcgtcgcgggcgcgcagcgcatcgacgccgggctggcgctcggcggcgggctggtggcggcgggcgtcgtctggtgcctttgcatgctgatctgcatggcgggattcatgctgctcgaacccaacgaggcgcgcgtgatggtctttttcggtaaatacaaaggtaccttctacgaaacgggctattggtgggtcaaccccttcatgtcggccaagcagatctcgatccgcgcccgcaacctgaacgtcgacccgatcaaggtcaacgacaagacgggcaacccgatcctgatcgggctggtgctggtctggaagatcaagcgcgacgatatttataaggccgttttcgagatcgacgccccgactacggccgggcagaccggcgtttcggcctcggcgcgcatgaacatcctcgagaacttcgtgggcgtgcagagcgacgccgcgttgcgccaggtggccggttgctattcctatgataacaatggcattgcggacgatgagctgacgctccgctcgaatagcgagcagatcaacgaccaactcgaacacacgctcaacgaacgcctggcgatggccggcatcgaggtggtcgaggcccgcatcaactacctggcctatgcgcccgaaatcgccgccgtgatgctgcgccgccagcaggccgatgccatcatctccgcccgcgagaagatcgtcgagggtgccgtgtcgatggtgcacatggctttgcagcgcctcggcgacgagcatatcgtcgaactggacgaagagcgcaaggcggccatggtgtcgaatttgctcgtagtgctctgtgccgacgaagccgcgcagcccgtggtgaatgccggaaccctgcaccattgatttaactggggatggctaaagagagtaataacaagagtttcgtactgcgtatcgacgccgcgacgatggacgcactagagctatgggctgccgacgagttccgctcgatcaacggccaactccagtggatcatcgccgatgccctgcgccgcagcggccgcctgaagaagccgcgtgcggccgccggggcgaccctgccggccgtggatacgggcgttgcttcgtcgggcagggacttcccgccggctccggcggccgtttctcccgcggctgccgccgctcctcctgctgacgttgcgtccggtgaaggcacgccgccgctgcaggatgccgtccctcccgttgccgctgcggcagccggggaggccggcccgctgcctccgcacgcccgtatgcagtccgacgacccgcaaaaaaataaagccgatataaaaaaatgaatccgatgttcaggatgtggagatgctatttttccggcctgctcgatgccggacgctggcggatgtttctgcacagccgcatgtggctcggcctgcccgtggcagccgttgccgcgttcgtcgtaattttcctgctgcgccgtttcggtgaaggtctcccgactgccgaggcgttctggaagggagctgtctatgcattggtgattgctttttgctgggctttgggcgtgtgggccgccgtcgggcccgaaccgtccgatgacgacggcgggcaggacggggaggccgtcggtgacgtgggagcccgtgcggcgtggcggggcagggtgctctgcttcgtattgctgctgggggcgttcgccctggtttgctcgtcccagatttcggaaatgctgggcggcgaatgttcgctggcccgcgggttcggggggatactgctcaaggcgatggcggttgcggccgtcgttgttcccgtatggcttgattcgggacgcagtaaatggcaggatcaataaaagccggtgctatgtcgatcccgatgtttataaaaaggatgttgctatgaatcggaaatggatttttgcggttgtttcggtgcttgcggttgcgctggcaatgttcccgctcaacctgctgtgggtcgggcagtcgccgttgcatgcggcagtgagttccctgctgttcggcctgcccgcactgctcacggcatggacgcccaaagggcggtgtgccggcggccgggccgaatcccgcagggctgccgggaatacgggattccgcacccgcaccgggcgcccggatcgcactgtgcctgaggatcgcgcggtgctcccggatcatactgtccctgcggatcgcaccgaaccagccgggcgaaagtccctgcttgcgaaagtcgcgctggggatcgcttttttcgtgctggcggcgatgctggcatacgatatttcgaccgaaggcatcgccgtcggagttacgaaggcagtcggattcggtcttttgatactgcttgctgccattgggcatagattaggttatctaaagttatagtttatgaaaaaaatcgtcgtttttacgggtgcgggggtcagcgccgacagcggtctggcgaccttccgcgattccgacgggttatgggcttcctaccggatcgaggatgtctgcacgcccgaggcgttggcgcataaccgtgccacggtcatcggattttacaacatgcgccgccgcgagatgctcgccgcgcagcccaatgccgggcacgaggccatcgcggggctggaacgggatttcgaggtcgaggtcttgacgcagaacgtagacgacctgcacgagcgtgccggctcgtcgaaagtgactcacctgcacggcgaactgacctgcctgcgctcgtcgcgcaatcccgatctggtcgtcccgatcgaggggtgggagcagaagctcgacgccacggcgcccgacggggcgctgctgcgtccgcacatcgtctttttcggcgaggcggtgccgatgttcgaacgtgccgcgcagattgcccggacggcggatatcatggtggtcgtggggacttcgctggcggtctatcccgccgcgtcgctggtgcgctacgtgcgccccggaatcccgatctatgtcgtcgatcccggtaatcccgatacggcgggcatccgcaatccgctgaccctgatccgcaaacgtgccgccgaaggcatgcccggcctggcggagctgttgcgggaaaagtatgcggcggggtagggacgcctgcatttcgcgccggcttattgctcctgcatttcgcgcccgtttttcgcaccggtattttgcttccggatttcgccccggtattttctgccggcggattccgtttcggcgattcgcggcccgagggttgcagtgttggcgcagtgaaagaaaaccgccttcggattctcccgaaggcggtttcgttttggggaagggcagtcggccgaaaagtgttgaaacaggggcgtatgagatgggacgccgtttatttcaaatctttgaaatagatgtccagcagctccttggcggcgatgaacgacgatattttgtcctccagcacgcgcttttcgtactccgcgacgcgcgcttcgaccgccgggtcgtggtagaacgagttgcgcagcacttcgttgatcgactcgtacatccagtatttgttctggcggttgcggttgtggcggaaatagccgttggcctggatgtggtcgaggaactcttcgacgcctttccagacctcttcgagccccgtcgcggccacggccgagcaggtgtatactttgggccgccagcccgattcgggcacggggaacagccgcagtgccccctggaactgggtcttggccagttcggccttgtggatgttctcgccgtcggccttggtgatgaccatgatgtcggccatctccatgatgccgcgcttgatgccctgcaactcgtcgccggcacccgaaatctgcaacagcatgaacatgtcgaccatcgagtgcacggccgtctcggactgcccgacgcccaccgtctcgatgaataccacgtcgaagcccgcggcttcgcacaggacgatcgtctcgcgtgtcttgcgtgccacgccgcccagcgacccggccgaaggggaggggcggatgaagacgtcgggattgcccgaaatgctctccatgcgggttttgtcgccgaggattgaacccccgctgcgttccgacgaggggtcgatggccagcaccgccagtttgtgccgcagcgaggtgaccatgttgccgatggcctcgatgaaggtcgacttgcctgccccggggacgcccgtgatgccgatgcgcaccgatttcccggcgtgcggcaggcagcgttcgatgatctcttgcgcctgcgcgtaatgggcggggttgttgctttcgacgagcgtgatggcctgcgacagggtggtgatgttgcccgcgaggatgccctcgacgtattcgtcggtcgaaagcctccgcttcttgcggcgcgtgaagtaagggcttacgataggttggtcttcaacgccttcggtgacgttgagcgccgtgtcgtgatgggtatctgcgtactctttttcgtaatggtttatcttcgtgaaggacatggtgctatttacttgatttttcgatgatttcgggtgtcagctgcagtgagttgcccatccacagcgcccggttccggctgtcgaccagcaccccgaacgggacgtactgcacgttgaatgccgagaatatcctgcctccggtgtccagtgcgacggagatgtgccgcgagaggaacggcgaaagcaggggggcgattttctcctcgttttcgcgcgtgacgaccacgacgcggagtttggcgcctaatttgtcggttatcgcccgaagttgttcgagcgacgcggtgcaggccgggttcgacgagtggaaaaactcgacgtacgtcaggccgggggtggcggcgggtttctctcccccgagccatgccggaaccttgacctcgggtacgcgctcgccgagggcgatgttttgtgccacggccgccgcaacggggagcgctagcgccaggagtaaagtgagcaaaactttcttcataaaaggcagccttattttcagcgaagataacaattatttgccatatggacgaaaaattttacatagagttatgaaaatcggattcgaagagaccccggccgcgcctgccgggacttactcccggcaccttgccgaacttttggccgaatatgcccccgagcacgagtatatcgttgacagggcgcgttataaggagctcgacctctaccacggcttccgccccgggttgcccctgccgctgctgcggaggatacccagcgtgatgaccgtccacaacctcaattttctgcgctacccgcatctctattcgctgcccgagcggctggtgctgctgcggctctaccgtcgtgcgctgcgctccgccagccgtctgattacggtcaaccgcgatgcccgcgaggagttgtcggagcggttgcggatcgacccggggcgcatcgaggtcgtcatgcccctcgccgcgcgcgtcccgcacgaaccgcctgccggtgcgcagctcgaggcggtgcggcgcaaatacatgttgcccgccgagttcatcctcatgctcggcaccgtcgaagagcgccataaccacaaggtgctattcgaggcggtcggctcgctcggcgaacgcgaacgtgcgatccgtgcagaggggctcggcgcggcgcagcgcgaagccgtggccgcagacccggagctgcctgggctggctgccggacgtgcccgggggtggggagccgccacagcggcagggcggggcggcatcgccacgggcatgcgcggcgagaccccggcggatgctgccgtgccgcctgccgcatcttccgccgagcgggtcgggatcgtggtctgcggccgccgtacggtctatgcggattccctgctggagtatgcccgcgggcggcatatggcctcgcgtgtcgatttcatctacgaactcagccccgacgacctgccggcgctgttccgcctcgcccatgccttcgtctacctgcccgatgccgggatcgaggcgtcgatcgtgcccgtggtggaggcgatgcgtgccggagtgcccatggtgctgagcgacacgcagctcaaccgtgaggccgccggcgacgccgcggcctatgtccgccctgaggcggcgggggaggtggccgctgcgctggaaaacgtgctgtcggacgcgaatttccgccgcgagatgagagcccgcgaacgccgccgcgccgaacttttctcggaatatgccgtcgcccgccggctgatcgacatttacagttcgctgtgaagcgcttggccttcccgaaaggagcagtaatccggaaaaaaataccataaaacgcttgggtatttccaatttaataccctatctttgtgtttgcaaaataacaagctgctatttgacgtgaaatattcactaacttaaattttatatttgctatgaaagtttctcatatcgagcatcttggcgtcgcagtgaagagcctcgatgaagcaattccctactgggaaaacgtattgggcctgaaatgctatgccatcgaagaggtcgccgaccagaaggtgcgcacggcgtttttcatgttggggcagaccaagatcgaactgctggaacccacttcggaggagtcgaccatcgccaaatacatcgagaaccgcggtgtcggtatccaccacatggcgcttgcctgcgagaatatcgaggagcagctcgccgatgccgaagccaagggcatccgcctgatcgacaagaccccgcgcaagggcgccgaggggatgaccatcgctttcctgcaccccaaatcgacccagggcatcctgaccgagctttgcgagaataagaacaaatagtgtaacaaggaatattgcggaatctccgaattccgccaaaggcggaacagaagtccctcccgaaggagtgacttagggtggggtcagacctgtaaacgcggccgcaggctgcgggcgatacctgccgggaaattccggggttcggaaaaattacaaacctacatacttatgagtgaaattcagaacaagatcaaccagctgatcgagaaccgcgaaaccgcgcgtctcggaggcggtcagaagcgtatcgacgcccagcatgccaagggtaagtacacggcccgcgagcgcatccagatgctgctcgacgaaggctccttcgaggagttcgacatgttcgtgacgcaccgctgctatgacttcgggatggacaagagccatgccttcggcgacggcgtagtgaccggttacggtacgatcaacggacgcctggtctatgttttcgcacaggacttcaccgtgacggcgggttcgctgtcgctgtcgatgtccgacaagatctgcaaggtcatggacatggccctgcgcaacggcgccccctgcatcggcatgaacgactcgggcggtgcgcgtatccaggaaggcgtgaacgcactggccggctatgccaacatcttccagcgcaacgtgatgtcgtcgggcgtcatcccgcagatttcggccatcttcggcccctgcgccggcggtgccgtttattcgcccgccctgaccgacttcatcatcatgaagaaggagacctcgaacatgttcctcaccggcccgaaggtcgtaaagaccgtgacgggcgaggacgtgacgcaggagcagctgggcggtgccacgatgcacaccaccaagtcgggcgtggcgcagttcgccgtcgataccgaggaggagggcatcgagctgatccgcaagctcatctcctacatgccgcagaacaacatggaggatgccccgctggccgtctgcaacgactcgatcacgcgcctggaggattcgctcaacgacatcatccccgacaacgccaacaaaccctacgacatggccgaggtcatccgcgcgatcgtggacaacggcgagtacctggagtcggctcccggatacgccaagaacatcatcacctgcttcgcgcgtttcaacggccagtcggtcggcatcgtcgccaaccagcccaagttcatggccggcgtgctcgacatcaacgccagccgcaaggccgcgcgtttcatccgcttctgcgatgcgttcaacattccgatcgtgaccctggtggacgttccgggcttcctgccgggtacgacccaggagtacggcggcgtcatcactcatggcgcgaaactgctcttcgcatactgcgaggctacggttcccaaggtcaccgtcacgctgcgcaaggcgtacggcggcgcctatatcgtgatgtcgtcgaagcacatccgcggtgacatcaactacgcatggccgacggccgagatcgccgtgatgggcgccagcggtgccgtcgaggtgctctacggcaaggaggtcgcagcgatcgagtcgcccgaagagaaagccaggttcgtggccgagaaggagaaggagtacaacgacaagttctcgaatccctacaacgccgctcgctacggctatatcgacgacgtgatcgaaccgcgcaacacgcgcttccgcatcatccgtgcgctgcagtcgctggcaaccaagcgcctgcagaaccccgcgaagaagcattcgaatattccgttgtaatagaatcgcatgagtatgagaatattatcggtaatagactggagctggtcggagatgctgtgggtggcactcatcagtatctgcctcgtgttcctcgtgctggttctgctggtgtgggtgatgaagctcttcggctatgtcttcacgcgccgccaggccgctgcgactgccgctgccaataagtccgcggtagttccggggcagatccacgacgaggagatcgcggccatcgccacggccctgaagctctaccggagcgccctgcacgacagggagtccgaagtgctgaccatcatgagcatcaagcgtgcctattcgccctggaattcgaaaattcacggtttaaccccgcttcccgaaaggaaatagaacttaaataacaatgaaagattactcactgaaaatcaacggacagaattataccgtgcagatcgacgaggtgaacgacgcctcgacggtggcgcacgtcgtcgtcaacggtacggcctacgaggtcgagatcgaaggcgccaagaccgctgccgcatcgcggccccaggtggtgcccgctcccaaggaagccaacagtgccatgattacccctgcgacggcttcgccttcgccccgcatcgccccttcggccccctcgtcgggttacgccgtgaaatgcccgctgcccggcaccgtgctctcggtcaaggtgcaggtcggcgacaaggtggcctcgggccagacgctcgtcgtgctcgaagccatgaagatggagaacaatatcgacgccgaccgtgccggtgtagtcaaggaggtctgcatccagcagggcgctacggttatggaaggcgataacctgatcgttatcgaatagccctatgctgacaatgctaacctcgaacgctgacttcgtatgggacagcctgcgtaacttcgccggttcgaccggtatcgcgggtttcttctccgagatgggctgggggagcgtcgccatgatctgtgtggcattcttcctgctctacctggctatcaggcacaagttcgaaccgctgttgctgttcaccatcgccttcggcatgctgctcaccaacctgcccggtgcgaacctctaccataccgagcttttcgccgacggacatgtccactgggatattttcgtggcgaatgccggattgctcgactacctctacctgggtgtgaaactgggtatctacccctgcctgatcttcgtcggcgtgggggcgatgaccgatttcggcccgctgatcgccaacccgaagagcttcctgctcggcgccgccgcgcagatcggtatcttcgtgacgttcctcggcgcctacgccctgggcttcacgcccgcgcaggccggttccatcggtatcatcggcggtgcggacggcccgacggccatctacctcacctcgatgctggcccccgaactgctgggcccgatcgctgtggcggcctactcctacatggcgctcgtgccggtgatccagccgcccatcatgcgcgcgctgaccagcaagaaggagcgtggcatcaagatgcgtacgctgcgcccggtttcgaagttggagcgtatcctcttcccgctgatcatcgccgtgattatctcgctgctgctgccgagtgcggcgccgctgatcggctgcctcatgctgggtaacctgatgaaggagtgcggcgtggtagaccgtctgagcaagacggtgcagaacgaactgatgaacatcgtggtgattttcctcggcctcacggtcggcgctacggctacggccgaggcgttcctgaacttccgtacgctggggattctcgtgctgggtgtcatcgcgtttgccatgggaaccgccggaggcgtgctgctggccaaactgatgaacgtcttcagcaaggacgggaacaagatcaacccgctgatcggttcggcaggcgtttcggcagtcccgatggctgcccgcgtatcgcagaccgaaggccagaaggagaacccttcgaactacctgctgatgcacgccatggggcccaacgtggccggcgtggtcggttcggccgtcgctgcgggtatcctgctgtcgttcctcggataatactacgccgggcggctgaagtgccgtacgcgataggggcgggctccgaaaaccggagcccgcctttttttgagtggtcgtgccgggtttttgcaggcactcggcgccgctcttccgcccccgtagggatccctcgccggggtctccggctcccgtctcggtctctcttccagccgtttttttgttgctggatgcgttttattggacaacagtgcgatttttttcgtatctttatgaaaattccgatccgcttgtatccggtgaaaaaacgttggctatgaaaaaatggtgtgtatggctgcttgccctgtgtgtgtcgcagggggctgcggcgcagggttccgaggccggggagtgcgtcttccacacgggtttagaacaatatccgacctttatgggtggagacctcacggagttccgtgcctgggtgtaccggaatgtccgccatccccgcgaggccttcgaccgaggcgagcaggggcgtatcctcgttagcttcgtcatcgacacgctcgggaacgttacgcaggtggagccgtcgttgtacggcatccgttcctcgttttttgtatttttgtccggactgattcctgaattatgagccgaggtaaatggatcattgcttttctctgcgtgccggctgccctgctcggggctgccttgctcggggcggctctcctccggtcggggcatatctccgggaggttgcaggcggaaggcgccgagacgaaggccgtgctgacaggcagctcttcacgggctgaattcgtcgggtacaggccccgcagccgtcgttaccgcgggaaacatacggtctgttacttcgattaccgttatgtggtcggcggacaaacgtacaccggtaaggtgcgcaagaaagagaacctccatacggcccgcatcggcgattcggtcgtggtgcgctacctgcccgacgaccccggcgtgcaccggctcgtgaccgattcggcgggccgctacaaggtcgaccgctgcgcccgcgggcgttcccgtagccgtcgctgacccgcggccgcgttcccgcctgcccgtccgatttgtaattccggatataaatatcgtatgtttgcagggatcgtctacccgaatccatttgaaaatgacccgattcttttttctccttgctgcgctcccgtgctgtgcgggctgggctgcggcacatccggccatcctgccggatacttccgccgtggtaaggccggacaccactgcttccgaccggactgtttacctgcgcgtggacgagcctccccggttccggggggaaggcgtgctcgctttccgggactgggtgctccggcacctgcgtttcggcgcggagatgttccgcgaaggggtcgatgcgcgcctggtcgtgtcgttcgttgtcggcaggcagggggcggtcgaggagccggaagtggtcagttcgacggacgaacgctgcgcggccgaagtcctgcgtgtgctcgcttcagccccgctgtggacgcccggccgcctggagaacgttgcggtgcgcacgaaactggtaatgcccgtcaatattcggttggaggtgcctacggccgcggattcgctcgcggcggggctgtcggatggaattccgttggaggaggatgtggccggggaaatggaacggatgccgctatttcagggcggggatctgcaaagtttccgcaaatgggtgatggagaacctgaaatatccccgggaggcgctcgaggatgaagtcgaagacgacattgtagtgacgttcattgtcgaaaaggacgggacgctgtccgaaatcgtcgtggagcagggacggaatctggccctgatccgggaagtagggcgggtgctcaccctgtcgcccaaatgggaacccggccggctcgcgaacggcgaaccggtgcgggtgaggtatacgctgccgttgattttccggctggacagaacccggcctgccgggcagccggtgcgaccgtccgtcccgggacggaaagtccgggtcggcgttgatgactattctcgtttttaatccgtattattttgcagaacgaaaactttttagtacctttgcgcacccgtaaagtgcggggaacggattacaaacaagttaaattaaacgtaaaacacagtggattcattaagctacaagactatctcggccaatgcttcgacggtgaccaaggaatgggtcgtcatcgacgctgcggatgaggtattgggacgtcttgcatcgcagatcgcgaagatcctccgaggcaagaacaagcccagctacacgccccacgtggactgcggtgactacgtcatcgtcatcaacgcggacaaggtgaagctcacgggcaaaaaaatgaccgacaaggtctacacgcgtcacaccggataccccggcggccagcgtttcgctacgcctgccgactatctggccaagaaaccgacgttcatcgtcgaaaaagcagtcaagggcatgctgccccgcacccgtctgggcgccgcgctgcttagaaacctgaaggtatatgccggcacggagcatccgcacgcagcgcagaacccgaagaccattaagttaaacgagattaagtaagagttatggaagttgtaaacaccgtaggtcgtcgtaaggccgctgtggctcgcgtatacgtgaagccgggtaagggtcagattacaatcaaccgcaaggcgcttgaagtttacttcccgctcgaaattctccagtaccaggtgaagcagccgctgctggctaccaacacggtggagaattacgacatcgtcatcaacctcgatggcggtggtattacgggacaggcttcggccgctcgcttgggcatcgcacgcgcattgtgcgaaatcgacgctgagatgcgtccggcactgaaaaaggccgggttcctcacgcgcgatccccgcgaggttgagcgtaagaagcccggtcagcccggagcacgccgcaagttccagttcagcaagcgttaatcgcacgaccggatttcggcaagcacggtgcgggttacaaaccggaaagactacctatattatctatacgcgtattactttcaggttgccccgccgcggaaaacccgtgggatcggccaggccgctacccgtcgggttgaagaaaagagaattaaaattaacaaacacgattgaattaaaatgtcacgtacagattttaatacattattggaagccggtgcgcacttcggtcacctgaagcgcaaatggaaccccaaaatggctccttacatcttcatggagaagaacggcatccacatcatcgacctgcacaagaccgtgctcaagatcgatgaggctgccgcagccatcaagcagatcgccaagagcggccgccgcgtgctgttcgtagccacgaagaaacaagccaaggatattgttgccgaaaaggtggcagccgtcggtatgccttacgtcacagagcgttgggcaggcggtatgctgacaaacttccccaccatacgtaaagccgtcaagaaaatggctaccatcgacaagatgaatagcgacggcacgttcgataacttctccaagcgtgagaagctccagatttcccgccagcgcgcgaagctcgagaagaacctcggctcgatcgccgacctgacgcgcctgccggccgccctgttcgtcgtcgacgtgcagaaggaggccaacgccgtaagggaggcaaaacgcctgagcatccccgtatttgcaatggtagatacttgttgtgatccgaccgacattgattacgttatacctgcaaatgacgatgctaccaagtcgattgccgtggtgctcgaagccatgtgcgccgcaatcgccgagggtaccgaggagcgtaagctcgaaaaggagaaggaagcccaggaggccgaggcaggtgccgacgctcccgtgaagaaggagggcaagccccgcatcaagaaggccgtgaaggcagccatcgatgccgagcaggccgccgtagccgaggttgtcgcagctgtggagactccgttcgaggagcccgcagccgaagcagcagccgttgaagcagtagccgaagaggcagctgcggaagcggtagccgaggccaaggccgagtaatcgccttttggggaaatcaattaacaataaaaagaaaggaaaattattatggaaatcaaagctgctgatgtaatgaagctccgcaagatgaccggtgccggtatgatggactgcaagaatgccctgatcgaggccgaaggtgactttgcacgtgctcaggacattatccgcgagaaaggcaagctcgtcgttgccaagcgcgccgaccgcaccgctaccgagggtgtcgtcgttacgaagatcgtaggccggaaggcttaccttctctgcctggcctgcgagaccgatttcgtggctcagaatgcagaatataccgcatcggccaacgcgatgctggaggttgccgtaaagaacgacgccgcagaccgcgacgccctgatggcctcgaagaatgacgaaggccacaccgtcgaggagatggtgaccgagaaatcgggacagacgggcgagaagatcgaactggcatactatgcccgcatcgaggctccctattgcgccgcttacgtgcacttcaacaagaagctcggcacgatcctcggtttcaacaaggaggttcccgctgaggtcgcccacaccgttgccatgcaggctacggcgatggctccggtttcgatttcggaggccgactgccccgcggagatcgtggagcacgagcgtaagatcgccgtcgaggccatgaagcaggatcccaagaacgccaacaagcccgaggctatcctcgagaagatcgccgagggtaagatgcgcaagttcttcgaggagaacacgctgctgaaccagccggtggtaggcgagaaggagacgatcgccgagttcatccacaaggctgacaaagaggctacggttgtcgcttacaagcgtttcgcgctgggcgagtaatctgtcaccaggaggggtgcgatgtgccccgctatatattcgaaaaggccgaaaccccgcacgggtttcggccttttttttatcggcggccgcaattttttcaggctgccgttttcagggggccgcgtttgccggccggcttccggttaccggattccgagccgccacatgacccggaggacgaaacgccgcacgccctgggggagtgccagccacctgtgcgaccgccgtttccagcggcgggagcaggtgcgaacgatgcgtcccgacggcaggatgacagccgtcatcacggcgacgatatcctcgccgaggcaatgctccgtcgtgcggtaattaccgtccccggacagggtgaaacggagcgtccccgcggcggaatccctctctgcggggttttccgcggatgcctccggggacggggcattccctgcggctggtgcgcatacgggacggttcccttcgcagcggacgcctgtttcgatcccgacgatgcggtgcaggatatggcgcccttcgcagcggaacaggacgacgtcgcccgtccgcagggcgccgatgccgctcggcggcggagccggatggcgggtgccgcaggcgggtgtgtgcaggtcgggggctgtgccgggggtgtcgtcggaaagtcgggtctggcgggcggtgccggcattgccgtctgcggcgcgggtttcggggacgggatccgccgatgccccggctgccgggacaggtgccggggcatatttcgcaatcggggtcagtacggcgatgtcccgttcgttgcgcagcagcggccgcatactgtgccctttcatgcggatctggacttcgtgtccttcggcgagcatcgcttcgacctgttcgaagaagaggcggttggtcagcagcatcagcggagggtgtttggggcgtcgtcaccgaataccgtgcggcaggagagacgggctgccgcggcatcgggcaggcattcgaggtggtagacggggacttgcgccacgatttgggatacgaggcggcagatggcgtcttccagccgctcgtcgtgtgcgaacgacggcgggcacgaaggcagcagcgccccgatggcttcgatgggacgcaggcggcggatgcggttctgcggtgcctgcgaaagccgcacgatgcccgctatcggattgctcacgttgcggtaacacggggttttgccgctccacggcgacccgcaggcgagaacgccttgcagggcgggaatcgtgtctgtcgcgggagcgcttgccgcttcggcagccccttccggggcgatccggatgatcgggctgtcgtcgttgagcaggcgtgccccggggatatgctcgcgccacaggcgcgtgtgggtgctctttcccgtgcccgattcgccgaggaagagtacggcgcgcccgtccaggctgatcactgacgagtgtacggctaccgcccggcgttccagcgcggcgatgttgaacatcgtccacagcccgaagcggaacagcgccggattgtgctccggggtgatgtcgctcgtggcgtcggggctgccgaaggctttgtggaaccgtgccggggcgctgccgtcgcggggtgtcatggtaagcaggtagccctccgtgtcgcggccgaaacggcagtcggcatcggcgtcggtgaagtcgaatgcgtcgagttcgcaatagccggccgtgtcgccggcgagcagtcccgtgcgcaggatgaggtctggttgtgccgtgtccgtcggggatgtcgcagggcggggtgcactcctttccgtccccggtgtttccgacggggagggcgctgcggttgtcgccgttccgggcacggggcccgccatacggttgctgccggcgttcgtttccgttttgtttccggccgcgaacggtgccagcgctatgccgaaggcgcctgtcgtgaaccggtgcgggatgtcgatgcgtatgccggctatgaggtattccatgttttattctcctatcgttatgatcctgttacagtattcgagcgagctttcgcggtgggcgatgacgaccagtgtcagcccggcatcccgtgccgcgagcccggcgatcgagcggttgatctcctcttcggtgcggctgtcgagcgccgaggtcgcctcgtcgaagaaaagcacgtcggcctgccggtagagcgcacgggctatgccgatgcgctggcgctgtccgcccgagaggcggcagccgcactccccgacgtgggtgtcgatccctttcgccagcccggcgaccagctccccgagctgtgccgcgcggagcgcctgcatgacccgctcccggtcgacctccccggcggggatgcccagcgcgacgttggccgcgaagctgccgtcggcgatgaagaggctctgcgagacgtacccgatgcggttctgccatgcccggcggttggccgccgtaagcggcgtgccgtcgatgacgatttcacccccggtcggctcgtacagtcccagcagcaggttgaagagcgtcgttttcccggcgcccgaggctccgcggataccgatgcgctcgcccttgcggatcgtcagcgaaaggccgtggaaaagctcgcgcccgccgtccgcgaagcggaacctaaggtcgcgcacggcgatctcgcggctgaagggcagtttttcgggggtgcggatactatcggcggcggggttcccgggagtgccgggattgcagggagtgccggaattgccggcggcaacggttgcggcgggtgtgctgtgcgggccggaggtatcccggcagtccgggtttgccggcgccggggggcagtccgctgcggcgtcgcgcaggatgccgatcgtgtagcggttgtatttgatggccgtccagccggtcatgatgttgcgcaccgagggcatcaggcgcagtgcggccacggcgaatacgccgaacagcatttgcgcccgcccgtcgccgtcgccgaggctcagtgccacgagcagggccatacccacggccagcccgacctcggtgaaggtctggggcagcaacccgatcgccgcttcgcgcaggcgcgtgcggatcacctgatccatcgcctggtcgaactggcggagcatcatcgggaaggcattgttgatctcgatgtcggcatagccgcggaaggtctcggccacgagccgcgccttttcgcgctgcgccttgttttccagttccccgtagcggttgatgcggttgcgcaccagcccgtaatagagccagatcgagggcaggaagaccgccagggcgagcagtgccgcgaggggcgtgtaccacatcagcgccccgaacagcagcacgagcagcatcgcctcggcggcgatggcggcggcgggtttgagcacgcccgccgcgaaggccaggcagacgacgttgacgttgcgggccagtacggccgagttcgacgccttgacgaacggcagcccccggtcgtggtaggtgacgagaagccgccgcgagagcgtgcggtagaggtcatagatatagttgcgttcgacgcgggcgagccacagcccgagcaggcacttcaggacgatcacgcccaccacggccgcgcagaccgccagcgcgaaactgcgctgtgaggcgaagcccagcccgtcgtaggcgcgtgccagcatcccgccgccctcgaggctgctggtgtcgagcaccagcgccagcacgggtagcagcatggccagcccgaggaaattcagcccggcacgcagcaggagcgtgcaggcgacccacactccccggcggcggaacgcacgcggtatgatgccgatggtttcgttcatcttatccttccactttttcgatctcccccagtttcacgtaccacaggtacccttcgcattcggtgtagcccatttgccgcagcaggccgaggtattcgcccacctggcggcggtagcgtccgggttcgcggcttccgaacttgtagtcgacgaccacggcccgcgtgccgcggatcatcacgcggtcggggcgccgggtcgacccggcgccggggacaatgatctcgttctcgttgcgcacgcgctgccagccgcccccgaaccattcgcccacgacggggtgcgccagcgcccgggcgatcatcccccgcagcgcttcggcttcgccgggcgacagcgtgccgtcgtcccgcatccgctgcacggcctcgtagatctgttgccggtcgtcggcctgctcgaacgctttgtgcatcaggatgccgaagttgcggggcgagagttccacctcgtcctcctcctcgaaataacgttgcgaggggagcctcagccgtaggtcggcgcgtgccgtggggtagttctccagcacgacgtgcctgccgtcggaagctttgccgccgccgggcacggggcccgtgaagagcccgaattcgaacctttcgccctcctcggtcacggtgcggcgcccttcggtgccgtcgagcagcgctttgtcgccgtcggctccgatgctttgcagcagcagcccgccgacgctcttgccgcccttgcgggggatgaagacgtgcagcgactcggcggcgcgtgtcagggccacgtatagcagattgatgttgtcgacgtgcgaatagaccagctcgcggtagtactccgccgagaagcccgattcggccatcgacttcttgtatttcaccgggaagcgcccgacggcgcccgcatcgccctgcgcctcggcccagacgatgttcgtcacgttgccgcccgacttgggatcgagctgccacgagcaccaggggatcagcaccacgcgcttttcgagccccttggccttgtgtatggtcgtgatctcgacggtcgttgcgctctcgtcgacgctcagcgatcggttctgcccctgctgctcccaccagtcgaggaacagcgagatgtcggcgatcttgctggcgcagaagccgatgatctgttcgtgtatggcttgcaggtaggccgtctgctgcctgtcgtcgtgcagcgcgtggcgcatgacgatccgctcgaacgcctcctcgggcgacagcagccggatcgaacggaaaaaggtgcgttcgttcccgggcagcgggcggtcgaacccgcgccccaggtagtggttgtagacggcgcggctgagcgagtcgtcggggttgagcgacaggcgcagcgccgcggcgatgaacgaactgacgggggcgttgcccacgatcagcgcttcctgcgtcattacatcgaaccggtagcgcgggtcgtcgttgcggcgtttgaaatccagcagctcggcggccaccttggcgccgtcggtcgccccgcgcaccaggatcatgatgtcgcacggacggaaacccttgtccagcacctcgcagatgcgctccacgacgggcggccgttcggcgaaggtttccaccgaaacatagcccggcaccccgcccaggcggcggggtgtctgcgcatgttcgcggtaagccttttgcagggtgtcgcgcagcccggcggcggtgcgggcgtccatgtcgccccgcgccgcggcttcgtccagcgtcgcgttgagcgcccggttgtcggcttcgaccacgcggccgatggccttgttgttgaaatccaccacggcgggcaggctgcggtagttttccgtgaggttgaccagttcggtgctgtccgcgcccagcgcccgctgcgcctgcgagtggagtattttccagtcgccgccccgccagcggtagattgactgcttgatgtcgcccacgatcagcaccgaggtcgcctcgctctgcgccatggcgttttgcagcaggggcaggaaattctcccactccttcacggaggtgtcctgaaattcgtcgatcatgaagtgttcgaagcggttgccgaccttctcgtagatgaacggcgcgtcgttgtggccgatgaattccgagaggatgtatttggtctccgagaggagcatcatgttttcctggtcgcacatctgctgcaccttggcatagaggtcggagagcagcgcgaagctgcggtagttctcgcgcagcaggtcgcaggtgttccacgcgcggacgttctcatcgtagaggccgcacatttcgcgcagcaggggttgcagccggggacgcagcccctgtgccgtgctgccgggttttccccacgcctcgtccctggtgcaggccgcctccgcgcggcttccgtagcgctcgaagctgccgcccgccacggcgtagaaataggccgcgaagcccgagcctctgtaggggaagtcggcgaccgaggcgcctgcgtccccgatgatccgcacggcttcggccgcagcgtcctgcatccgttttttggtcgccgcggcgtgcgccgtggcttcgcccacgatacgcgccagttcctcgcgcgggcgggccgccgagagtgcgtccttgttcttctccttgaacagctcgcctcccagcgtgaggatgccgtcgcggatgtcccatttcttgccttcgtcgatgcgctcctgcacgaagtccgtgagccagcgctgcaggtcgcggtcggtggtgatctgctcgatgagcgtgtcggcgctcttggtcagcaccgaggccgtttcgatctcgacgttgtaattgaggtcgatgcccagctccttgatgaaggcgcgcaggatgcgctggaagaaggtgtcgatcgtcagcaccgtgaagcgcgaatagtcgtgcaggatcttcgaccgcacctcccgggcgcgtcggcgcaccgtggcggcatcgagcgacaattcgcggcagaggttgtcgaggtaggagctcggctgtcccgaggccagcaggtggatctccttgaggatgcgcgatttcatctcctcggtggccttgttggtgaaggtcacggcgaggatgtggcggtaaatgccgggctgttcgaccacgtcgcgcacgtatttgtacgccaactggtaggtcttgcccgaccccgcgcttgcattcagaattctcgccctcactgtccgaaatgtcgttttaggtagtaaaagtacaaaacaaatcccgaacggcaaaccggggttcgcaataattttgtattttagcgacgtatttaaacctacaatgtatgaagaagatgattctgagcgccgtgatgctggttttcgcagcctccggccgtgcacaggaggcgggtgccgcaagtcctacggaacataacgagtggctgaccacgttcgaggccgtcgcggtggatgccgacctggatatcaaattcgtgaaagtccccgacaccgaggcccccaagatcgtatacgacacgaaaggttcctatacttcgaaattccgcgccgaggtgaaggacaaaaccctgcgtatcagcgagaggcccgattcgcgccgtcccgaccgcaccgaggtgacggtctattacaatacgttgcagtccgtttcgctgtcgggcgccgcagccgtgttcgaggggacggtggatgcggtgcagctcgacctgacgctggggcgcaaggcgtcgctcacagcggcgttcgatgtcaaagacctcaggatggagctcacgggcggcagcagcgcgacgctcaccggcaaggcgagctacctgacgctgttcgcctcgacgggcagggtcgcggcctcggggctggaggtgatgtcggccgaggtcaatgcccagagcaaggccgacgtgtcgctgtggatcaccgaccggttcatcggcaagaccacgactaacgcccgtatcacctataaggggcagcctgccgtcgtgcgcggcggcgccaagttcatgggcggtgagatcagccacgtagaatagtctcatggaacaataatgcgaagggggcttccggatcccgggcggacaataccgccggggaagtcgccggggctgtccgaactgctatgaagggatttctggaggaggtggccgccgacctgtatgcgcgctatggcgagggattgtccgaacgggcggtgctcttcccgtcgcggcgtgcgcggctgtttttcgtcgatgccctggggcgtatcgccgggcgtccgatgtggcagcccgaatgggtgacgatcgacgacctgacgggcgaaatatcggggctgcatacgggcgaccgcgtgcggctcatcaccgagctttacaaagtctactcggcctaccacaacgaacccttcgacaagttctatttctggggcgatatgctcctcacggacttcgatacgattgacaaatacctgatcgacgcgcagatgctcttccgcaacatctcggagatcaaggagatcgaagccgatatttcctacctcacgcccgcgcagctgcgcatcctttcgttctggtcctcgttcggcgagcaggccgacctttcggaggagaaacgccgttttctggcgatctggaagaccctcggccccatctaccgccgcttccgggagcgtctctcgtcgctcggcatcgcctacaacggcatggtgcagcgcgccgccgccgaccgcatccgcgggggcgggttcgccttccccgagccccggcgttatgtcgtggcggggttcaacgccctttccgagtgcgagaagcgccttttcgggttcctcgccacggcggccgaaaccgatttttactgggactacgactcttattataaggacgaccccgaacaggaggcgggtatgttcgtgcgttcgaacgtggcgcagttcccgccccgcacggaacttcggcacgacaacatgcggggagagaagcagatcgtgtcggtcgccgccgtctcgaacgccgtgcagtgcaagtatgccgcggcgatcctcgccgatctggcccgccgccgcagggaggaagactccggcatcgccgcgggcgccaggcccgcgctgggcaaggagaccgccgtggtgcttaccgacgagaacctgttgctgccgttgctgtacgccctgcccgccgacatcggacgggtgaacgtgacgatgggcttccccctgcggcagagcctggcctacacgttcgtcgagcgtctggtggagttgcagaaccaccgccgccgcaagggcgacggctgcacgttctaccatgccgacgtcgccggcatcctcgcacacccctatgtggccgagtgcgacgccgcactcacgcgcacgatgcacgaggagatcgtccgtgaccgccgcatttcggtcgatgccgcgtggctgggccgcaacgaattgctgaaacggatctttacgcccgccgcgacgtggcgcgagttgtccgactacatgctggacgtggtcgccgccgtggcgcgccagccctacgagggcgacgatgcacggcagcgggtcgaattcctggcggtcatcgccgagcaggtcaccaagttgcgcaactcgctcgacgagtgcgatatcgaccttacggccgaggtctacacctcgctgctgcgccggcacttgcagacgctgcgcatccccttcgagggcgagccgctggagggcatccagatcatggggatcctcgagacccgcaacctcgatttcgaaaacgtcatcatcctttcgatgaacgacgacaatttccccggcaatcatatggcgcaggcgtcgttcatcccctacaacctgcgtgcggcctacgagctgcccacgcccgagcaccacgagggcgtctatgcctactatttctaccgcctgatccagcgcgctgagaccgtccacatgctctattgctcgcacgccgacgataagtcgacgggcgagccgagccgctatatctaccagttggactacgagagcggcttcgacgtgcgcaaggtcgaagtgggggtggacgtcaacctagccgaaacggcgccgatcgaggtgcccaaggacgaaggggtgatggcccggctggagcgtttcgtcgacgcccaaagccctgcgacgctctcgccgacggcgtttttccgctacgtggcctgccccttgcgcttctatttccattccatagcccgcttggaggccgatgacgaaatttccgaggaggtcgatgccccgatgttcggtacgatcctccatgccgccgtgcagacgctttacgcccgcatcgcgggcgaggcgcatcccggtgaaaccctgcgtgcgatgatccgtacgggcgaagtggcgcaggcggtcgaggcggccatcaacgagaactatttgcaggataaacatgccacagccgaagattattcgggcaacctgttgctggtgaaggacatcgtgatccgttacctgcggggcggagtgatgccctacgacgccgcgcacgatgctttctccgtgtcggggctggaggagcccgtagcctatccgttccgtttccgcgcgggcgggcgcgacctggagatgaaattcgccggcatcgccgaccgtatcgacacgctcgacgacggggcgctgagggtggtggactacaagaccggggcgccgcatctcgaattcgacggcgtggagagcctgttcacgggcacgggcaaacaacgcctttcgaacatcctgcaaacgctgctctacgcgatgatgctgcaccggtcgcgcggctgcgacgtcgaaccggcgctctattacgtccgcaacatgaatcgccccggctattcgccgcagctggacgacaagcaaacgggggtgaagggggcgcgctatacgctttaccgtgagcgtttcgaggaactgctgcgcgcgcagctcgccgaactctacgacacctcggttccgttccgccagtgcgaggatgccgatacctgcaagtactgcgacttcaacgtgatctgcaagcgctgaccggctgtgtcgtaacgggggcggacgagttccgctgccgggtggtgattactcccggaaattacatggctcggttgtggaagatcggccggatggatgctgttggggacggcgcggaggaagagtgcgtccggcagcgggtgccgggtgccgggtgcgaggtgcaggacgcaggatgcaggatgcagaatacaggatacaggatacagggagccggatgtcggatgtcgggtgcaggatgccggatacaggatgccgggaacggcctgggcggcgatggtcagagcgttaccctgaaataggccgctccgctgcggcgggccgcttcgagcccgatttcggagtcttcgaagatcagcgtttcctgcggcgtgcagccctcgcggcgcatggcctccagaaagcagtccggggcgggtttgctgtgctcgacgtcggagcccgagaggatgccgtccacggagccgttcggcccttcgcccggctcgggggtgactgttgcgtgtgttggcgtacctgcatctatcgttgccgtgccggctgtccggagccatgcctcatccgcacctgtcaagtctctgcccgccgcacccgaggttgccgcacccgtgctccccgtccgctgtcccgcgaccgtgatccccaggtggcgcatggcgttgtctatgttggcgcggctgcctgtcgatacgatccatacgcggccgccctgcgcccggaactgcctgcagaactcccacagcgggcggttgagccgcacggtgtcgaagaacgcggggtagagcgcgatcttgcgcagccgcagccgctcgcgctctgcggggtcggcgatgccgtaacgggtcaggaactcgttgcaccgcataccgaaatactttgccgcatactcctcctcggtgagcgtatagcccgcctcgcgcagtgtggccacataggcgagcgtattggcgcgccgcgtgtcggccagcgtgccgtcgaagtcgagcaggatgagtcggatttgcatgacgggttactttttccctgccagttcgtaactgcgggcgatcagcggggcgatttcccccaggggtacgctgccgtccagccgtacggtgagccacgtgcgtttgttcatatggtaaccggggaaataatgttcgaagtccagcgaccgcgccatggtctccgcatcggcccggatgtcgagaatctctgtccgcccctcgtccgcgaggccgagtttgccggcctgcaccgtcaatatcacggcataccatttggcgttgtcctgccgccggaaaacggcgtagtccgggaatttctcccagaggaactccggttcgccgccccatgaggcacggatatggcggattgtgcggagcgtttcttcgctgcggaaaatttcttcgcgcgcaaagccgaaatcctttgtccagtcgtttcccatctcctttgtttttagtcgaacgactgcatgcccgactgtgcgatgcgcatcaggcgctggtattcggtgggggtgagttccatgaagaagtagtggatcgggtcgacgcgcatgccgttcagccgcacttcgtagtggaggtggggcgagagcgaaaggcccgtgtcacccgagagggcgatgatctcgccgcggctcacgcgctgtcccttgcgtacgttgatcttcgagaggtggctgtacgaagtctcgtagccgttgccgtggtcgatcacgaccgtctgccccgacgtggagttgcgcagcgccacgtcgcgcaccacgccgtcggccgtggcgaagacgcgcgacccctcggggatggtgtagtccacgccctggtgcgattgcagggtcttgtagaaggggtgtatgcgcatgccgtacgaggccgtgagcagcgtcaactgcttgtttatcacgggctggatggccgggatgttgttgcagccgctgcccgccgagtcgatgagcgcctgcaggtcgaggtacgaggcgttcagctcgtcgagccgcttctccatgtcggcgacccgttcgcgcagttcgagcttgagccgccgcgacgaacggttgaagatgttttcgtaggtgacggcctgccggcgttcgtattccgaatcgaagtcgtagggatccgattcgaagaggatgcggaagacgttgcggtcgcgcgcggagaggttgtgcatgatggtcgtgagcgagtcgtaccgctgggtgagggcggcgtattcgcggcgcaggcggtcggtcgagtgtttgagctcgtactccacgggggtgtcgaagaagagcgagaaccctatgtagtagagcacggcgaccccggcccacacgaaaaagtgcaccgtcgcgcgtatgatgttctgtttgcggcgcttacgcctgcggagccgctccaggtctttctttcctgccatgtcagagcttttcgaagttcgtatcgcgcatgttctccatgagtgcgtcgtattccgcggcggtcatgttgcggttgaaatagttgatcgggttcaccggcatgcccttgtggatcacctcgtagtggaggtgggggcccgaggagatgcccgtgttgcccgtttcggcgatgacctgcccgcgggcgacccgttcgcccggctgcacgaggactttgctcaggtgcgcgtagcgggtcttgtagccgaattcgtggttcagcagcaccatgtgtccgtagccgccgttgccccccgaggaggcgacctccaccacggcgtcgcccgtggcgtagaccggcgtgccgcggtcgcagcccaggtcgatacccttgtgggggcggatataccccagcacggggtgcatccggcgcaggttgaaggcgccgatatggtcgttgtgcagcgccgagcggtcgatgggccagatggccgggatcgccgccgacatcttctccttgtcgcgggcgaatgcctgcaattcgtcgaaggacaccgattcgaggtagagtatgcgggccagcgcgtcgagctgcttccaggtgccgaccatcagcggggcgaagtcgtccccggccatcggggcgtatttggtgtcggggtagggctgccacacgccgtcgatcgacaccgtgtcggtcgagaagagcgagcggtagacgtagttgtcgcggtggcggatttcgtccacgcgccgctgcgaggtgcgtatgcggtcttgcaggatgcggtacttgatgaccaggtcgcggttgtcgcggatgatgcggtacatcttgggggtgtagaagaagtacgagaagagcacgttggcgatcgagacgaggatgaagccgatgagtattttccggatcaggcggtaggtgcgcaggcggaaaggcgccgagaccacgtcgcgcgtcagcacctgcgcttcctgtgtcagcgcctgcgtgtcgaatctctgccctttttgcttcattgcggaaaaaactccggttaataggatgcaaatttaactttaattgtgtaattttgcaacccgaaatcacaaacgtggaaatcggataaaatcttatatatggaatcgaataaaattcgccgggcctttctggacttcttcgagagcaagggccatgtgatcgtgccctcggcaccgatggtcgtcaagggggatcccacgctgatgtttaccaacgcgggcatgaaccagttcaaggatatcttcctgggcaatgcgccccgcaaatatccgcgtgcggccgacacccagaagtgcctgcgcgtttcgggcaagcacaacgacctggaggaggtggggcatgacacctaccaccatacgatgttcgagatgctgggcaactggtcttacggcgattacttcaagaaagaggcgatcgaatgggcgtgggagctgctccacggcgtctacaaacttcccgccgaccgcatgtacgccacggttttcgaaggctccgaggaggacggcgtgcccttcgaccaggaggcctacgactactggaagcagtttctgcccgaagaccatatcatccgcggcaacaagcacgacaatttctgggagatgggcgagaccggcccctgcggcccctgctcggagattcatttcgacctgcgcgacgaggcggagatcgccgccaagcccgggcgcgggatggtcaatgcgggccatccgcaggtgatcgagatatggaacctcgtgttcatgcagttcaaccgcaaggccaacggctcgctggaggagcttccggcgcgcaacgtcgataccggcatgggcttcgagcgcctctgcatgatcctccagggcaagaaatcgaactacgacaccgacgtgttccagcctacgatccagcgtatttcgcagctttcgggcaagacctacggcgccgacgcgaagtgtgacgtggcgatgcgcgtcatcgccgatcacctgcgtgccatcgctttctcgatcgccgacgggcagttgccgtcgaacgtcaaggccggctacgtcatccgccgcatcctgcgccgcgccgtgcgctacggttatacctacctcggcttcacggaacctacgatctgcaagctcgttgcggggctcgtggagcagatggggggccagttccccgaactgaaggcccagcaggcgctgatcgaaaaggtcatcgaggaggaggaggcctcgttcctgcgtacgctggccacgggcatcagcctgctggacggcgtggtcgaaaagaccaagaaagagggccgcgaactgatctcgggcaaggacgccttcgagctttacgatacgttcgggttcccgatcgacctgacggagctcatcgcccgcgaacagggcgtcggcgttgacctcgcagcctttgaaaccgagttgcaggcgcagaaggagcgttcgcgcaacgctgcggccgtcgataccgacgactgggtggagttgttccccattcgcgagagcgtcttcacgggctacgacacgctgaccgagcgggtgaagatcgcccgttaccgccgcgtgacctccaaaggcaagacctcctaccagctggtcttcgaccgcacgccgttctacggcaactcgggcggtcagatcggtgacatcggctatatcgagaatgccaacgagcgcatcgccgtcgtggctaccgaaaaggaaaacggactgattatccatatcgtcaaggagcttcccgaaaaccctgcggccgagttcacggccgtcgtggacgctgccaaacgccaggccgcggccaacaaccataccgcgacacacctcatgcacgaggcgctgcgcaaggtgctgggatcgcacgtcgagcaaaagggttcgatggtgacgcccgagatcctgcgcttcgacttttcgcatttccagaagatgactcccgccgagctgcgccaggtcgagatgctcgtcaaccgcgccgtccgcgccaactatccgttggaggagaaccgcgaggccaccaaggaggaggccgagaaatgcggtgccatgatgctcttcggcgagaagtacggcgacaaggtgcgcatggtgcgcttcggtacgtcggtcgagctctgcggcggtacgcacaccagcgctacgggtaacatcgggttcttcaagatactgaccgagagcgccatttcggccggcgtgcgccgcatcgaagccgtcacgggcgaacaggccgagaagatcatctacgccgccgaggatacgatgcgcgacatcagcgaatacctccacaacccgcaggtgctgcaggccgtaaagaaaatgttcgagagcaacgagacgctttcgaaggaggtcgaggccatgcgccgcgagcaggtcgcacagtgggccgagaagatcatctcctcgacgcccgagcgccacggggtgcagctcatcgccacgcagaccgaccgtacgcccgagttcgtcaaagacttggcctataacctgcgtgcccgctccccgaagctggtgttcgtgcagggggcggtcaacgacggcaaacccatgctgacggtgatgctcggcgacgagatcacggcccagggcgtgaacgccggtgccgtggtgcgcgaggctgcgaagctgatgcagggcggcggcggcggacaggcgttcttcgccacggcgggcggcaagaaccccgacgggctgcaggccgccatcgacaaggccgtggagctgattatggcccaggtaaagtaaaagaatagttaaaaactggataattatgaataacaaggtattactgatgatcctcgacggctggggcaacggctgccacgacaaggccgatgtcatttcgaccgtccatcccgaatatatctcggccatgacggcgaaatatccccatgccgagctgcgcaccgacggcgagaacgtcggactgcccgacggccagatgggcaattcggaggtcgggcacctcaatatcggcgccggccgcgtggtctaccaggatttggtgaagatcaaccgcgcctgccgcgacaattcgatcctggagaaccccgaggtcaaggcagcgttcgaacatgccaaaaagaacggcgtgaacatgcatttcatgggcctcgtgtcggacggcggcgtgcactcgtcgctcgagcaccttttcaagctgtgcgacatctcggcggcctacggcctcgaaaataccttcgtgcactgcttcatggacggccgcgacaccgacccgcacagcggcaaggggttcgtcgccgacctcgagaagcacctcgcggccacgacgggcaagatcgccacggtgatcggacgttactatgcgatggatcgcgacaagcgctgggaacgtgtcaaggtagcctacgacgcgctggtcagcggcatcggcgagcgttcgtcggacatggtcgaagccgtccagaaatcctatgacgagggcgttacggacgagttcatcaagcctttcgtgcgcatcgacgagaacgggcagcccgtcggcatgatccgccccaacgacgtggtggtctttttcaactaccgcaacgaccgcgccaaggagctgaccatcgtgctgacgcaggaggacatgcccgccgaggggatgcacaccatgcccctctactattgctgcatgaccccctacgatgccaagttcacggggctgcacatcctcttcgacaaggagaacgtgcccaacaccatcggcgagttcgtttcgaagcagggcttgcggcagctgcgcatcgccgagaccgagaaatatgcccacgtgacgttcttcctgaacggtggccgcgaggcggagttcgcgggcgaagaccgtatcctcgtcgcgtcgcccaaggtggccacctacgacctgcaacccgagatgagcgctccggaagtcgctgacaaactggttgctgcactcggtgagcggaagttcgactttatctgcctgaatttcgccaacggcgacatggtcggccatacgggcgtctacgatgccatcgtgaaggccgtgaaggccgtcgacgggtgcgtcgccaaagttgtcgaggctgctaaggagaacggttacgaggtcgtcatgatcgccgaccacggcaatgccgacaacgccgtcaatgccgacggtacgcccaatacggcgcattcgctcaaccccgtgcccatcgtggtcgtttccgaccgcgtgaagtcggtgcacgacggcatcctggccgacgtggccccgacggtgctcaggttgatggggctggagcagcccgccgaaatgaccggcaaggcgctcgtggagatgaaataaccggaatcccggtaactgaaaaatcccgcttcattggagcgggattttttatttcctccgggaatggctcgcgtgcctgtccggcgggcactattattcgtcgaccctgtcgttgaattccttaacccatgccggaaggaggcgcagggcgtgcgacatctggtattcggtatttgcccggctgttggtgacgaattccatggccagcgtaaagacgttcctgttctcgtttcgggagaccgaacatttgcagacgaacttgttctggtttatgtcgttggcgatctcgatcagcttgtcgtagggggtgacggtgccgaagttcgccagcacttccacataggcataatcctcgttttcgatctgttttacgataatgttgtagaggattccctggattttgaactcgatgtccgagtccttgtccagggccggggcatagccttcgtgtttgaggtaggtgaaaatgtcgttccggacggtctgctgggcaaagagcgccgggatgccggcgagcagcaggagcagggtgagtgtgaattttttcatatcgggttgttaagggttgtctcgaacaaagataatgaaaattccggctctttgccggcatcacggtttgaaaaattatcccccgcgtcgggggaaataacaggagctccggatgttgtgaagggattttcgggacagtgtttgcggagatcggattcttttctactaaaaaattagtagttttgggaaaaatcgttatctttgcttctgacaaccaaaaacacgttcccatgaaacgactctccgtccttttgtctgccttcgttttccttgtgtttccgctctttgcacagtccggtttccggacgggcgccaaagttcctgccattacggtcgagatgctcgacggccgggaggtcaaaatctcgaaatgccggggcgacgtagtgcttttgtccttttgggctacctggtgcaaaccctgcctgcgcgagctcaacgagatgccggagaagatactccggcgtttcgagggccgcaaattcacgatgattgccatcgcaaagggcgaaccccgcgagcgggttgcggagaaggttgcccagctgcgcaagcagggcgtggtcttccccgtcgggctcgacccctatgaaaagatttcgcagctgcttggcgacgagcgtattccgcaactggtaataatcgggcccgacaccagggtgcgttatcacgaagtggggtatacgcccgaacggctggatgaagcggccgaaattatcgaaaaacttttaaacgagcagccatgaaacacatgaaacatctgtttatcgcacttgcggccggtttcgccgcaactttcgccgcagcccagattccgatgccggcctgggaactctccgaggccgttgagcggcagagcggcgtaatgaactacaccaacgaaaaattcgacttccgccgtctgcccatgcatcgcagcatctcggaatttctccacccgggcgataccgtgcagtaccggacgttccttttcgacgtcactgtctgcgacgccgggggcccggtctcgcaactgcgcttccagagtgacccgcaggtcgtgcgcaaagaagcggatacggtcactttcgtcgctgcggacaatgcgtggctgcaagtcgtcgcccttgcacacctgcccctcgacgcatcggacgagctggttcggcatgcggtggattcgctgaaggacatccgcacgattaccgacggcatggacattctcccggccaaacagtgcgggatgtcctatgccctgcagtaccttttcggcagggcgggaatcgacgcggaaccgctgctgtcttggcaaacctacctgtcgagcgacaaggctgccgagctgctcggctattgctgcgaacctgtccggaagatgcgtatcggcggggatatcgagcgttttgcccgcaaggctgaattttcggacgagtatatctacctgctggagggaaacggggagcggaagatgccggtcgcctttttctgcagcgacggtaaattttgggcgaaaatcggcccctgtcagtatctttcgttcgattcggtcatctccgtctggcgccacgataagaagacgacgcatgtcggcgtataccggctgaaagggaagttccggtagtgcggaaacccgctccgctcaatacccggatgcaggagcgtacagtgtgaccgcatcccggcgtctcccatatggagatgggatgtcccgccccggataattttcccaaagtacggccctgcgggaacggaacggctgttcagaacagcgacccctgttcgggcagggtgggggcgtagaaccgcatccgggtttcgagccccagtttcgcgcacaggttccggaacgtgtcgttcaacttccggtaactggggctgaagcattcgtagcggttgccgaaacaggcttcgtagcgtgctttcagcccggggaattcccggtcgagggttgcgtggaaatgctctcgcgacccgctgcggagcgttacgccgaacatcgggaggatatacgatgcccccgcgtccttggcccggcggacgatggcttcgacattttcccgcgtgtcgttgatcagcggcagcagcggcatcatcgtgacacccgtataaatgcccttggcagccagtgccgccattgcgcggaaccgctccgaagaggccggggcgccgggttccgtgcggacgctgagcgcgtcgtcggcacaggtcacggtgaaactcaccgccgcgtaggtggcggaaatttcctgcaggatgtcggcgtcgcgctccgccagggagctcttggtgatgacatgcaccgggaaacgctcgtcggcgatcatgcccagtgcccggcgtgtcagccgcagctcgcgctcgacgggcatgtaagggtcgttcatcgaccccgtgctgatcgtggcgcgttttttccgccgggcacgcagctcggcgggtagcaattccagtgcgttgcgcttcacggctatctgggcgatgtccccgatcccgtagcagtcgctgcgcgtgtcgcagtagatgcatccgtgctggcatccccggtagaggttcatgttgtaggcgatgccgaaccaccgatcggccgtccgcagcttcgagaggatcgttttggtttcgatataccgcatgggcgggtcagtagagctcgatgaattcgtaggtgttgcctacggccgccaggtaacgcaggaactcctcacgggagatcaccaccgtcgcccggttgtcgttggggtggaacgagtaggccggcagccgttgcaggctggcgtcgaggaacaggtgcacgtgcctggccgggtcgttgatcagcccgaagggcgacaccgaaccgggacgcagccccagccagcgctccatgcgctgctccgaagcgaacgacagtttgccctgcctcaggcggtgttccaggtcgtggatggccaggttccgttcgcagtcgaaacatacgaggtagtggcggttgcctttgtggttgcggaaaaagaggttcttgcagtgcttcgacccgtcgtcgcgccagtagcggcgtgcggcctcgatggtcggtgcctcggggtgttcgtaccacgtgtaggcgatgccgcgggcgtcgagccagccgaaaacccgctgccggcgttcgtccggcgtcggggcggccgttgcggcgccggggcttgccgtttccattccttccatggctatcgggccttgaggaattcttcgatattctccgcgatgcagcctaccagcacgtcgatggcttcgcgcggcgaccatgcgttgtggggcgagagcagcagccggtcgggttcgcggatgctcagcagcgggttatccgcggccagcggctcgcgcgagaatacgtcgagcgcggcgcctgcgaccgatccccggtcgagggcttcggccagtgccgcctcgtcgacgattccgccgcgggcgacgttcacgaggatggccgattgcttcatcacggccagctccggggcgccgatcagcccccgcgtgtggtcgttcagcggcgcgtgcaccgagaccgtgtccgcccagcccagcagttcgggaagcgacacggcggggtagggctcttcgcgcacggcgcccgaggtcgaggtgtagcgtacctcgcagccgaaggccgcggcgagccgcgccacttcgtgtccgatggcgccgagccccacgatgccccacttcgagccgtagagctggtgcgtgggtttggcgaagtggaactgctgcccggcggccgagtaagcgccgctcttgacatagcggtcgtagtagacgatgtgccgccgcagggcgatggccgccccgagggtggtttcggctacggagtgcgtcgagtagcccgcggcgttcctgacggcgatgcccagctcggccgcggcgtcgaggtcgatgttgttcatgcccgtggcggctatgcagatcaggcgcagcccggggagtgcggcgagcgtctcgcggcgcatcacgactttgttggtgatgacgatttcggcatcgcggcagcgatccgcgacctcgtccggcgcggtcgtgctgtaacctgtgtaccgacccagctcgtgcaggcgggtcaggtcggcacccccgagggtgtactcgtccagaaatacgatgttaggtttcattggcgtatgtgtttatggtttcgttgtcagtccatttccccgatcagcgtgcggatcgccaccgaggcgcagccgatgccgaacagcgccgggatgtaggagattgtgccgacgttcgacttcttgttctgttcgtcgcagaggatcatcgccccctcgcgcatggcctcgggcgagaataccgccttgaagccgctgcggacgcccagtttgtgcagccgcttgcggagcatgtgcgccagggggcagtggtgggtcttcgagatgtcggcgatctccatcttcgtggggtcggtcttggcgccggcgcccatcgagctgaccagcggcagcgaacggtcgagggcgccctttatcagcgccagcttgggcgagagggtgtcgatggcgtccaccacgaaatcgtatgcggcggcgtcgagcagcgtgtaggtctcctcgtcccggatgtagcggttgacgatggtcagtccgatcgcggggttgatgtcccgcagccggtcggcgagcacctcggccttctgccggcctacggtcgaatgcagggccaccagctggcggttgatgttgctcggcgccacggtgtcggcgtcggcgatggtcatgtgtcccacgcccgcccgggcgatcatttcggcggcataggcgcctacgccgcccagtcccacgacgagcacgtgcgcctgccggagcaggtcgagtttttccttgccgagcagcagctcggtgcgttcaagccagttatccattttgtggggcgaatatccgttcgtaattttcggtcgtcgcccgtttcagggcttcgacggtggtgcctctcaccgctgccgcgtgcgcgtagacctcctcgatgccggtgtcgctgtcgtcggtttcgagaaagagctgcccggggggcgtttcgcgcagcgcctccatggtcttgggcgacgagaacgtccgcacgccgaacgagaggtagtagcctttctccagtgcgcgacgtgcctgctcgggcgagccgatgaacccgtggaagatgacggcacggggctcgcgggcggccagttccagcatgacgggctcgaaggccctgacgcagtgcagcactacgggcagttgccggtcgcgcgccagtgccagctgggcgcggaaggcggccagttgctgctggcgcccggcgccgcgggcatagtcgagccccgtctcgccgatggcctgtacgtccgccgggagcgtgccgagtgcggcgatgttctctttgtctgcatcccacgggtggatgccggcggtgcggagctcgatgccccggcctgtcgggcggtgggtgtgtatgttgacgaattgggaggtcattgcgacaaaagtacaaattttaagtaaattaaaaaataatagataatgcatacggatttttcggaaaaaattcgtactttcgcacgcgaattatgctgttagcaggctaacaacaaaaaccggcccgaaatttaacccaaaaatatccaaacataacaatcaaaatctttaaccatgtcgaaaatcattacactacgcaagggtctcgacatcaatctccggggaaaggcccaggagtctctggccgacgcgccgcaggcttcggagtatgccctctcgccgctcgatttcgaaggcgtgactcccaagttgctggttaaggtaggcgatgaggtgaaagccggtacgccgctgttcttcaataagtacagcgagcgtgtcctcttcacgtcgcctgtcagcgggacggttgctgccgtcaaccgcggggagaagcgcaaggtgctctccgtaaccgtaacgccggatgccacgcagagctacgaggagttcgccaagcccgacctccagaaagcgtcccgcgaggagattgtcgaactgctgctccgttccggcctctggccgatgatcgtgcagcggccctacggcatcatcgccgacccgaacgacacgccgaaggccgttttcatttccgccttcgactccgcgccgctggccccggattacaacttcgtgctccgcaacgagcagaagaacctccaggccggcatcgaggtgatgcgccgcctcacgccgggcaaagtgcacctctcggtgcgtgccaaggccgaggggcagatgcccatgctcaagggtgccgagctgcacaccttcgcgggcaagcatcccgcgggcaacgtcggcatccagatccaccacatcgaccccgtgaacaagggcgacgtcgtgtggacggtcaatatccaggatctggccatcatcggccgcctgttcaacgaaggccgcgtcgacatgacgaagatcatcgccgtagccggctctgagatcgaaaaaccgcagtactgccgcgtcgtcgcgggcgccagggtcgattcgatcctccggggcaacgtgaaaccccaaaaggagggcgaccatgtacgcatcatctcgggcaacgtgctcaccggcacgaagaccccggccgacggcttcctcggtttctatgccaatcagctcacggtgatccccgagggcgacaagtacgagctgctgggctgggcgatgccccgtttcaacaagttctccgtatcgcgctcctatttctcgtggctctgcccgaagaaggcctacgacctcgacaccaacatgaacggcggcgagcgcccgttcgtcgtgacggggctctacgagcagtacctgccgatggacatttacccgatgtatctgctgaaggcctgccttgccggcgacatcgacaagatggagaacctcggcatctacgaggtcgtagaggaggatttcgccctgtgcgaattcgtagacccctcgaagatcgagatacagcagatcatccgcgacggtattaacttaatgattaaggaggcataacgatgagcgcattacgcaatttggtagataagatcaagcccacgttcaccaagggtggcaagctgggcttcctggagtcgacgttcgatgcgttcgagacattcctgttcgtaccgaacaccacgacgcagaagggcgcgcacatacgcgactgcaacgatatgaagcgtacgatgatcatggtggtcgtcgccctgatgccggcgctcctgttcgggttctataacacgggttacctgcatttcctctcgcagggcgtacagcccgaattctgggcttcgctctggttcgggttcctcaaggtgctgcccatcatcgtcgtttcgtacgtcgtcggcctgggcatcgagttcgccttcgcacaggcccgcggccacgaggtcaacgaaggtttcctcgtgacgggcctgctgatcccgatgatcatgccggtggacatcccgctgtggatggtggcgctggccacggccttctcggtcatcttcggcaaggaggtgttcggcggtacgggtatgaacgtcttcaaccccgcgctgctggctcgcgccttcgcgttcttcgcctatacgccctcgatgtcgggcgctacggtgtggatcgcagggctctcctcgggcgagggcgtggtggacggcttctcgggcgccacggcactcgaaaacctgagcaccacgggccagatgggctactcggccatggatgccttcctcggtttcattccggggtgtatcggcgagacctcgacgctggcgatcctcctgggcgccgcgatcctcttgttcacgggcgtcgcttcgtggcgcacgatggtttcggtattcgtcggcgggctggcgatgggctatttcttccaggcgatcggtgtgacgacctatccggcatggtaccacctgatcatcggcggtttcgcattcggtgccgtcttcatggccaccgaccccgtgacctcggcccagaccaatacgggcaagtacatcgtggggctgctgaccggtgcgctggcagtgctgatccgcgtggtcaacccggcctatcccgagggcatgatgctgtcgatcctctttatgaatgcgctggctccgctggtggactactacgtggtcgaggcgaacatctcgcgcagaaagaaacgtgttaaactggcgaaataggggagatatatggcaacgaaaaaattcaaatgcacagtctgcggctatatccacgaagggaaggccgctcccgaaacgtgccccgtttgcgcggctcccgcttcggcgttcgtcgagatcgaggacgcgaagaagaaggggatgctgagcgacaagaacggcaacgcatatattataatgtattcgaccgtgatggtcgtgatcgtggcgacgctgctcgccgtggcggcactctcgctccagaagcgccagtatgccaacgagctgaacgaaaagaaatcctcgatcctctcgtcgctctcggcgcaggatcaggattacgataccttcatcgacgcctacgtcgtcgacgcccggggcgagaaggtcgagggacaggacgtattcgaactgctcaaggacttgcagggcgctttcgacgacggcaaattccccgtgttcgaggccaaggacggtcgtgtggtgatcccggttacgggtaccggtctctggggcccggtctggggctatgtggcgctcgaaaaggatatggacacgatggccggtatcatcatggcccacaagggcgagaccccgggcctgggtgccgagatcgccacgccgaaataccaggcgctgttcgtcggcaagaaaatcttcaagggcgacgagttcgtttccgtgaagctgcgtaagggcggcgcacaggatcccgagcacgaagtggacgccatttcgggcggtacgaagacttcggacggcgtgacggcgatgctttacaacagcctgcaccactacctgccgctgctcgaagccaagcgcaaggccgcaatcgaggatgtcgtgtttgcccccgtgcgggatgagtctaacgaagaaaatgtaggaaacaatgagtaagcaagaaaaagagcctttgttttcggctaagaatatgaagttcctgacggggccgttctccgcgaacaacccggtcatcgtgcagatcctgggtatctgttcggcgctggccgtcaccgtgcagctcaagcccgctatcgtcatggcgctttcggtgaccgtcgtcacgggtttctcgaatctggtgatgtcgctgctgcgcaacggcgtgccttcgcgcatccgcatcatcgtgcagctggtggtcatcgccgcgctggtaatcctggtcgaccaggtgctcaaagcctatgtctacgaggtgtcgaagcagttgtcggtctatgtcggccttatcatcaccaactgtatcgtcatgggacgtatcgaggctttcgcactggccaacaaaccgtgggcgtcgctgctcgacggtatcggcaacggcctggggtacggcctgatcctggtgatcgtggctttcttccgcgagcttttcggctcgggcaccctgatgggtttccgtatcgttcccgagagctggtatgcggccgagggcggctggtactacaacaacgggctgatgctcttcccgccgatggcgctgatcatcgtgggctgcatcatctgggtgcaccgttcgcgcaataaggatttacaggaaaaataggagggtaacgtatggaatcattgaatatctttatccggtcgatctttatcgacaacatggtcttcgcgttcttcttcggcatgtgttcctacatcgccgtttcgaagagcgtaaaaacggccctcggcctcggcgccgccgttacgttcgtgatggtgatgaccgtgccgctgaactacctcctgtatgaattcgtgctcaaggccggcgccctttcgtgggccgggctgcccgatgtgaacctggacttcctgacgtttatcgtctttatcgccaccatcgccgctttcgtgcagctggtggagatggccgtcgagaagttctcgccgacgctttacagccagctgggtatcttcctgccgctgatcgccgtgaactgcgctatcatgggcggctcgcttttcatgcagcagaaggtcgatgcgctggagctgacgtcgctctggcagtcgatcgtctacggcctgggttccggcctgggctggtggctcgccatcgtcatgatggccgccatccgcgagaagacgacctactcgcagattcccgcggcgctcaggggccccggtatcgcgtttatcatcaccggcctgatgggtatcgccttcatgatcttctcgggtattcagttctaaccttaaaagagattcggaaaaaatggaattgactattatagttgcaatcattgcctttctggtggtgacccttctgttggtggggctgcttctctttgcaaaggccaaactgacctcgtcgggtgaagttacgatcgacatcaacggcggcgagaaggtcattacgaccgaaagcggctcgacgctgctcgcaacgctggccaacaacaaggtcttcctgccttcggcctgcggcggcggcggttcgtgcggcatgtgcaaatgccaggtgatcgagggcggcggcgacatcctgcccaccgagaccggtttcatcacgcgcaagatggccaaggagcactggcgcctgggatgccaggtcaaggtgaaggagaacctcaagatacaggttcccgaagccgtgctcggcgtcaagaagtgggagtgcaccgtggtctcgaaccgcaatatctcgaccttcctcaaggagttcgtcgtcaagctgcccgaaggcgagaacctcaagttccgcagcggcggctacatccagatcgacatcccgaaatacgatgccatcaagttctcggacatggacgtcgacgaggcctaccgtgccgactgggacaagttcaagatgtgggatctggttacgaccaaccccgaggctacgttccgtgcctactcgatggccaaccacccggccgagggcaatatcatcatgctcaacatccgtatcgccacgccgccgttcgacaaggctacgggcgggttcatgaaggtgaacccgggtatctgctcgtcgtacatcttctcccgcaagccgggcgacaaggtgacgatctcgggcccctacggcgagttcttcctgccggacaacctgcccgacacgcaggagctgatcttcatcggcggcggtgccggtatggccccgatgcgcagccacctgatgcatctgttcaagaccgaaaagaccaagcgccccgtgtcgttctggtacggtgcccgtgcgctgaaggaggctccctatgtggacgagttccatgccatcgaaaaggagttccccaatttcaagttcaacctggcgctcgaccgtcccgatcccgaggcggatgccgcgggcgtgaaatacaccccgggcttcgtgcataacgtgctctatgagaattacctcaagaaccaccaggcgcccgaggactgcatctacctcatgtgcggccccccgatgatgatcgcgtcggtggtcaagatgctggacgacctcggagtgccgtcggagaatatcctctacgacaacttcggctcgtagcggtgcggtgatccgctgaacgccgcaggcgcataaacgggaaggggcgaagattcgaatcgtttcgaaggcttcgctcctttccgtttttcgttgccgcagggcggggcgaagctgcggggtgtcgttgcacgcatggcgcgggagcgccgcccgtttgcggacgatacggatttccttcgggaatgacacggaagcccgacgctgcgggcccctgctcgccggcctcgcgctgtccgggaggggggagtgcctgtgccgggattttttgtgctgtatatcggcccgtccgggaaagtacagtatcgggataaattattatatttgtattaataaccgattcgacaaactctaaaaaccttaattctatcgaaatgaacattcctttgattttctggatcgtccctgccgctgctgtcattgccctggccgtagcctgggcattttaccgcagcatgaagcgcgaggacgaaggtaccccgcgcatgcgcgagatcgccgagcacgtgcgcaagggcgccatggcctacctgcgccagcagtacaaggtcgtgctgatcgtattcatcatcctggcgctgttcttcgcctacctggcctacggcgccggggtgcagaacccctgggtgcccttcgccttcctgacgggcggtttcttctcggggcttgccggttatttcggcatgaagaccgcaacctatgcttcggcgcgtacggccaacgccgcacgccagtcgctcgaccgcggcctgaaggtcgccttccgcagcggcgccgtgatggggctcgtggtcgtggggctcgggctgctggacatctcgttctggtatgttatcctcgaacgcttcgtggaggtgtcggggccgcagaaactcgtggtcatcaccacgacgatgctgaccttcggcatgggcgcctcgacgcaggcgctcttcgcccgcgtcggcggcggtatctataccaaggcggccgacgtgggtgccgacctggtgggtaaggtcgaggcggggattccggaggacgacccgcgcaaccccgcgaccatcgccgacaacgtgggcgacaacgtgggcgacgtggccggcatgggcgccgacctctatgagagctattgcggttcggtgctcgccacggcggcgctgggcgcggcggcgttcgccacggccgacggcatggcgatgcagctcaaggccgtgctggcgccgatgctgatcgcggccgtggggatcgtgctctcgatcatcggcatcttcctcgtgcgaacccgtgagggcgcctcgatgcgcgagctgctccgctcgctgggcgtgggtgtcaatttcagttcgctgctgattgccggcgcgacgttcggtatcctctacctgctgggaatccagaactggctcgggctgtcgtgctcggtcatcacggggctcgtcgccggtatcatcatcggacaggctaccgaatattacacttcgcactcctataaaccgacgcagaagatcgccggaagcgcccagaccgggccggccacggtcatcatcgccggggtcgggtcgggcatgatctcgacggccatccccgtcctgacgatcggtgccgcgattatcctcgcctatctgtgcgccatcggcttcgacatggagaatatgatggctccgatgaacatgtcgctggggctctacggcatcggcatcgccgccgtcggtatgctctcgacgctgggcatcacgctcgccacggacgcctacggcccgatcgctgacaatgcgggcggcaatgccgaaatgagcggcctcggccccgaggtgcgcaagcgcaccgacgcgctggacgcgctgggcaatacgaccgccgccacgggcaagggcttcgccatcggatccgcggcgctgaccgcactggcgctgctggcatcctacatcgaggagatccgcatcgggttgctgcacaacggcatcacgatgctcgacctgcctaacggcacctcgcagctggtcgagaaggcctcgattctcgatttcatggagtattaccaggtctcgctgatgaacccgacggtgctgatcggcatcttcatcggcgccatgatgtcgttcctgttctgcggcctgacgatgaacgccgtgggacgtgccgccgagagcatggtgaacgaggtgcgccgccagttccgcgagatcaagggcatcctcacgggcgaaggcacgccggactatgcccgctgcgtggagatttcgacccgcggtgcacagcgcgagatgatgttccccagcctgctggccatcgtcgtgccggtagccgtcggtctcgtgttcggcgtggccggcgtgatgggcctgctggtcggcggcctcagctcgggtttcgtgctggccgtgttcatggccaatgcgggcggcgcgtgggacaatgccaagaagatggtcgaggaggggcatttcggcggcaaaggctccgaatgccacaaggccaccgtggtgggcgataccgtcggcgacccgttcaaggacacttcgggcccgtcgcttaacatccttatcaagctgatgtcgatggtttccatcgtcatggccgggctgacggtggcttgccacctgttctgacccatgtgacgataaaggcaataagaaaagccacccggggaaggtggctttttttattgccttgcagcggggctatttcttgctcgcgccgctttcgaggatcgagacgatggagtagagcgtgaagcagatggcgccgaagcccgccagcacgcgtgcggggacgaaatacttgccttcggagagcgccgcctcgtagaggaatgccgcgaggaagaggcaggccagcgccgtaagcaccgggatgatcgggatgcggttggccagcgggaaatcggcgtgccagatctttgccagcaggatgaccttgctcgatatgctccagcagatcagtgccagccctatgagcacgaagcccacgaagctgatcgcctcgccccggagcgtgaagaggaggatcagccccagcacgaaggccaggccgcccatcgcgagcaccagccccatccaccggcggcgttcttccatcgtatagctgccccgtgcctggcgtgcgatgctggccaccagcgcgatgagcgacgtacagacgcaggcgatgccgaacatgacgcttcccgccacgatatgcgccgggagcgttcccagcgcgaagagcaggatgcaccacacccatgccccggcggctatggccgacacgatgaagatcagcagcgaactttgcccgcgggtgaagcctgcggggttgaccgagaaggtgctgtcgcccgagttcttggggatcaggctgaaccgcgtcgaggaggtggccgccgtcgagacgcacgccgtgatgaaccccagcccgcagattacatgccccgtgacgaacgccccggtcatgtgcgactggatgatgaaaagcccgcagatgaccgtcatggcggcgaccgcatagccgatggccgggaaaaggtatttcgcggcggcggtataggtgccgatgatctggcggatgatggtggcggcggtgcaatagagcgcgatgcagatcgagcccaggaaaaagagcacggggcctgccgtgagccgcgaggggtcgtcgccggcggcgaaaacgtaggcgccgtagacgaaacagaaggctgccatcgcaaggggaatggcgcggaagaggatgcttatgccatagttcataatcggagtttttgttatgcgccagcctgcaaatcatgaaccaaacgaaaaaatggctatctttgccccatggaaaatatcgttttcgacctgggcggggtactttttgcccgcgacagaagtaagtgtacgcaagaattccacgactttttcagtttcatccgttcggagcccatgccggctttctgggaggattacgaccggggcgtgctgacgctcgacgaggtgaccggcatcctttccggggtcaacgcctgcccgcgtgcgaaatgcgaggagtacctgcgcctgtcgatcgacatgcaggaacccgtgaagcctaccgaacagcttgtccgcgacctgaaggccgtcggctacaagttgttcgtgctttcgaacatgtcgcgcgagttcatcgacttcctgcgccggttccccgtctacgggcttttcgacggcgaggtggtctcctgcgaggagggcgtggtgaaacccgagccggaaatctaccggcgactgctcggccgctacggactcgatcctgcgcagacgctctttatcgacgaccgcccggccaatatcgctgccgcagcggcgctgggtatccgcgggcagctgttcgaccattcggcgccggccgcaacctgcgacctgctgcgccgcaggctgctgcccgaaatagtagggtagcagcccgagaccatatccgggtactccgtccgtatagctgcacctgcaggccgttcgctccgcccgcacgaatcgtcggcttccccttttgcagcggttttccctgtcccgtgatccgatccgtccgatgattgaaaaataaaaagggccgctcattgcgagcggccctttgctttggatcggattccgttattcgaagttggcatccttcatcagttcatactccggcgagagtgcgtacatgcgtacgtattcgaacttgccggtgtcgacgagtttgaattcgaatgcgtgcgtcaccttgcccgtgcccgagccgatgtgctgcgtgtagagcatcatctgtacggtgtagatcacgtcgatgccggaaatcatcttgacatcggggtagagcgtacccagggtggcggacattacctcgccgaaacgcttctctacttcgtcgtagaatgcctggtacgatgcgcgcatggcatccttgtcttccgacccccagttgtcgtaggccgatatgtcttcaccggcttcgctccagtagtatttcggaagcgtgttgatacgccagttcaggttggtgtagcttgccgcgcaaccgctgtaatattccgaatccgtgaggcggctcccgctacggttatccgtcgtataggcggcgtccttgttctggagtacccagtccacgcaagcctggtagaagctcttgctgtaagcgctgcggtcgggggccacgacgagcgtcatgctggggtcgaagttccatttgccgctgaccttcttgaacgggccgtcgagcgtctcggtgtcctcggtcttgatccagtccgcaccgtcgtaagtgtactcgtcggcgaagagcagggttaccttgtccgtcgagtcgtagaagtggtatgccacgttcatcttctcctcggccagggcgtagggatatttgtacttcaggtagaggggcaggtaggtgtcctgcgagaacgacgaactgaagttgggattggtggcgcccatctgcgtgtagtcctcggggttgaccatcgtggtgttttctgcggctgcccacgacgtgccgtcgaaggtgtaaatcgcatagcggttcttggtcaccgcggcgcgggtcatgccgaaggaagctgccgaagcattggctgccggcttgacagaagtgaccatcgtattgaggaacttgctgcccgatacgccgatcgcatagccttccacgacgacttcctgtccgtcgagtgctgggtctacggcgccgtccaggacatacgagaggctgccttgtgccgtcagcgcttcgtcgttgatgacgttgtagtagttgccgtcaattttcagcgtacccgtgtaacgcacgtactgcgccgtggtcagcgtcaggtaaccgtccatgtcggtaccgtccatttcgcggatcgcggggtaggtgaacttattggcctcggtattgagtttggtgacggtcgatgccgcggggtactggttcagcccggcataagccgaagtggtaccttccacgctgaccagatcgccgatggcataggttccggtcgggtcggcattggtatagatgaggatcgaccctgtgccgtcgttgatgaggaagccgcgcttgtaggtcgctgcgatctgtcccgtcacgctgaacgtgccgggatcggccgatgcgacgacgcccacgggcgtgaatgcgggctgcgaaccctcctcggcgatcgtggcgaccatcatgttggcgaatttgggtgcgtcgccgctcttgctgacggagaagaggtaaccggtcgcggtgaccttcttaccgtccaggctctcgtcgatctgccccttgttggggaaggagaggctgccggtggccgtcgcggcaccgtccaccttgaggttgtaatagttgccgctgatcgagagcgtacccgtcaggctgacgaatttgatcgacgttgcggtcaggtaggcgtcgagctcgctgcccgacatggcctgtgccgtggggaaggcgaaattcttggttttctccacgagcgtgatctcggccgtgttgccgaattgcatgccgctgttgtattccgtaacggcacccttgaccttcactatatcgcctagcgagtagttcgacggggcgttcagatataccagaatagcccccgtggtgtcgtcgacgataaagccgcgggcataggcagccgaaacggtgccctgcacggtatagtcgccgggggcaatgatttcgctgatcttgttgatggtctcggggatttcgccgcctccggtcgaaggctcctgctcggagtaggcgtattcggcgatgacgtagtcgccggcctcggcgttcttgacggcctccttgaggatgcgcggcaggtagttggctgccggcttaccgggtgtaaagtagtcggccgtgatatcctcgccccaggctacctcgtagtcggcggccttgagctcgtaggtcgaggcggaagcgatgccggtgatggcctcggatatctcgccgcgctggttcttataggtaacggtgacagtcgagccgttcgagaggtagctgtcgtaacctgcagccaggaatgcgggcaggtacgtcgtggcggaagcggcttcggagaaacattttgcagtgcctacggcggccagggctgccactgcatcgggccctgcggcttcggcgatcgccttgttggcggcgttcgacgcgacgctggcgtagtcggcgtcggtcatcgtgtatttcagtacctggacgtcggtgatctccttgtcggggttgaacccgtccagatactcctcgttgtaatcgtcgacattacaacccccccccacgaatgctatcgtcgcaagggccagaaggtattttacaatatgcttgttcatatggttcgctgtaattagaagttaattttcagtcttactgtataggtgcgaccgaacgagtacatgacggcatatacgttctgccagataccttcgtcggctgcggcgcactgcgcgtccatgatgtagttgtagtcgtagacgttgttcacgttgccgtagatcgtggcgcgtacgttgccgatcttgaaggcgtagctggccgagaggtcgagctggtgtccccacggaattttccacgggtctttcacgtcgacggtcgagttaccgttaaggctggtgttcgaaccgatgtagaagtcggcgtagttgttgccgtaggcgttccagtcggcgctgacgcgcaggcccttcatcgggcgtaccgtgacgccgagggctccggtggtctgtgccgaaccgccgaccttgatgcctttctgcttcaggttcagccatgcgtggtcttcagccatgatgcccgaggcgaccgtgccgtccaaagccttggtcaggggctgcccctgcgtgtcgtagatgtagcccttcgagtcgctgtcccactgccagtcgcccagcgaaagcataccggtcacgtccagccagcggttggggcgcaggacgaagtccagttcgaggcccatgtggcgtgcgtccacccccgagaggttcacgcgggcgtagtcgccgttggccatcgagctggaacgtacgaccgacttgtccatccagagcgtgtagtaaccgttcaggttgaccgaaaggatgcccgagcggaatccgtagcctacctcggccgagaagaccttttcgttcagcgggtcggggttcttgacgttgctcgtggtgctctgcaggaaggcgccgcccgagaagaacggggcgcggctgatgtagcccaggttggcgaatacgttgtgtttctcgttgatgttgtagttggcaccgcccttgaccgtgtaaccgatgaagttcacgtgctcggactcggcgtgtgcggcgtcgtagtagaagcggtcgtagcgccagtagccggtgttggaaaccgaacccgatacgaaggcgttgaggtttttcttcgtccactccagctgggcgaatacgccttcctggtgtacgtggccgtcgtagtcgcggtaaaccttgtcgccgacctgtaatttctggtatttccagttgggatcggctgcggcggcgttctgctcgggcttgacgttcttgcggctgtcgtcgtcgatgtagtacttaccgtcgtagaggtcgatgatctcgttgttgtgctcgccgatgtagtagcgcacgtcgataccggccgacagttcgagcgacttggagatctggttggtgtaggtcgagagcagtccgtaccacatgtggttgttgttgctcttcgacatgatcatgcgcgaaccgtcggggctggcggcgttcatctcctggatcttgtcgtaggcgaacgtgccgtcggggttgcggaaggtggtgttcagcacgccgtagttggtacctttccacatgttgcggtctgccgaggtgcggccctggcccgagtagccgctgccgcgtccgatcgacatgtagagcgccgtcgagagcgacgacttgtagtcgatctgccactggtggttcagcgagatctggggcttgtggtattcgttgaagtgcgagtagcgctgcctgccgttcttgtcgaaaccgtactcggcgttgtagcggtacatgtccttttcgcccatgaagttcttggccttctgccactcctcgatcttcagtccgtcgtcgagggcatggcgctgcgcgtgcttctgcggggcgccgaaggcggtcagcgacaactggtggcggtcattgatgcgcttcgagatgttgacgaaccagttgtagccttcgaagttggttccctggatgtaaccgtcgccccagcgcttcgcgccgagtaccgacagtgcccagccgctcttcgtgaggcccgtcgagaggctgaacgaaaggctgtaaaggccgtcgttacctacgccgaacgagaacgtgccgccctgcttggcctcgatgccgttggtcacgatgttgaccgaaccgccgaccgagggcgacgagattttcgaggcgcccaggccgcgctgggtctgcatgctgcgcgtcacgtccgagaggccggcccagttcgaccagtatacgccgccccactccatatcgttcacggggacgccgttgaccatcacggccacgttggccgcctggaaaccgcgcatgttgatcttcgagtcgccgaagccgccgccgtccttggtcacgtagacgcccggcgtcgatttcaggatttcggggaactcctgtccgccgagtttgtagctgatttcctcggcgttgaccgtcgatacggcaaccggggtcttgcgctgcacggccaccgactgcatgacgatgacatcctgcaatgccacggcgtcgggctccatctggatgatgcccaggcgtgcgttcgggcccgtgacgggtttcttggtcgggacgtagcccacgtagctgatctcgatctccttggcatcggtcttcagcgtgaagttgccgtcgacgtcggtgctgacaccctgcgatgtgccgggtacggtcacagaggcaccgatcagcggtgcgccggtctcatctacgattttacccgtaactgccgattgcgcgacagcggcggacactccgaacaggatcagggcggccgtcatgaggaaatgttgtaaatgttttctcatactttttaatggattagtaaataaaagagtgtaatggatatttcggtttcttcatagcgtggtgtcgtggttcgcggcactaagatcggggatttttccgctcccgccggtggggtggcggaagtttcacaggattttaacccccggcagcctttcgggaaggctctgagatccatggtatgatggggtttgtataaagttgcgagggatactccgcgtgtgagatacccctcgtcgttgcgtatcgtagtccgtgcccggcgatagccgatattcggtttgcataccttctcccgcaccgttcgggtgatgcagggtgccggtggaaaccgttatttccataaagccgtccataatttgcttatacaaatttaaaccaaatatttcacagccgcaacagaacaccgtaaattttgttcaaatatttttcaacctgttgacgggcacggtcttgcacgttgcggcacattccttgctcagcggacgcgtatgcagtctttcaaggaactatactggcgttattcgcttttcgtgctgatcctcggactgggggtcacgatcttcatcgagctgaccccgttcctgggcggggtgctgggtgccatgacgatctacgtgctgctccggcggcagatgcattacctcacggcttgccgcaaatggcggcgtagcctggccgcgtcgctgctgctgggcgaggcggtgctgtgtttcctagtgccaatcagcctgatcgtctggatggtcgtcaaccaggtgcaggacatcgccctcaagcccgagtcgatcgtcgagccgctcaaacacatcgcagcgctgatccacgaaaagacgggatacaacctttggcaggagaggaatatcgcgtcgctcgtgggggtgatccctcatttggggcagtgggtgctgggcagcatcatggatttcggcatcaacatcgtcgtgctgctgttcgtgctctatttcatgctcatcggcggcctgcgcatggaggagtactgccgcgagatactgcctttcaaccgcgacgtgggcagcagcgtcatgcgcgaggtgcacatgatcgtccgctcgaacgccatcggcatccccctgctggccgtcgtacagggcatcgtggcgttcgtgggctacctggtcttcaacgccccgagcccgctgttctggggcgtgctgacctgtttcgcaacgatcatccccatcttcggaacggcgctcgtgtggctcccgctcgcgggttacatggcactcacgggcgactgggggccggccatcgggctgctcctttacggcgggctggtcgtgacgcacgtggacaacgtcgtgcggttcatcatgcagaagaagatggccgatacgcatccgctggtgacgatcttcggtgttttcatcgggctgtcgctcttcgggttcatgggggtgattttcgggccgctgatgctcgagatgttcgtcttctgcgtcaatatcttcaagaagaaatacctcgacgggacgtcgtacaagcagttgttcgtgcccgagcacgatatccaggcgtagcccgccggggcgcttccgggcggggtgcttttacgaaaagtaaccgtttcgggtgatttttgtgaaaaattcctgtaaaatggttggaatttcaaattgtttattatctttgttattgaaataacagtggaagcggtaacaagaacccttaataaaaatatcacaatggcgagaaatctcaaaatcagagaccttacgttgcgcgacggacagcagtcctcgttcgcgacgcgcatgtcgcaggcacaggtagaccgttgcctgcccttctacaaggatgcaaatttctatgcgatggaggtctggggcggtgccgtgcccgactcggtgatgcgttatctcaacgagaacccgtggacgcgcctggagacgatttacaaggctgtgggcaaggtgtcgaagctcacggcgctttcgcgcggccgtaacctgttcggctacgcgccttaccccgacgacgtgatcgacggcttctgccgcaacgcgatcgaaagcgggctgggcatcatgcgtatcttcgatgccctgaacgacgtggacaacgtgaaatcgacgatcaaatacgtcaagcagtacggcggcatcgccgactgcgccgtatgttatacggtcgacccgaaatatcccgaaccctccttcatgcagcgcctgatgggcatgaagcggccgcagcccgtcttcacggatgcctatttcctcgacaaggccaaacagatggccgcactgggcgccgacatgatcaccatcaaggacatgtcgggcctgatcccgccgcgccgtgtcgccacgctggtcaagctgttcaagaagaacatctcgattccggtcgatttccatacccactgtacccccggctacggcctggcttcggtgctcgcggccatcgtggccggcgtcgacatcgtcgataccaactgctggtatttcgccgaaggcacgggtgccccggccatcgagctggtacacgtcttctgcaagaagctcggcgttgataccggtgtgaacatggaggccgtggccaagatcaatacccagctgcgcgagatccgcaaggagctcaaccagtcggtattcggcgcggacaaacccgagcccaaggcgttcaacccgctgaccgacaagctgcccgccgagatcgacgccctgttcgacaaggctattgcggccgccaaagccgacgatgaggacgctacgatcgacgcctgccgcaagatcgaggcctatttcgggttcccggctcccaacgaactggtgcaaaaggccgagatccccggcggcatgtactcgaacatggtcgcccagctcaagcagctcaaggccgaggacatcctgccgcgcgccatggagctgatcccctcggtgcgcctggccgcaggcctgccgccgctggtgaccccgacctcgcagatcgtcggtgcgcaggccgtcaactgcgccctcgacgagaaggccgggcgtccgatgtacaccaacaagagctcgcagttcgtcggcctggtcaagggcgagtacggacacacgcccgtgaagatcgaccccgaattccgcttcaagatttgcggcgtgcgtgaggagacgccctacgatacgtcgaaataccagatgcagcccaaccccgaacttcccgaggccggaggcgtgaagctcgccgccaacgagaaggaagtgctgctgctcgagctgttcccgatggtcgccaagacattcctcacggacatgaaggtcaaggcttacgccgcggccaaacccgccgagcccaaggccgaggagaagaaggccgaagaggtgaagaaggtcgtcatcacgggcaatgccgtgacggcgccgctgcccgggcgtatcatcgagctgaaggtcaaggtgggcgatacggtcaaggccggcgacgagatcgcaatcctggaggccatgaagatggagaatgccgtgacgaccgattatgccggcacggtgaagcaggtgctggtgcagcccggcgagaacgtggcgaccgacgccgtactggtcgagatcggatgatccccatcggcacattcgtccgaagaatgggcagctggctgtatgtcggttgccctttttcgtgcggttttattataaaacagtatatttgtaccatcaaataattaaaccttagacttatggcatttctaaaagaattcaaggagttcgccctcaaggggaatgtgatggacatggccgtcggtgtgatcatcggcggtgcattcggcaaaatcgtctcgtcgttggtgaacgacatcctgatgccgccgatcggggcgctgatcggcaataccgatttttcgcagctgcggctcgatatttcgaagttccgggacatgacttcgagtgccgtgcatgccgtcggcgacgtcgtgacgggcggcggcgaagccgctgcaaaggcggctgccgagcccgtttactggaattacggcgccttcatccagcagtgcatcgactttacgatcctggcgttctgcgtcttcctaatggtcaagctgatgaaccgtctgatgcggaaaaaggaggaggccgccgctccggcacccgctcctgaacccgcacccacgaaggaggagttgctgctgacggaaatccgcgacctgctcagggagcagaagaaataattacccgatacgtacagcgggctgtctgcatttggcagacagcccgcttgtatttgcgcgtgccggccgtgcctatgggttgcggcaagggaggggaacccgctgcccagcccggcggtcttattggtcggactcctttttgtgcgtatactcctgtaatatataagtggtgaagatcgggaacatcatcattcccagcgtaggcagcaggatggtgatgaccttgccgatggccgtgacggcgaatatctcggcgccgacggtcgtgacgttcatccaggcccaccacagggcgtttccgaaaccatggagtttgtcattgacgaatatttcgtagtcatagaagaccagtgccgagatataggtgaaaaccacgaccgtgaagatgtaggccgtgaatagccggcggatcttgttgtccacgagccattgcacgactacgtagagtgccaggaacgcccgcatcagcggcatcaccccgatcagcatggcccagtagcgggggaggtctgcaccgctccaggccaggatgttcaggtaggggatcgagatcaggaagaacagaatgttccgcccgaagaagcgccctttacgttcggccgccgcccagcgtacgaaaaaatcgcacaggaaaaggatgcagaccaccagctgcacggtcaggtagctctgcgaaaaacgggtgtggtctccgccgatgatttcccacgagaccgcggcgagcaggactacgccggcaattactttgagtatgctcagggaattggcgatttcgttgcgtgatgtgtctgtcagcggcatgtcattctgtttgcccacaggcgggcaaaatcggtgccaaagccctggagtctgaattttccggtgattttttgccgaaagattttgcatgaataaaaaattctattacctttgcactcgctttgatgcaatggcgggttagctcagctggttagagcgcatgattcataatcatgaggtcccgagttcaagtctcggacccgctacaaaatacaaagggacacttgtacgacaggtgtcccttttttgttccccgcctctcctcgtctaccgatcttcgcacaaccctttgtcccgccccgttcggctgtgtccgtccgcctgttttattttgccgcggccggcgaatccgggaaggcatcttgctttgtcccggagggagtattttaaaaatttcttatgtcgcatgaaatcagttggttatattttattaccaaaaaaatattactttgggaggttcttttattaactttttttactcaaaaaacattgtaataataaatattattactacattcgtgtggagataatgtcgtatttatatttttaaaatggattgttatattatataagtgtgatacttgtggtatgacattcctattgtaaaattaattgcttgtatcgagattatccctgaataaatttcttaaaatacccgaaggtgaactaacccataattattcaatctaaaatacctgattatgaaaaaactttttaccccccccctgttggccgcgttgttgtgctgcatgggtgcatttcttattgcctcgtgttcggacgacgatgaaaaatggccctcggaagtctcccaacctttcgtttccgtgacggctgccgacggcgatgcgacgatcaccgccgtcatttcggatgcggacaagaccatcacgttcggggagttccagaatatgaccgacctatccaaggtgacggttacgttcgatatgacctggggtgctatcctcaaaacgcccggcacggcgaccgccgaggttaacctcacgtccccttacagcgttgttgtgaacgtgggctacctccacgaagaaacctacctgatgtcggccaagcccaaggatattcccaacccgatcctttcggcgaaggtcggggacgaagaggctgtcatcgccggcaacaccatcacgatcgcttataagacgggcatgaatgtcaatgccatggtattcgacatcgagctggtgccgggcgcttccctgaagtcccccgagaacaagacgttcgacctcgaattcgccgacgggacgctggtggtcacctacggcgggacggactacacctatgtcgtcaaacagaccggctataccgatcccctgctgagccagggatggacggacgagacgggaagtttcggcacgctgcccaaatatatcaaggtctataagaccacgaagctgaacggcgtcgacaataatatcgcttacatcgccatcatgggcccgcagtcgacgatgggcgttgtcggcaacggctccgatcttaagacgattcaggagctcgaaagtttggacggcagctggaacgtatacctggtcggtgtatcttctgccggcaccgcagttcagactatcatccgtgacggacagttcgttcaggatcctcatgccatcaattcgttcgctacgatcgggcaggataacaacggtgcctacaagatggcctggtcgcagaaattcgacggtaaactctatgcgttcccgttcaggaacggcagcagtttcacggctcgggttcagggcgacggtaccgtgtgggatgccaagacggccgtttccggaatcccgatggttttgtggaacgggaatgtcctgaccgaagcgcagacgatctgcaacgacggtagtaacagcggttggtatgccaacaatcccgcgtatgcacgtgctgcggtcggtgtcacggtccagggtaaggtcttcgcattctgcggccagcaggtcgagggtagcgtcggcgtttcgatgctcgacctggccaaggtcatgaaggagctgggctgcgtctccgccatgtcgttcgaaggctccagctcgcccaacatgcgtgtcaacaaacatgaaaccgtactcaactccaaggccgccgagggcaaggccgagaagggcatgcagtgcgcattggtcttcaagtaacggcgtgctgccgtccgttggacggcggcatggtgaataaacgggccggcatgtcggaagacatgccggccttttccatgcgctgcgccgtggggctcatgctcattctgctcccgggcggtgtgccgctttttcagctgtggcgacgcgccagctccgcttcgaggtcggcgatcgagcatccggtggcttcgagcagcaccagcaggtggtatatcaggtcggaggcttcgtagaccatcgcttcgcggttgcctgccacggcttcgatcacggtttccacagcctcttcacccactttctgtgcgatcttgttcacgccgcggtcgaagagtttgctcgtgtaggagccctcgggcatctcggcatggcgcctttggatgacgccctgtaggtagcggatgaaaccttccgtcccggcggcggccccgtcgaaacagcttgccgccccggtgtggcaggtcgggccgtgggggatggcgcgtatgaggagcgtgtcgttgtcgcagtcggcggtgaccgatacgatgtcgaggtagttgccgctcgtttcgccttttgtccagaggcggtggcgcgtgcggctgtaaaaggtgacgcggccttcggcaaggctcttttcgtaagcctcccggttcatgtagccgagcatcagcacccgcagggtgcgcgcgtcctgtatgatggcggggatcagtccgtcggcctgcttcgcggcgtcgagcgcctcgaagggttttgctgtgatttccatggtgtctattgtcttacgttgatattcagccggtgcaattcccgtttgagcacggggatcgggatttcgttgtagtggaagatgcttgccgcgagcgccgcgtcggcacggccgagcgtcagcacgtcggcaatgtgccgcaccgatcctgcgccgcccgaggcgatgatggggatgggcagctcggccagccgtgcgaaggtctcgcacgggtagccgtcgtgcgtgccgtcgtgatccatcgaggtgaagagcagctcgcccgcgccccgctgacagacttcgtgcgcccatgcgaaaagctcgcggtcggtcatgcgcttgccgccgtgggtcgtgacgcgccatacgccgtcggtcatccgcgcgtcgatggccgcgacgacgaactgcgacccgtatttcgacgcgatggcgtcgatcagcgcagggtcgcgtacggcggcgctgttgacggtgaccttgtccgccccggcgtcgagcagccgcccggcgtcggcgaccgatgcgatgccgccgcccacggtgaacgggatgtcgatgcgttcggcgattcgggcgaccagctccgtgaaggtctgccgcccctcttccgtggcgctgatgtcgaggtataccagttcgtcggccccttcggcggcgtatttcgcccccagctccaccgggtcgccgacgttgcgcagcccgacgaaattgatgcccttgacggtctgtccctcgcggatgtcgaggcaggggattatgcgtttggcaagcatcttttcagttcttcgagggtgatacgtccttcgtagagggctttgccgacgattacgctgcgcagccccgcgccgtcgagcgcctcgatgtcggccatcgaggcgatgccgccgctcacggtgatttccaccccggggaactgcccctgcaacccagcgtagaattccgccgaggtgccgcacagcatcccgtcgcgggcgatgtcggtgcagatgacctgcgcgagcccctgcggtgcgaagcgggcgataagctcctgcgccgtcatctcggatcgctccgtccacccctgtacggccaccgcgccgtcgcggatgtcggcgcccaggatcagcttcccgccgccgaattcggcgagccatccggcgaacagctccggttcgcgcacggcgatgctgccgcagatggcgcggctagcgcctgcgccgaatacgctgcgcagcgccccgcggcttttgattccgccgccgtactgtacttcgagcgtggttttcgtcgccacgcgttccagcacggcgaggttgcggggctccgacgccttggcgccgtcgaggtcgaccatgtgcagccggcggatgcccgcctcttcgaagcgttgcgccgcttcgagcgggtcgcggtagtaggtcgtccggcggccgtagtcgccctgcgccaggcgcacgcaggcgccgccgatgatgtctgttgcgggtatgatttcgattttcatgtcatcagagttttaggaaattgcgtagtatccgctcgcccgcccgcccgctcttttcggggtggaactgcgtgccgaagaaattgccgcgccccagggcggcgctgaacgctcctccgtagtcggtttgggcgatcgtggcgtcgcacgcctgtgccgcgtaggaatggatatagtagaggtaggtgtcttcgccgaggccgtcgaaaagcgggctgcggagcctgccgacggtatcccagcctacgtgggggattttcagcgggttttccccgcctctcagccgcacgacatgcgtcgggaaaatccccaggcagcgggtgtctccctcctcgctgtccaggcacatcagctgcatgccgatgcagatgcccagtacgggctgcgtcagggtggggatgagcgcatccagtccccgttcgcggagtttggccattgccgacgaggcttcgcccacacccgggaggagcaccctgtccgcctgccgcagcaccgcggcgtcggacgtgaccgtaaattcggcgccgatgcgccgcagggcattggccaccgaacgcaggttgcccgtatcgtaatccgtgatcgctatcatagtatgcctttgctgctgggtatgtcgtatccgaagccggtgcgtgccacggccatgcgcagcgcacgcgcgaaagccttgaagatcgcctcggccttgtggtggtcgttttcgccgcgcgccgaaatctgcaggttgcagcgtgccgcgcagcagagcgagtggaagaagtggcggaacatctccgtcgggacgtccccgacccgctcgcggcggaattcggcgtcccattcgaagtcgatgcgccccccgaagtcgagcagtaccagcgcccggcagtcgtccatcggcagtgcgaagccgtagcggccgatgcccgccttcgaccccagggcgcggtcgatggcctcgcccagcacgatcgccacgtcttccatcgtgtggtgctcgtcgatgtctaggtcgccgtgcgcctccaccgtgagcgacaccccgccgtggtgggcgatctgggtcagcatgtgatccaggaaccgcagcccggtggaaatcccgtcgccgggggcggcctcgcaggtgccgaagccccggccgtcgaggtctatgcgtacggtgatctgcgtttcgcgcgtttcgcgcgccacgacgacccgccgttccccgcggcggatgtattccgcgatctcggcccacgagtccgtgatgagcacgcatgcctcttccgcgcccgcttcccgcagcatcctgcgcccctcggcggcaggcgccaggaggatgcccttcgccccgaggttgcgcgccagcaggatgtcggtcgcccggtcgccgacgacgtagctcgccccgaggtcgtacgacccgtccgtgtagcggccgaacatgcccgtgcggggtttgcgcgtcggggcgtcgtcgctttcgaacgtgcggtcgataagcatgtcgtcgaaggcgacgccttcgcctgcgagcgtgcgcagcattttttcgtgcggcggccggaaatcctcctccgggaaggcctccgtgcccagcccgtcctggttcgtcgccatcaccagttcgaaatccagcccccggagcgtccggagcgccgagatcgcaccgggtatgaattccagcttttcgaggctgtcgacctggtaatctgcgggcggctccgcgatcacggtgccgtcgcggtctatgaagagcgcttttttcatgggcggaaacttttgacggtttccaacatgcggtcgttctcctccgggcgcccgaccgtgatgcgcaggcagccttcgcaacctgcgatccgcgaacggttgcggacgatgacccccgcagcgaccagctcccggtacaacgggtcgggtgccgcggtctttaccagcaggaagttggcttccgacgggtagacctgtccgatgcaggagcatgccgcgagtgccgacgccaggcgcgagcgttcggcgcggatcgccgccacctcggccgagatgtccctgcggagcgattccgcgacggcccgctgcgtgagcgtgttgatgttgtaagggtatttcacccggccgaagagggcggcgatctcctccgaagcgaaagccagtccgagccgcagcccggccatgccccacgccttggagagcgtctggaggacgatcaggttcggaaactcgccgagccgcggcaggaacccgccgccgtcggcgaagtcgatgtaggcttcgtccagcacgacgatgccgtcgaagcggcggagcaggctttcgatctcctgcgccgggaacgcattgcccgtggggttgttgggcgagcagagccatatcagcttcgtgcgctcgtcggctgccgccagcagcgccccgaccgggagcgagtagccggctcccagcggcacttcgcgcatctgcacgtcgttcgtcgcagccgccacgcggtacatcccgtaggtcggggcgatcgacacggcgttgtccagccccggccggcagaagatccggaatgcgaggtcgatggcctcgtcgctgccgttgccgatgaagatccgcccggcgtccacgcctttcagttccgcgatcagggctttcagcgcccgctggtgcgggtcggggtaacggttcacgccgttgtcgtaggggctttcgttggcgtcgagccatacgtcgatcccgccgcccgcatattcgtcgcgggccgtggagtagggttgcagcgcctggatgttggggcgcaccaactgcgacagcggtttcatagtatccctcctttcatccggacgcgcacggcgttggcgtgtgcgtcgagcccttccgcctcggccatggccgtgattgcgggcgccagcgcgtcgagcccgtcgcgcgtcagctcctggaatgtgatcttgcgcatgaaactgtcgacgttcaccccgctgcaggcacgggcccagccgcccgtgggcagcgtgtggttggtgcccgaggcgtagtccccggcgctttcgggcgagtagttgccgatgaagacgctgcccgtggccgtgatcttggcggcgatgccccatgcgtcgcgcatcgagacgatcaggtgctccggggcataggcgttggcgaacgcaatctgcttgtattcctcgtcgaataatacgatccgactgttggccagcgaattgcggatcgcctcgcagcggctgaggtaccggatctgctcctcgacggcccgggttacctgccgtgcgaaacgctccgtacggcagaccaggatggcctggctgtcgtccccgtgctcggcctgcgacagcaggtcggcggcgacgaattccgcccgggcgctattgtcggccagcaccatcacttccgaagggcctgccggcaggtctacggccacggcctgggcgcttaccagctgcttggcgcgggtgacgtaccggtttcccgggccgaagattttttcgacgtgcgggatgctttccgtgccataggccatggcggccacggcctgcgccccgccgacggcgaagatgcggtcgacgccgcacaggtcggcggcgaaaagcacctcgggggcgatcttcccgccgcgtccggccggggtgcagagcacgacctcgccgcacccggcgatccgggcgggcagggcgagcatcagcaccgtcgagaagagcggggcgttgccgcccgggatgtagagccccacgcggccgatggctacggcacgctgcacgcaccgcacgccgggcatcacttcgatgtcgacctgcggcgggagctgggccctgtggaaggcttcgatattggacttggcgatcgcaagcgccgtcttgagccgttgcggcacggctttggccgcttcggtgcgctgcctgcgggaaacctcgaacctctcggggacgtaaccttcgatgcgggccacgaggtcgcgcagcgccttgtcgccgcccgtgcgcacctgtgagaggatggcggcgacccgttccgtgatttcgccctcctgccgcgtgcagcgggccgtgagggccggccattcacggcgcggcgggttgttgtagattttcagcatttccatatccgggtgtttttcggggtcagcggatcatgttttcgagcgtcagcaccaggatgtcctccgcgccgatctccttgagccgttcgatgcgttcccagagctgggattcgctgatcacggcgtgtatcgaacaccatccctcctgtgccagcggcaggatcgtggggctgcgcatgccgggcaggatgacgatcgcttcctggagtttctccgccgggaggttcatcagcacgtatttcatgccccggctttcgaggatggagttgaagcggaaggtgagctgtgccgtttcacggcgcttcgcctcgtccatttccgggttggcgatcagcaccgcctcggaataaaagaccttctcgacttcgaccagcccgttcgagatgagcgtgccgcccgacgatacgatgtcgaagatcgcgttggacatcccgaccgccggggcgatctccacggaaccctcgatggtgtgtatttcggcgtcgatgcccttttcggcgaagaaccgcgcgaggatgttggggtaggaggtggcgacgcgctttccgcggaaataatccagcccttcgtacgctaccgtgcgctcgacggccagcgagatgcggcagttcccgaacccgagatccatcgcctgctctacgcggaatcctttctccgccacttcgttcagccccacgatgcccaggtcggcgacgcccatcgccacggcctgcgggatgtcgtcgtcgcgcaggtagagcacttccagcgggaagccttcggcgcgcgagatgagtttgcgtttgctttcggcgacgcggatgcccgcctcggagagcagttcgatgctctgttcgttgagtcggcccttggcctggattgcgattctcagcatttttttgtcgattttggcacaccgcccgcggcataagcacgaaaaaagcccacccgcaggaggtgagcttcgtatatacttttgttaaacttatggttccgtttacatgtacatatccgtcttaccccttcggaaagtggtgatggtgatgatggatatggtgaaatattgtcatatatgctgtcgttgggacaaatgtatctattttgtccgaaaaaacaaaattccaagtaaaattttttaatatattttcaaaatcagccctggacaccctcggcgcgatctttgtctgtcccgtgcggcctgtttccggtagcgtgcggccggtgcatggagtttgcagaaattgcacgtccggcgtccgggtatctgcaatgccggtatccgtgccctgctgccggtcgtcttcaccgtgtccgtttttttgctatttttgtctgccggcggacggtttcagtggggcagttcggcgcttcggttttacctgttgcccctgctgccgtgattcccgtggggtggttgcggccgctccgggtgcggggcggacggcggaggaaagtccggggcttattcgtccgcttcgccgtataccttgccgcgcagtgcgtcgtccgaatagacgtgcaggctgtgccccgtggggctcaggcaggtgatgcggtgtatgtggttgtcgaaacaccccgatttcccgattgcgaagaacgcgcacggggcttcgacctcggcgctctgcaccggacgtgccatgccgccgcctgcgggctcgaagatttcgagccggaacctgccgtcggagaagtggtagcctgcgaattgcgggtgggcgtggatgctcgtgcggttgccctcttgccagctcatcacgatcgcctcccatcccgtttccggcgatcggcccaggtaggtgcggcggtaggccgtcgcggaatagtcgtcgaattccgtcagcgggtgcccctcgagccagccgagcacatagccctgtatccgctcgcccaatgcgtcgtcgacggggttcctgccgatgatccccagcagtccggtaaaaaactccccgtacacggctgtgcaggccgaagcctcctgcaaatcctccgcgagtgtcgtcgcatgtcgttcctgtttcatggtgttgtccgtttggtgcaaagatagctggccgccccgtgcaaaccttcagtaaaaatacttattcctgcgctgcgtgtcggtttcccgggtgtgcgggcgctgcgcggcgtctctgccgggcgccctgcttccggatcctgacaacgttgccgcccgccagccgtcgcgccatcggattgtcgccgccttgcctttgcccgggcggcctttccggtcgctttgccgcgctgtccacccgttttccccgtccggttttttccggcacggcccccgggcgggcgcaagccgttccccgatgtcgttttttacggaaaaatgccctgcggttgcggccgtacagccttttttgctatatttgtaacttaaatccgaacgctgactccgcttatgacacctctcgccgttatcgccaccgtattgggctatatagccgtactttttgtcgtcgcctggctctctggacggcgtgccgacaatgccggttttttcaccggcaaccggagcacgccgtggtatatggcagccttcgccatgatcggggctgcaatctcgggcgtgactttcatctcggtgccgggttcggtcgccgtcgattccttctcctacatgcagatggtcgccggtttcaccgtggggcagctggtcgtcgcgttcctgctcatcccgaccttctaccgcctccgggtggtgtcgctctacgaatacctcgacgggcgcttcggcatcctctcgcaccataccggggcgtggttcttcttcgtgtcgaagatgctgggtgccgcgctgcgtgtctacgtggtctgcgccgtcatgcaactgctggttttcagccactacgggctgccgttctggctcaatgcgctggtgacgatgctcttcgtctggctctatacgcagcaggggggtgtcaagtcgctcatctggacggatacgctcaagactttctgcctggtgggcagcctcgtgctgtcgatcgtcttcatcatgcaggcgctcggcatgtcgttcggcgaaatgacccgcgaggtcgccgcgtcgccctattcgcgggtgtttttcttcgacgacccctcctccgaccgctatttctggaagatgttccttgcgggcgtcgtgctgctgatctccatgacggggctcgaccaggacatgatgcagcggaacctgagctgcgccacgccgcgcgattcgcagaaaaacatcgtcctgacggccgtcagccagatattcgtcatcttcctgttcctcgtgctgggtgtgctgctctacatttacatcggccgcaccggccttgcgatgcccgcaaagggcgaccaggtattctcgctggtggctgtcgagggcggattgccggtatttgttggcatactgtttgttatagggcttatttcgagtacttattcagctgccggttcggcccttacggcccttacgacttcgttcacggtcgacatcctgcaaggcaccaggcgctacggcgacgaacgccttacccgcatccggaagggcgtgcacgtcggcatggccgtcggcatggcgctggtgatcctcggcttcgaatacctggccgacgacagcgtcatcaacctcgtctacaaggttgccagctatacctacgggccgatcctggggatgttcgccttcgggatgttcacgcgcctgaggatccgcgacggctggatgcccgtggtcgccgtcgccgcccccgtgctgagcgccctcgtgcaatactgggcgcgcgaggcgtgggactaccggatcgggttcgaacttttgatttacaatgccgtctttaccatggccggcatgttgttgcttgccaagaagaatgaaaactaaattcctgtcgttttttctgctgctctgcttcggctggcagcaagccccggccgccggggtcgacgccgcgacccgccgcgagatcggccgtacgttgtcgcgtatcgttgcccgtgaggtttcgggcggctttgtccggatcgagggcgtggacgcctcgcgcaagcgggtgcgcatctacacctcggtggggctttcctattacccgttccgcgagcagaacctgcgggccatgtacgactcggtgcgtgccgtcctgccgccggagtaccgcaaggcctccatcgagctttattccgacaagcgcgaagttcgggggctgatcccgatggcctaccgcaccgatgccgagttcaggaaactgctgcgcaagaagacggtcgtgcccttcgtcaaccgttcgcagcggccgctcgtcgtccgccagtcctcgcccgcagctcccacgcaggggctctccgggcgccatatcgcgctgtggcagagccacggacgctatttcgaccagcctgcgaaccgctggaaatggcagcgttcgcggctgtggatgacctgcgaagacctctatacccagagctatgtgctgccttacctggtgccgatgctcgaaaatgcgggagcctgcgtgatgttgccccgcgaacgcgacgtgcagaaatacgaggtgttggccgacaacgatgccgccgggcaatacgccgagacggacggccccgagaaatggcagccgggcggtgtcggattcgcgcatacgcggcaggtataccgcaccggcgaaaacccgttccgggatggtacgacgcgccgcgtacggacggtcgccgggggtgccgagagccgtgccgcgtggcgtgcctccatccccgagcggggtgaatacgccgtctatgtaagctatgaaacggtacacggaagtgcagacgacgcgcagtatacggtgcatcacctcgggggcgagagcacgtttgccgtgaaccagacgatgggcggcgggacatggatttacctcgggcatttcctcttcgggccgggtgagcagccggtcgtgacgctcaccaaccgctcgcggcaggcgggacgtatcgttacggccgacgccgtgaaggtcggcggcggctacggcaatgtcgcccgctcggtcagcgattcgctgcgccgtcccggcgtcgaatatgccgaggagacgagcggctatccccgtttctgcgagggcgcccgctactggctccagtgggcggggttcgatccgaaggtatacaccccgaaggagaataccgacgattataaggacgactacatgtcgcgcgcccactgggtcaatgccctgatgggcggttcggagcggatgcccgacagcacggggctgcggattccggtcgacatggcgctggccttccattccgatgcgggcgtgcggctcaacgacgagaccatcggcacgctgggcatcttctatacccgcgagaacaaggggcgtttcgaaggcggtgccgaccgctaccgttcgcgcgacctgacggacatcgtcatgacgcagatcgtctccgacatccgccgtagctgcgaacccgaatggaaccgccgcgggctctggaaccgcgcctattacgaagcgcgcgtgccgggtgccccgaccatgcttctcgaactgctctcgcaccagaatttcgcagacatgcgctatggcagcgacccgcgcttcaagttcctcgtgagccgcgccatctataagggtatcttgcagtatatcagttcgcagtacggattaccttatgtggtgcagccgcttcctgtggaggccctctcggtgcagttcgccgacgacggcaatgtggccgtttcgtggtcgcccgtgatggattcgctcgaaatgacggccgccctgacgggttatgtggtctatacgcgcattgacgacggcggcttcgacaacggccgctataccgacaagccctatttgctctccgagcaggaaccggggcgcatttacagctataaggtgaccgccgtgaacgaaggtggggagagttttcccagcgaggtcgtcgccgcctgccgtatccccggcgggaaagggaacgtgttggtcgtaaacggattcgaccgcatcagcgccccgctgagcatgcgccgcgattcgctggccgggttctataccgagctcgacggcggggtgcccgacaaacaggacatttcgttcatcggcgggcagcaggtgttcgacctggcgatggccaggtgcgaggtcgacagcatcgccctcggcgcctgcaactgtgactacgagacggaggtaatcggcggcaatacgttcgattatccctatgtgcacggccgttccatagcccgggcgggctattcgttctgctcggcctcggtgcgggccgtggaggattgcggcgtgtcattggaggagtattccgcagtcgacctgattctgggcaaacagcgctccgtgactatcgggcgcggtgtggcggggtatgcgttcaaaacgttttcgcctgaattgcaggatgtcctgagacgctatatggccggtgacggagcccttttcgtgtcgggcagctacgtggcgaccgacctttggacgggcggggaggccaccggtgaagaccgcgcttttgccgaggaggtgttgcactacacctacgacggcgaccaggccgccgaccgcaaccgggtgcgggtcgtgacttcgcatgcgggtttttcgcgcgacgagtaccgctatgtcaacgatttccgccccgaccgataccgggtcgaacgggtcgatgccctgagacccgcgggtggcggggctttccccgtgatgcgctatgtggacaacaaccgctgcgcgggcgtggcctgcgcggacagccgcacgttcgtcatgggctttccgttcgaagccctcgagagcgatgtgcagcgcgaccggctgatggccgacatactgggtttcctgctcggcgggaagagcggaggggacgattagccggccgtgcggccggcctccggtaccggttttgcggcggttacgctccggctgtggcgccccaagcactgtgtgccgcccggcgggacgccccgaaagaggacggacaaacgattgttttttgtaaaatagataaattatgtcactcgaacaacagatttcgaaaggtatcatggaggccatgaaggccaaggataccgtgcgcctgggcgcattgcgcaatgccaagaagtatatcatcgaggccaagaccgcgggcccggaaatcgcggaactgcccgatgccgacgtactgaaaatcatctccaaactggccaagcagggtgccgattccgccgcgatcttcacagagcagaaccgccccgacctcgcggccgaggagttggcgcaggtcgccgtcttccaggagttcctgccccagcagcttacgcccgaagaactggaggccgaggtcagggccgtgatcgcccaggtcggcgccacgtcggtgaaggagatgggcaaggtgatgggcgtggtcacgaagaagctcgccggacgtgccgacggcaaggatatttcggccaaggtcagggaactgctttcgtaaggccggtgtgccgatgaagcgcctgctgtttgtcctgtgcagtctggtcgcggtgcaggaggtctgcgcacggcgtcctgccgtgcggttcgacctgccctatacggtcgagcacggcaaatatgtcgtggtgctcggcacgcctgcgggcccccgccggtttatcttcgacaccggggcgtcgggcacctgcatcagcgaatcgctgcgctgcgaactgggtgccgagaccgtgaaaaccgagaaagtccgcgatttcgagggccatgtcgtccccatcgacctggttcggctcgacagcctgcggatgggcgacgcgcttttccgcgaccatccggtgctggtcatgcccgacacttcgctggtcttcgcctgcctgcgggtcgacggcatcgcggggtgcgacctgctgcgctggtgcgccgtccgcatgcccaatgccgactcgacaatcaccgtcacggacgatgtccgcaggctggggctgccccgcggccgacgcatgtcgcgcatggagctgggcggcggatgcccgtttctgccggtgacatgccgcaacggcgacaggcaggcccggatgtacgtcaaattcgacaccggctcggcgggctatttccatttctcctatgccgattccggcgatgcgcccccgcccctgtggttcatcgacagcctgcgctgggccgacggatttgcgacggctatcggctggacgaaccgcaacagggtgaacagccatttccggggtacgatcccccggttcgaaatccaggggacggtcattgccgacatgccggtcaagcgcaccttcggccacaaccggatcctcggctgcaagttgttcgactgggggcagatcgtgctcgatttccgccgcaagcgcttcctgttcataccccgcggggacgaggcgaaagccccgccgcagcccgcctgtaattttacgctggccctttccgccgggcagcttgtcgtcgggcaggtgtgggacgaggcgctcgcgggcgtcatcgcccccggcgaccgcatcctctcgctcgacggccgcccctgggacggcgacgcctgcgggttcctgctcgaccccgacccgctggacggtgcggtgtgcgggatcgggacggcctccgggcagcatgttgtcctaacgattgaaaccatgaaataatgcacgtactggaatacctgcaccgcaatgtcaagaccgtcgccatgccgacggccatggtggtcggggcgttgctttgccgccccgtgaccgccctcgaggggtggacgcaccagatgattacaccctcgctgatcttcctgatgctcttctttacattctgccgcgtcaagccccggcagatgaagccttcgatgctgcacctgtggctgctgctgtttcaggttgtggtgagcgtggcggtctatttcctgctgctgccgctcaatcccatcgtggcacagggggcgatgatctgtgtgctggcgcccgtggcgatggccgcggtggtgatcgccgggatgctcggggccaatgtcccgacgatggctacatacagcctcgtgtgcaacatggtgatcgcgctcgtggcgcccgtcgttctgtcgctggccgggacgggggcatgctccttcacgcagatactggcgcgtatcgcgccgctgctcatcatgcccttcgcggctgcgcagttctgccgtttcgtactgcccggagcggcgaaatggatcggggatcacagtcagatttcattttacatgtggctcgtatcgctggtggtgatcatcggccgtacgacggcctttatcctcgatttgcacgatgcttcgcccgcgaccgggctgtggctggcattcgcggcgctggtaatctgcctggtgcagttcaaggtcggccgctcgctcggccgccgttacggcgacgctccggcgggcgggcagtcgctcgggcagaaaaacacggtgctggccgtctggatggcgcagtcgttcctcgacccgatctcctcgatcgccccgacggcatatatcgtctggcagaatttcgtgaactcctatcagatctataaaaagaatagagaagcggcgaaaaataaaatataaatctctaaaatatagtgatttatatttgattgcaaaatcttcggatgtttttgcgattttcccgacaaggccgataattgcccgatatttgttactattttgttacttgaaaatgccgcagtaacaaaacaaattcgctatatttgccgttggagcaataaacgggaacggtatggcgaagcagaaacagacggtcaaattgaaggagccggtgcgaatccggttcaagcagttatccaatggaaatcaatccatctatttggattattatacgggcgacgtgatccgcaaggagaactacgtcggcggcaaacggaagtacgaatttctgaaattataccttattcccgaacgaacgcgggaggacaaggcgaagaacgaggcgacgctcgcccttgccaaagcgattcaaagcaaacggatcgtcgaggtgcagaacgacgcgcacggattccaaaacacgaacaagtcccgagtgaacttgctcgactatctggagaatattgggaagcagtccgccgagcagggcagcaggaactacgcccgaacggtgctcaataccgtccgggcattgaagttatttcgcggcgactatatcgcttttcgggacgtcgataaggagtttctttcggagtttaccgattttctgcggcagatgccgaaagccagcaaatacggcgtattgaaatccggaggccgattgagcaacaattcggtcgtgtcctattatggtactttgagaacggccatcaaccgtgcttacaaagagggaatcatcgccgtcaatccgaccaaagagttcgattttgcaagtaaagtacgacaggaaccgagccgccgcgagtatctgacaatcgacgagttgaagacgctgataaataccgaatgccgacacgagattgtcaagcgggcctttctgttcagttgcttgtgtggcctgcgcgtcagcgacattcgcaaattgaggtggtgcgacctgcaacggaacggcggacgtgtccgtatcgaaatcacgatgcagaaaactaaagaaccgctttacctgccgatttcggacgaagcgttgaaatggctgccggagcgcggcgaggcaggcgacagcgattttatctttccgctgacgcacgagggaacggtgaacgacacgctgcaacactgggcgaaagtcgccggaataaccaaacacatctcgtttcacgtcgcccgtcatacccatgccacgatgatgctgactttgggcgccgatttatataccgtcagcaagttgctcggccacaagaatatcgccacgacgcagatttacgccaaaatcgtggacaaaaagaaagaggaggccatcgggttgattccgaatcttaccgactgaaacaaagaccagacgtgcggacgatgattcgcacgtttttctttttcatccgtttttcgtatctctgacttcgtcttagatactcccgctcggcaaaatacaaacttcgtttgcttttgctctcacttattcgtatcttcgtatgaaacaaaacggattatggaaggtatggagttgaaaccgcagttcgacaaactgcaaaagatatttgatcgttgcatcaaacacgcttgccgggtattggaagaacgtattgcgacgaaaaccgtccggctcaatcctgagcagagacaagagcaggaaaagctggagtataaccggattgccgacgagctggccgagttgtatttgcatcactccgtattgtccgatctccggttctgctactccgaaccggcgtttctttgggagggcggattgttcgaggctctgcatgccgatgaaaagagaaaataccttgcattctacgttccctcgttcgactattcccgatacgagcgggataacacggcctatgatgccgaactgccttatttctctgctgtcgtaaatgtcgtcgtacgagaacgttatgccgcttacttgcggcaaagggaaacatccatgtcggaatctatgcagaagtcggcttctattgccgtgccgcccattgccgaaacggaaaatccgttcgattctatactgaccgacgagcagatcgcctacctcgctgcggccgtcaacgacgtcaagatgtttaacgtatccctgtcggcagacgagttgaaagccattttcgcctgcaagcccgaagcgatcgtgcggtcgaataataaccgcctcgtcgcgttctttttctcgggattgagcagccgcgggctgataacccccaactggcagtccgtcatcgccaatcacaaacttttcctctcgaaagacacatcacgcgataaatacatcaatcaaagcgacttatccacggcgaccaactacatccgcgacgtcggcgtagagggaaaatacgcaacccttgaaaagtatctcatgcaagtgaaaagactttaagaacgggttgagacctcaaagataggtcaatctgctatcaggcttatcctcaatatatttgcccctgtaacggttacaagtcacggagggcatgcactccatttgtttcatttaaaatccatcgaattatggagaaaagtattgagatgcgagttgcagaactcgaaaagcaagtgtttcataccaaaaacgtgctgagcttcgaggaggccagcagttttctgaacctctcgaaaagctacctctacaagctgacatcgggcaatctgattccgcactataagccgcagggcaagatgctctatttcgagcgtgcggaactggaggcgtggctgcgtcgcaatcccgtcaagacgcaggcgcagatcgaagccgaagcacaacaatatgtgttcggccgctcctcgaagaagaagtagcgatgaatgcgcaacgcgattccgcttcggttccggtttcttcgtggcgtttggcccgtctgttcgtcacggacgagtttttggctccgcccgtaattctgcgggtcgatgattcggttatcgggactttggggaatttcagcgcttctaccggcaaggcgaagagcaagaagacgttcaatgtctgcgcaatcgtggcggcagctatgaccggcggcacggtgttgaactattcggcctctttgccgccggagaggcggcgcatcctctatgtcgatacggagcagagccgcttccattgcaaacgggtgttgtgccggattctgcggctggctggattgcccgccgatgcgcatccgccattgttggagtttctgtacctgcgcggctatgccaccaaagagcggctgcggaagatcgaggaggcaatctacgaccttgacgaccttggactggtcgtcatcgacggcatccgcgatttggcgcacgacatcaacagccccggcgaggcgaccgacctcatcacgaagctgatgcagtggacggacgagcggcgcatccacatccacacggtgctgcatctgaacaagggcgacgacaacacgcgcgggcatctgggtacggagctgaacaacaaagccgaaaccgtcctgcaaattaccaaagacgacttcgaccgcgatataagctccgtcgcggtgatgcacatccgcgaccgcgatttcgagccgtgcgcctttcgcatcaatgccgatgccctgcccgagctggtcgaggactaccaaccacgaccgacgactgccgccaagagtttcgactatgcagaggtctgcgaggccaagcaccgcgaggcactggaactgttgttctccgaaaccgaccgagtttcctattcgtcgcttatcggacgattgcagagcagttatgccgctatcggtcattcgttcggcatcaacaaggccaagcaactcaaagtctttttggagaacaagcggatgatcgtcaaggaggataagttttaccgctacaatcccgattttcattattgaccctcacgggcggtttagtccggaacgggggtatatattattaaaccattctaaaccgatacggcgggttaaacccctgaaccatacctataaaccgagtgaaagaaaaaagcttatggacgcaaaagcaatcaataagttcccgatacgggagtacctcgccgcacggggcatccgcccggccaaggatagaggttattacggcttgtatcattcgccactgcgcgaagatcatacgccgagcatgaaagtggactatgacaaaaacctatggatcgactacggtgcaagcgagagcggcacgctgatcgacctcgtgatgcgtatggagcggtgcgatgcgggagaggccatgcgcctgatgaaacagatgatttccggcacgcccactttttcttttcacgggaacagtaaccccgtaccgccgcaccgcgaatcggttatcacgatagagcaaatccgtccgctggaaaaccccgccttgctcgcatacctaacggagcgggccatcgacctcgatacggcgcggggacattgctcggaagtacattatcgcgtggcggacaaatcctatttcgccgtcggattccgcaatgacgccgaagattgggagttgcgcaaccgctatttcaagggctgtacgtcgaaggccccgacgacccgacgcggcgattatccgacgtgcctcgtattcgagggatttatggactatctctcgtatctgacgctcaagcatgacccgaacccgccatacaatattgccgtgctgaactcggtaacgaacctcgccaaagccgcgccgttcatcgcctcgcacgaacgggtctatacctacctcgacaatgacgaggccggacgcaaggcgacggcggagttgaaagccgcctgccgcaacttatccgaccaatccgttcactaccgaccgcacaacgatttgaacgactacctgcgcagccgttgtcccgtgaaagagcacaagcggtcgcgcggtcgcaagttgtaacgtcgcccaccattcggccgcttcgcgcccgcggcttttcctccacggaaaagccatagaccattagggctttttctcgacgcatcggcacgccgacgctgaaaaagccccaataggccaaagggtgaccctttggaaaccccttgcgaccgttccggccgccgaccgctcatgcggtcgaaaacccgataaccgaaatcatcaatcgcaaaattattaccgaatcatgggatatgtcgtattgcatctggacaagtcaccggacaacgaagtaccgatgaccgcccatgtcgcacgtaccaagatgccgcccaatgccataccggaattgacttacttgaacgaagaactcgtcgaattcccggagggtgtcgccgaccgaacagaagcaatcaatcatcggctcgaacatgccggattgactcgcaaaatcgggacgaatcaagtgcgggtaatccgtgtcatgctgaccggcacacaggaggatatgcagcgtattgtccaagagggacggctgaaagcgtggtgtgccgataacctcgaatggctgcggcgaactttcggagccgaaaacgtcgtttcggctgtattgcacatggacgaagcgacgccgcatattcacgcggcagtcgtccccatcgttacgggcgaacgtcgcaaattccgaaagacgaaaacagacgaaccggataaacggagataccgtacgaaatccgctgcacggccacggttgtgtgccgatgatgtaatgtcgcgcgtcaagctgaaagagtaccaagacacctacgccgcagcgatggctaaatatggactgcaacgaggcatcgacggctcgaaagcccgacatgtcacgacgcaggaattctatcgcaacgccattgcccgacaacagaatttgcaggacaatatcggtgaactgctccgtatcgaggaggagaagcgcaaagcgttcgaacatgccacgaagcaggaacagacggcacgcgcagaactgcatcgaaccgcggctgaactgaacgcagtaaaaggcgaattgaaaaccgaacgtctgaaaaattctgctgccgaggtcggcacgaccattctcgacggtatcggttcgatgatcggcacgtcgaaagtcaagcagcaggagcgagaaatcggagtattacggcaagaagttgccgcacgcgatgaaacggttgaaatcctgcaaacgaagattcaaaccatgcagagcgaccatagccaagaacttacggcaatacaggcacgacacgctgccgagacgaccaacataacgaagcggcacgagaaagaagtatcgctactgaaaactgccctctcgaaagctgtgaaatggttcccatatttccgtgagatgatccgcatggaaagcgtttgccgaactgctggtttcgatgacgaacagaccgcaacgcttatcaagggcaagccgctcgaatacagcggcgaactatactccgaagaacacaacggcaaatttacagtcgaacgagtaacggcgcaaataacgcccgacccgaccgacaaacgaaaactgcaactcaatatcgacaaagtaccgtttaacgagtggtgcagggcgaaagtcgagaaattacggcaaaccttacgttcgccgaaacaacgaggtatcaagttatgacaagaattgtcctcggcagtatgttattgccgaggacaatttcattcagcctcaatggattaaagggctattcttctttcatcgacttgtagagttccaaacgcttttcgcagtacttcgtaacgatttcacccatacgaacgacccgagccatatgttctttgagttcgaacgggtgcagcatgaattgccgctcctcgaaagccttgcgggcaaaacttttcaaacaagctaacgtcgtgttgcgctcgacgtctgtgttatcgaacaacaacatcaattcggtcgataaggtacgcatccgttcgtgtagaatagtggggtcatcgtgattgaacggctcgttgtgatagacgtaatacaacattttgtaatagagaatcgctgccttcgcagtcatgaaagccgcccaccgaatttcgttcggatatttaggcgatcccacctgcgcaaggttcatcaacagatctgccaccggtttgaacgtgtcgaaataggacttggcatcgcaataggccgccgcgaaattgcagggccgtttcggccgccgaaaataaaagctatccttgcagtaaagcaacacaccctgctgatgggcgtagtagagaaacggggtatgatgcgattcgatgtagctccacgggcagacatacagattcgtataggtaatttcccgccatcggaaaggcagcttgtaacgcaaatcgcgttttgcctgcaaccaattataagcaggctgattccgcacgacaaggagcagatcgtaacatttcgcctcgctgtgcatcgtgctaccggccaaagatccgaacagcaaaatatattcgggatcgaataaaccgtctttcgtcaaatagctgacgattgcatcagcttcgccttgattataccgcggtctgttctcggatagggacgattgatgctccgtcgcactttccgaaatgatgccttttgtctcgaagtcggttgcggaatcggcgactatttgttgtgcaggctgttcctgcatgccattctgattcatttccatagttttgaatatttggaattagacaatagtaaggctgtccttatcatgcctatggcacgacaaagagcataacaattcggttagctgtcattggctaatccggcggatgggaatgaaaatgaatcgaaatgttgcacggcggaatccgccggggactggccttgcggcgtgtctgcgtcggaacgcggacgagaaacgttgtttgcataataaaaaagtagcgcagctgcaaacaacgtttctccctttcacaggttcgacagtgtgccaattcgcggggcgctaacccccaatggctctacgcatacctaaacatggtaaagccgaacctcggcgtgatcggataataaataaaacgttgtttgcgacaacaaagatagaaaaaaaatgcaacaatgaaaagcccgactgaaaagtcgggtaaatatcagcttcgctatattaaaaaatgcgcagctgcaaacaacgtttctccttttcaggttcgacagtgtgccattcgcggagcgctaactcccaacggctctgcgcatactttgtctcgtatgcttcatgccgaaccattcaatcatttggagccaataaattacgttgtttgcaccacaaaaatacgaattttatttgaaatgaagaaattacggataacttaatattacagctcgatgacaaggaagcgagttgcttcatataaactgatgatttctttaatcagattatagaagcggatttaaagaatatattattttgaaagtcatatattctcaaccttattcaagtgttatgtggattggatttttaatgaaaaataactaatttgcataaaaataaagcctattatgaataatttgatttcacaaattgaagtaacgaactttcgttcaataaaatatgcaaaaatagattgttccgcatataacttgttttgcggacaaaatgatgttggtaaatcgaatatactcaaagctttcaatctattttttaatcaagaaaccgattttaaaactccgtttgatttttctacggattataacaaatatgctctggcagaagcgcaatcctccaagaaaaagaaacagctgattaaaataaaggtaacattcaagaaaccgaaatcttacaaatcaatatcaggttcaacatattacattgaaaaaacatttgatcgaaatgacaaaaatggtttgggcattgttagatattccgaagaatcaacatcaggacgtactgcaatatccagactatataatcaaatgcgatatgtttatattcccgcgttgaaagggaaagatgttattcagtacttgttaggcttattgggcgaacaagagttgattggaacaacacaaattgcagatctaaatagaagtattaatgaaacaaccaatgatcttgccgatctgttgaatgagtcgaaaatcggtattggaatgtctttcggtttgccaactttgctgagtgatttttggcaacaattatcggttggaacaacttacgagtattttgagactattgagaaatctttggtttcaaaaaaaggggcggtcaaactaagttcatcttcttaccaaatacctttaaatatgcgaggggatggcattaagtcgaaatttctacctccgattttgaaatggctgcaaaaccacaacgaacagaaaacgttcatatggggaattgatgaacctgaaaattctttggaatttagagccgcggaagaattaagctatttgttcgggaacgaatatgctttaacgacgcaaattttcgcaacatcgcattctatggcatttattaaccctcgcgatacagatacaattaaacctgccatatttcgaacggtacgatcatccttaggtgaaacatctttccaagatattaacgacctatataaaacaaaaaatcgagaagatctcttagaagagataggtgcactcgacattcaaaaagaacttattacaaagttcaggcaacaaattgaagatgagaaaaatgcaaagaaagaattgatgaattcgttgaatgaacttcaagcacaaatagcggcactgaccaaaccattagttattactgaagggaaaactgacataaagcatatattaaaagccaaagagaaactcgggataacagacgtggattttgagcaaattgatagtctgcatcaaccggatggtgatagcaatttacgtaagttattagaacaattgagtaagattcataataggaataaaatcattggtattttcgatagagatgttcccgaaactattaagaaaatcgaaaaagacggtgcatcttataaaaattatggcaatggagtatatgcattttgcatttcgtccccgcgaagtcgaattgagaatggccaaaccgaaatatctattgaatatttgtataaggatcaagagattacaactcaattggaaaatggatgtagattatttctgggcaccgaattcactcgacattcaatgcgtcatgacacaaataacgatttaacactcaggctacctaaaggaaaaggtgagaacaaagtcttagaaaataacggcgaccaagccgtatatgacaaagaagataataatgttctggcgaaaaaggatgattttgcagaggcagtttcaaaagatcaaattgaaatatctaatgaaagttgggagaacttccggcatatattcgataagttaaaagagatatgcgctttataaatatcagcaaatagaagattcgctccccatatggatattgatgatttcaaacaagaggtcgagtgtatctataaagacgaaaaatacgctgtccgagataatggagctgttttccggtatccccgtaatggtaaacggcctcgtaaatatgataatttttggactttcggtaagcccaatgataaacatggatacatggagattgcgtccgttcgtgttcatattatcgtggctacggcctttcatggcccgaaaccgacaaaagaacatgtcgtcgatcatatagacacgaatcgccgcaacaatcgcccggacaatcttcgatgggttacccgattggagaacgcactcgataacccgattacccgcaaacgtatcattatgcgctgcggtagtatcgaagcatttttggccaatccgtctctgttgcaagaaagcgatgttactcccgatttcagttggatgagaacagttacggatgccgaagctcaagtcagcaaagagcgattattggcatgggctgaaagcgacaagcaaacatccggcggtgctttgggcgaatgggtatatggtcggcaaccgatttcgcaaaatgacggtctgttgtcgagagcagacgaaatagataagctacaatccgattctctaaatagttgggggcaaattccaacttttgcaaatgaatgtcccgttgagccggaacggagaaagcggaatgttatgctctcgttaacacccggagcggctcaagaaatctattttgataatgataagcccaatgaatacccatgtaccccgcaggaatacaacggtgatcctttgatggcttatgccgccaatctgaccgaaaatgctgtttattggcggaacaacaatggagatcgagagtatgtagtggataagtatggattttcggaagatcgaaactctttatatgtaatgaccaaatccgcatacgtgtggcgaagccaagatgatggagattctatgcctgttcctgtagcaaacctcaataaagacgagttcagcgaggatgaattgaactatcaacttggagaagttatctatgatgataatttgttcgtgcataaaagggtagaaaccgactttatgcccaaagagtatttggaggaggtattcgacgagtgcattggcaaaaagaataaaaaggtcgacaagaattaaaatatttcggacggctcaattttatccgtaattttgttgctattttgttactccgtacaatgaattggttgctttatttgttaatattcagataaatacgaatgactacaaataatatgtggcagaactttgtgaactcctatcagatttaccgccatgaccggcgggaagagcaggcctaaccgggaaactcgggcccgggaggatacgtatggattttatcggcaggcatcgcctgtcgggtactgccgtacgcccggctgagggcgcggctatttccggaagatgaagtagaccgccagtatcaggcagaggaaacctgcgaggtggttccagcgcagggagtccgacttcatgaaaaccagcgcgaacagcgtgaagaccgagagcgagactacctcctggatgactttcagctcccagatcgagaacggcccgccgaattgcgacgacccgatgcggttggccggaacctggaagcagtattcgaacagggcgatgccccagctcagcagtacgatggccagtatgccgaagcgttcgagtttggatttgaatgcgatgtggccgtaccaggcgagcgtcatgaaagcgttcgacaggacgagcagggcgacggtggcgattcctttgaacatatgccatacgggattaaaaccgcgcaaaagtatcaattttttccgtatgatatgcacgtcctgcaaaaaaatgccatccgcgacgtttttcatcgggatggcgatagggtatcgggtgtacggtgcgtttgggtacggcctgcggcaggtagcatccgtatgccttgcgatcggcgatgctgccgattcgtcgcggcccgatcgttgccgggctggggtggcgcggaacccgtcgatgacgactgccgggcgccggggcggaggagccgcggaaattgcggacggcctgtccggcctctgtgcccgggttatttcagcaaagcggcaaggtcggtgatgtcgcggaaatcgtcgatgaccctgtccgcatcggtctgcgccagcgctgcgcggtcgagcgtcgtggccagcgccacgatatgtccggccccggccctgcgtgctgcttcgatccccgccggggcgtcttcgaagacgacgcattccgccgcagtcagccccagggccgcggcggccgtaaggtaaatctccgggtcgggtttgcagcgcgagaccatgtcgccgctgatcctggcgtcgaaataaggctcgatacggcatttttccagcacgaaatccacattgggcttgtagcccgacgaacctacggcgcagcgtatgcctgcgtcgcggagcttttgcaagaggtcggtgagcccgggcatcggcacgatctcgggggcgtagatctcccggtagatggattccttctcttcggcgagtgccgcgagccccttttcgcggatcacctccgcgggcatgatgagcctcatgatgtcgtcgttgcccatgccgtatgcctggccgagtttctccttccagtcgcggatgccgtatcgttcgcagaagatttcgaacgcacggatgtggacgggcgtgttgtccacgagtgtcccgtccatgtcgaatattgcaccttttatcatagttgtccccttttttccagcccaaaggtagtcaaaatccccgggttcccggcctccgtgcatcagaatttgagttttatgcccaggttgacggcgaaattctggatctcctgcccgggtttcgggtcgcggtgcgtgacgcgccagatgaagtccacgcgcagcagccggaagatgttttcgacgccgaatcccacctcgacataagggtcggacaccgatgtcatgccgggcgggaagagcagcggtgcctgcgttgcggcgaggctgccgtcgttctccttcgacagcgtgccccacacgcccttgcataccagcacctcgcgccatttgagttttttgatgagcgggatgcgccccagcaggatgccgttgaagtggtgttcgaaaaacagcgccacccaggtgtccgaagcgaactcgtagaagttcatgcacgagaacgccatcgggtcgtagaaataggtgccgttcccctcgtggagcttcagcagcgggtagggtaccttgccgaagatcttgccgccctgcacggtgatgtccgagtagcccagcggcggcagctcgggcttgtagtggatgccgccctcgaggcggtaatattcatagctgccgctcagcacccgggggatcccggccgtgaacccaagggtcaggacggggtatttcgtccccatgtactgcttgtcgaacggcatgcggtagatgctttcgttcttcgagatgcgcatcccgacgtgtacggcggcgtccgataccgagttcatgaccgtgccgtcggggcgcaccagcgggacgtaccggttgccgtagatcttctggatgcgggcgccgaggaagttgctgatcccgtgccgccattcgtgctcgtagacggcctcgccgcggttgaccatcgagagccgcgagtcgccgcgcgagaggagcgagctgaggatgttactctccgtgagggcgttctgccccgcgcccagctgcatcacgtcgtggcggcccgagacggtcagcttgcgcgtcagccggcggttgaaagccagctcgacgctgccgccgcctttgaacatcccgtcgcgcgtaccgtatgccgcataccccgagaggcgtatgcggcggctgacagccgtggtcgtgcggaatcccggctgcatgcggaacccttcgagcttgttgaagctcgccagtttatagtaggggccgatgccgatgtatttggtgttccagtaaccgacgatgaccgtgttgatcagggtgtagatattgcggtacagcgggacgttctgcaccgagtcgaccatcgaatagatgcctttctccttgtcgctcagccggtaggggcggacgctctcccagaaggcttcgtccttgctctgctgcccctggtcgccgatcacgacgttgttgtccatgcgtatgacctcggcggggatcggttcgccgatccgcacgtcagtgtagaccacctcgcgcgtcccgatgaacgaggtcagtttcgatgagtcggccgtggtgaccgagaattcggccgatacgcggtcgcggcttcggaaccacgtgctgtcgcgcacgatgcggttctcgttttcgagccgcaggtgcttgatccagtttacgttgacgcccttgggcatgcgcgccgaggccgattgcagggcatacgacgccgaatcgatgttcacctcgccgtcgagcaccggggaggtgagccgtttggggtggaaccggattttgtaggtcttgcggccgtcgacctgcatgctgtccaccaggaaatagtcgtaatagaagagtcccccgtcggagagcgggctggcaaaacggacgttgaaaatgtcgatgaagttggcgtagaagttgacgttgccgtgcatctgtcccgtgaactgggcgatggcgaagctgtcctccacccccgatacgcggttggcgcggatgatctcgcgcgacagcgaggggttgcgcttgctgtggtaaaagtcggccgtggtttcggagatcatggccggcaggtaagcctgcccggtgagggccgacgtgtcgacgtattcgaatatgaagccgaagttgcgttgcagccttttgttgcggaagcgcggcttgatgttcgtcaggtcgagctccatcttggtgtacgtggcgcagtggtagcgttcgtactcgtcggggtcgttctgcggcttgcggcgcacgacccctttcaggatcgggtgtgcggggttctcgcccggggtgatgacgacgttgccgatgccgaactcgaccgcttccagggcgaagtctacctggttgaagccgccccgcgtgagcggcttggtctgcgtggcgtagccgaccatcgaggcctgtacgcgtcccaccgtatcgcgggtctcgagcgtatagataccctcctcatcggtcgtgatgccggtcgtggtgccggggaacacgacgctcacgaactgcatcggggcaccgctggcggcatccgtcacacggccgcggacacgggtgctctgtgccgacagggtcgtgcacacggacaaggctgcgagcagtgaggcgagcagtctgtatgtaattttgccacggtgcattttgcaaaaataattaaaaagaacctgtttggtcaaaataaattacttttgcataatataagccgaaaaatcgaacaccaataactgaaatggcacacggaaaaatcgaaaagaccaatgcggcccgcttgctcgaccgcgctaagatagcctacgaactcgtcccttaccgggttgatgaagaacacctcgcagcgacgcacgtggctgaagagctgggcgaagatataggaagcgtattcaagaccctcgtgctgcggggcgaccgcacggggtatttcgtatgcgtggtgcccgccgaccacgaggtcgacctcaaggccgccgcacgcgtatcgggtaacaagaaggccgacctgatcccgatgaaggagctgctgccggtgacgggttacatccgtggcggctgctcgccgatcggtatgaaaaaacagtttccgacctatatccactcctcggccgcgtcgcttccggccatctacatcagcgccggcgtccgcggcctccaactgaaaatcgccccggcggagctcatagctttcgtcggggcgaccatggcggaaatcagccggggagggtagtgccggaatgagtttcgggttcagggaacttgtttccgcccgtttaatttatcatatacggcggcaagccttttaacgatggccgtccaatcgtatgcttccaactcatatttttgttgccgggggtatttgagtttccgctctattttccgggccagttcctcatagtctcctttgctgaaatagtcgtctgcaggcaaatctaccaaatggctggccggaatgtcgcttaccagcacatcgaggccgtaactcatcgcttccagcaataccaggggaaatccttcgttgtaggacgataatacgtacaatccggcgtgtgtgtacaactggttcagtttctcgccgtacacatagcccgtgaagacgatcttttccggtggcaatattgatttcaattcgtccagataggcggattccgtctccacgccccctgcaatgaccagtttgtaatcggtatccactccggcaaaagctttttccagacaatcgaagcctttttccggagtaatgcgtcctacgcccagtatatattttcccggagtcaggcctaattcccggatataattctgctgtgtcgcaggagtgatgcgcggaatcccgttcgggatataatacgatttgctcctggttcgctcatcgtatttttccagttgaaatttattgacgaagatgactgcgtcggacattcgcaatgctatcttttcgctccatttcaacagcgttcgggcgccccagccccattttttgtgttcgtaattgggactatggtacgtaagcacgacttttatgccgcacagcttcaatagcggagagaacagagcggggcctatgttgtggatatgtacgatgtccggtcggctgagaaccgcacggcaggtggacaggaatgaatggtatacggcctcgaaaccttttattttcgtggacggcaggtctatgaaagttatgttgggataggacggagtgacgcggacatacggtttccgcctgaaaataacaaagcgatattctgcaggaaattccgtatacagggattcgcagtgcttttcgaccccgccctggatcagagggaaccccctggttcccagtacgcagattttcataaatacgaccttaccagcaaatatccttcccctttgctatgcgtatcttgtttttcaatatccacatgatcggcttccagggcttgcggatcatgtcatgccgctcggttacgatgaaagcgcagttccggtcgcaggcttttaccttttccgcgacctctttggctttctccgacttcatgatgttctcgaacgaatcatccttgatattgccgatgatccactcttccgaagaaccgttgcagggcgagacatttccccaggggtcgatgaagaaaaagtcgttcaatgcgccgcaagggggtctgtaaccgggttcgtcgccgcgcagccggcgatggatgctgcgattgaaataagcacggccgtaatctttcagtttgttcttgaatccccggcgcttggatgtcaaaagcgctttgacgaatttttcgtgctcgtgcagggccttgtcgcttgtcaaattattgtcctctttatggaagtaccacgaattatggacgacagagttgcccagttcgacatccagcgcaacgcaaaggtcgtacagatagatcaggtctttgtagttgtccggggaaatgaccaccgagaatccgatattcttgcatttggtctttttcagttcgagcattgttcgcaacgcgtggtcgaagccgttgacggtaccccgtttggagtcgttcagtttaggaagtccctcaaggctgacgcggatcaggatgttggggtatttatttgccagcgcgacgatcgtttccgtattgtatccgttcgtgctcagctccagcagggaagccttgggatataatatccggaatatgtcgtcgatgtctttgcggatcgtcgactctccgcctgtaatgttgatccggagcccggccgggagcttttcataatagtggtaatctatttcctcttccggtttggtttggtgctgccagatattacacatgttgcacttggcattacagcgaaatgtcgtaataagactaccttgtactactgttttcattataaaatatcgttttaaaaagtattgtatgtattggatcaccgcaggcttttcgccggttgttttaccggcttcaacccgaataaaaagcggagaactctgttttgggaaaggatgcggcggtgaaggacgatagggagaataactcctgctcccacaataagtgccgccccgatggtgaaatacagtgaattgttcccgtttgccaatgtggggactttatggatgagcgattttacgaatccttcgaatgtcgtgtggaacaaatatattatgtaggacgatgccgatattaccagtaatttttgtgtcgcgtaattccaatgttttattcctctcgacaggacgcatattgcataaattccgatgaacggcagtatataatccagaatggtggttaatatagtattttgggtaactctattaaagatgaacaatgcaggcaatgcgcagaccggaataattcccggcacttttttcccgatctcagtccagcgcggatattcattgaggattatgcccagcataaaatatttcagcattcgtatggcgaaatttatgcagaatatttcgggccattcgatgggcagaaatgtaacgcacaaacttattgcgaacaatacgacttgtccagcttttgatcttaccgcggcgacgagcaaaaaaatcagccaaagcgcccagataaaccaaaggaaaaaaccggcttccggcaggtaaaacatcttgaaataggacaaatacgtcaccggattctccaccagcatcctttgttgtgtcaaaagttttatgctgattatgatgatactggtgctgaaatagggtatcatcaaccgtttgaattttttataaagaaactccccccccctcagattcccgattgtcgctgcgtacacatatccactggcaaacatgaacaaaggcatatgaaacgtgtagatgaacagattgattgtatgataccattcgggggcgttatccggattgtaatgaccgatgacaaccaggataatgcatattgctttggcaatgtcgattgagatcaaacgattcatacttgtctatgccgttttggagaaaaacagagcgtttctgccgtattataaagaagtgtatattttcaggagttttgcatagtacctttctgccgaatatcttttctgggcgccgagtgcgatctgccggtattcgaacggggttgcgaacatttgcctgattcgggccttcagttcttttgcatttccggattcgaacagcattccggtcgtgccttcatcgatcagttcgggaatgccgccgatccggctgccgagcaccggagtgcccagacattgtgactcgatgacggacagcggattgttttcataccattccgaaggcacgacgcagaatcgggccttaccgactatttccttgatttccggccagtgtttataacccagaagttctatatcgcttcctgcagctgcggcgcgcagcgtctcttcgagcgaaccgccaccgattatcttcagtgggtagggcagtcgctttgccgcttcgatcagtgttccgatccctttttcaggactaagacggcctatgtaacagtaatagttctctttgtcgtaatcgtctttccgggttttggcaatgtcgataaaattgcagagcgtattgatcttctgtttgtcgaagttgccctgaaccattttgtccgccataaaccggctgggacaaataaaggcgtcggtaactgcttccaggcgcatacgagtccatttcatagcttccttgtatgccaggaaacttgccaatgcggaatttttcatgcatttgtgctcccgcaccttgcgtttgtcgctaaagcactcttcgcaaacctgcaacccgttgcgcaggcagtcgtaacgagggcatagcagtttgtagtcgtgcagagtccatacgactttcacgcctcgtcgatgggctatttcggcgataacgggagaaagttgggtgtggatattgttcaggtggagtatatccggttggaactcatcgagcagtcgagtgaactttgtcctgacttcacgggtgccgaatgggcggcgcagcgcctcgattattcccaacccgggggcgaatttaacctcgctcggaaaatatttgctccagggagtttccagattttccggatgctgcatggaaaaaacggctacttcatggcctttttgtttcaaaagctcttctagattgatcgtgcagacacaatcgccgccgcgcggataatagaatttattggctaaaagtatttgcataaattgttttatgtccggttgccgttgattttatagttattcgtcagtattatgattatatatcagtgctttatccgattataatatttgacgaaaatttctttaggtgtttttcttgtcagaagagctgcagcaacattacgatttgctgctgacattatgctggcattatcaccggatactttgctctgtattcgatattttaagcttctcagaactgctattacacaggcaaagcatgttaaaaatatatataatactacagacgacccggaaaggaatctaatcacccctttttcacctgcaggggctgttgccgttttgatctgggaaatgtgtgttttgccactacagccttcataatgaattaattcgaccgatgcgttcacatagcaaaaataaccacgtctgttcagtgcggtggacaatgcgatatcttccggacagaaaaagtagtattcgtcgaaaaatcccatttgccggaatatgtctgttttgatcataaatgccgccccgacgagattgtatgtccggaatgttccggttcggttcgtatagggactttcggccgttttttcgcgccacaatcctaattgggccaaaacatatgttttccaatttatttcaggtcggccgcagtattgaagcgagtggtcggcaaatagcaatcttggactgacgacagcagcctccgatggtaattggtcgaacgtcgccgccaaactcgtgattacgtccgattctatttttgtgtcgtcattcagaacaaaacaatattttccggttgcttttcgcaatgccagattgttgttggccgagaatccacggatttcattactttcaataatttgcgcccacgggtaattttgtctcaaatgctgaaggttttccggtgagaagagatatgcgacgacaaatacctcataagaggtcgaggtgtgtgtgcggatactgtccagacatccgcttagtacctcataattgttcatgctaacaatgatgactgaaacttccattgtttcgcttgtttattcgtgatcggttgcgatctattttataaatcagaatgtagaccagatagaaaagataaaggtgcattcccggtgttgaggatacggtcgacgccgctatgaaagccagcgggagaaagaacaggcattttccccgcgagtgccagcccaatcggcataaagtaaaaataaagatacagtatgtgataattcccaatattccccgttcgaccataatccatatccagatactttccagtcccagaagccggcctaccaatatgcgatccggaaagtacagtgtcgctttctgtcctaatccccatatggggcttttcgacataagaatataggcggcttcgaactgatcctggcgcatttctaaactgctgcctcgtatttcggttttttccggatttaataccgatacgatcagattttcaacaaaatccagataaggcatcaggacgattatactgattaccgcaaaagctaagatgcgaacggattgtttgttttttagattgatcagcgggagtattcctactgccagaaataccagcggtgttcggctgttggatagcagggatgcgatgaatgccataatgccgacaagcagcatggttttttgctgtaatttactgaaatatgctttataatacacgtacccgtacaggcagaggcagaatatcaatccgaaattgatgctgccgccgatcggatgaaggaaaaacgattggacacgggttcctcgctcatcttccagatattgccagtctgttgctctggaacctgcgaggtctatttcataatccattacgggattgtaacccaggaatttttcgataaatgcatatgtgcaaattatcagcgaggctcctaataatatattgacaactttcagtatatcttctttgcttgatattaacatccagcataaataggcactgatgaaatcgcaaaaaacaacggatagcagtgacgtgaaggtattctggattccggcgatcgaaataaagctcgatactacataggacaatagtacccagataaatgccttgttgaacggcaggggagatgtcgttattacccggctgtatctttttcttttgattacatatagcagtgcgaagaagatcgacatgaatacttccagggtcaataacggaacgcccggaaggtttatcaggtttatgttgttgtttaggaacagccggaacgccagaaagagaaaaaaaccttgtttgtagttttttaatgagtacagaattagcagtgccgctataatcaagaatggattcatgcagtcattattttataattcgggccggaatccctgccgcgatcgaatacgggggaatattttttgtaaccaccgcattcgcaccgatgatggccccctcgccgatcgtgactccggccaaaatcgcggctttctccccgatccacacattgtctccgatgacgatcgcacctttggaataaataggccgggcattcggtgcgatgttccggagcgccatatctttgggatctccgtgcgaattgtccgaaatgagcacgcttttccccgtgcggacgtttttaccgatccggatagaattgactgcggtgatatgcatatccggaccgaacatgcagccgtcaccaatcgatattttcaccggagtattgtattgcggcatttcatgagccgtgatatgggaattgcggccgataagacaatagtccccaatctcaatgtattttttcccattgactaaatataatcccggttctacctctgtatgaagccctatttttcggacgttatgtgcaatccatgctgtataaaaccatgcgtaataccggctaaaccgttgtgaaagcgaatatggccatatacaatgaagtaaattgccgaatgttcgtatatatttataaagcattttttattttgtatttaaaaatttatttttcaaatacccgtataatgtttccttaccatctgccgtttcataatatgataaccgatggtttagtttgaaaaccgtcgtttcttgtttgatgcgatcgaatttttctgcatcatatggttggttcatctcggaaagcaattggtgtaaatatggggatgtatagggcatcgtgtctacgcttctgcggaatgaatcgtttttccgataaattaggtcgaagatgtaatctatcagaagataatcgatcatcttattgtattcttggaggtatttaagaaagatactttggatagtgccaaatgctggattaccatgagttgatgcaaggaaaaatgtagcccacctgtatgcagatatggtggtattggatccagtcacaatttttattgagtgaaaatagtctggggcaggaattgatattgaatcggtaatcagtaaagtactgtccatccaaataccgcctttatcaaataataaacaaatgcgtaatatgtcggaaaagtgggtgtatgaaagttctcctctattcaatcgatcataaatataattaggaagtgtaacgtgtgaggcaatattatctttggtcaataaatggactggccggtcatgtatattcgagacaatactattgtaacatatttttacaatttcaggcattgcagtctctccctgataccaaaagatccataccggaccgttatttgacttttcttgtagcgatggaaatgttgcaggaaccatatcgcaataatgttcatccatccatcggcgaatagaatctattttctggttttcaaaaaaacagcattctttgaaatgaaaatagaaaaaatcccgtatcagttggatgaataacacgcaaagtgtccgtatccgtaaaaatgaacttaatcggacgatatttatgatcttagatccgtataaacgaattgtacgatacattactctggattattttggtcggataattttgacattcatcgttgtcgatgagaaataattttttgatagatgtcggttaacgtatttttgatagattcgggattatgccgttgccgggctgctagttgtccttggtgactcagttgttccattaattttgtatcccggctcagtttaacgatctccattgccagcatgtgcggttcatttgacgggatgagaatgccggtttcgtagtttttgacgagagacggaatcccgcctacataggtcgtgatgactggaattccgattatttgggcctcgcataatgaattaggagaattgtcgatatatgctgtatgtacgtagatgtcggcctctgcaagttgaacggctaaatcttcggccgaaagtgttcccagaaattttatgttgactgcatcatgaggcgtacgttcatttttctcgaagaaagggaaagacccggtggggccggcaataagccattcgaaatcaaaatccgtatgatcttttaataatttggctgtcttcaaaaggagatccatgcctttgaccatactgcatgacccgacgctgagcaattgtatgcgcttcctttgtcgaaatgtccatgttttcgggggattgaagaagactgggcgtagtgcttcattacaatgataatattgtgagtctggggcatacaggcgtgtgatattgtaatcccagttcgttcgccccatgacataacggcagtgtttcaggatatctatttcacgtgctactttatagttgtcgtttctactccatacaaatcgtctttttaacagtacgatagggttgtagtgcgatgttttccactgggtgaagaaattatagcctggaggatacgaggcatttacatagggaggaaggctgccctgcatgtggatgacgactggtatgtctacgtatttctcaaccaatccgaatccccattccgaaccgaaaacatggatgatgtccggtttgaaatcctcgatgactttcaggcagtccgcaataattatcttgtctttttccgatgcgtatatgcgtcgccgcaatcccggttttacccggatcggataataacacaccccgtcgatttctttcttgaatattggatccggatgttcgaatgctacccccaggcggatgttatctgatgttcggattattttttccaaggatgcgatccaaccgcccccgttgtgttcgccgttccggtgggcatcgtagagcgacggatttacggcaaaccaaagtactttcatattatgaattggtattatgtgacaggaagcttttactcgtgtcgattttcccggacagaagatcgtctatgcgcttccaatccggagttgacaggggtgtcgtgtcctgtatctgttgaggatcgaatctgtcagtcattcccaatccgttcaggaaatcccgcatccgcgaatggttcgttctgccccggagcggataggtcaggaacggtttatggaaaaggacggagaatgccgtcgcatgaaacgaattcgaaatgacgaattccgcatttttaatccatgcgaggaattccagcggcccggcgtccgaaatattccgttccgcataggcaagcggtgcgaaatcgttcagggaatacaatctggcgccgagctgccgggctatttgccgtgcatgttccctaatagtgggatcattcgagaaatcatatacgagaacatacctttcttggggtgttatgtccgcggaaatttcctcccagctttgtctgttcaacagaaaaaccggatcttccacctgttctgccgttctgccgacagaaagatccctgattattcttacccctgtctgctcccgcaccgatatcgcatcgaatcgctgcagttttttcgtgacgaaagccctgtatgcgggagcgatctccgatactgcaaaactggctgcataggagatacgccgtgtgtcgtcggatccgaaatcgagatagaacgctgcatcctttccgttttcacacgccgtgttccaaatctggtcgcttccggcaatatataaatctgcctgcggtggagtggcccttagctcttcggccgaagtataggtattgtcggtaagcgtcaggaatttttgcctgaaatcgtcgaatttacgtttccggccgatcgttttgtatattttccggtttttgagcagaaaatagatacattgtgtcccgacgtaatctttatagggatataatcttgattcagcgggaatatgccgccagttatatctgctgttcagataatagggcttgtaatcgatgatctggacatcgtgtcccgcctgcgacagataccgttgcagtgcgtacgcctgcaaagaggctccgtaattataaacgttatgacaggtaatcgtcgctattttcattttgcgatgcgttttatgagtttgcgcattgtcgctgtcggatgacgggcgtgatttactatccgcgttaattgttctcgacgggttacgtagcgctctatttgtctgagcgaaattttcgggtttcgcagcagcgacatgatgtgatcataattgccgggttgtcgggcgttctcccgcatttgtccctccgctgccgtttcgaatgaaatctccgatatatggcagccttgcaatatttcgacgatattttggcctcgctccgtgaacgggatcaatgcgctgaccccttgttcgtcgtgctggtagcgggaaccccagaggtcgccgacccgcaaatctgcggctgagttgttgagtttatatttgcactgtttgtaacacgaggaattaagacagaggtcatttagaaatactttaaaaaatatgtcaccatctgataatgacgaaaaacagtgctttgttccggctgatgtcgtgtgcttataacttattgcataggagtcgtgccagccccgccgtttgcttcgccatttgatgtccgtgagttttgcgttttcgccgatcgtgcgcaggtatttttgccataacagcatcgacggaactccatggcaaaagaaatccacgaggatgaaattcgattcaaccctgaaacgccggatgtagcgtcggaaagatgcgatttgacaaggggtgcccgtcaccacgtatttgtcatggatatctattcccgcaaatccgtcggttgtatcgctctgcagatatttgcttcctgcagatgcagccagctcttcctcgttgcgtgcgatataatgttccggaatctgttttgcataattataacggacgacgcatattttgaagccttgctgcagcatttgccggccgatttcaaaagcgattcccccggaggatgaatttttacggatatcgtcgttcaggctccatgccgcataacttgtcggtttaaggtctataacttggctgtctgctgcaaaagcgcaaacctctacgcagatcgagcattttatacactgatccgccgattcgatgcggggttcgtaaaagccgtttttatttaacttcaatgcgatgatttgtttgggacaagccttggcgcaaaccccgcatccgaaacaatcgtgtatatctgcaatattgatcatatttttatgcagaacatttctgtttgattctggctactatctttttctgcacgaaaatccgctcctgcaccgacagtccgacatagtaaatgacgatcaaagtagcgatggcgcatacgccggaaactacgaataaccgcaaaatgccggcattcatcaggtgagagactattatagggcagattgctgccagaacagccactacgcagacattcaacagcacttgggtaaagtaggactttatggatatttccacctgccggtgaagaaaccagaggcgggcgaagaggcatcccaaagagaggcaaatggctacgtacatggtcgtctctggtgcataacctttgcccagcaataggtaggagatcggaaaattgagcaattgaaggcttccgacgacgatctggtagttccgtatattgccggttgcctgcagggccgttatttgcgtgccggacaaaacttcgcacatggcgaataccagaaccagccggacgaagattacggtgtattccgggacgtttttcaaccatagcgtcaggatcgtattcgtttcgatgatgatcgggagcgatagcagcaacagtaggtagaatgaaaaacgggcgccgctttgtaccaatgtaagcatatacaggtagtcgcccgatgcgtagcttttcgtgatttgcggattgattgcagtcataaaattagttgcaaatccgttgacggcgacgttcacctggaatgcgatagcgcgcgctgcgttgatgaccgggccgcaaaacagatttatgacgatattgaccccctgatcccgcaaaacccccgcaaaagccccgatgaaattccagccggcaaatcccatcatttctttcagaagggctttgttgaatgtaaaatgatatgtgcactctttgaaatttcgcttgcagtagatgccgtaagcaatccggatgacacaggcgacggccagtagtaatataccgtacaattttaacttgtcgaatgaaaaaatgacgagtatgtagacgatcaacagcttgagtactacttcgataatgctgatatacgcaaaagcctgcattcgttcgtgtgcgatgatcgccgcattgtacggaacgctgatcaggttcaccatgaacgtcagtatggaacactgaagcacccagttggcagcgccgatacgactctccggcaggttcattttttcattcaggaaccatacgccccctatttcggccaatacgaagatcaggagcgccagcccgatctggattgttaccgacgatgaaaatacggattttaattttgcggtattgccctgtcccagctcgaatgttatgtacctgcttatcgctgcggataatccgccggaaatgacggagaacatggcgacgactccgccgatgacattatatataccgaaatcttcaactcccagcgtattcagaacgactcggcttgtgtaaagacttacagccatcatgaatatcatccgaaaatagagcagaagagtatttttcgctattcgtttgttatttcccgatgatgtctggactgtcattctgtttacctttgtttgccggattttttgtttggtaggcttacctgtccttatacatgctctggtagtactcttggtattcgccagaagttatgtcgtccatccatttttggttttggaggtaccagcggacagttttttcgattccttcctcgaactgcaggctgggagcccagcccagttcgcgcttgagcttgcgcgagtcgatggcgtatctcaggtcgtggcctgcgcggtctgtgacgtacgtgataagctgctccgacgacccctcggggttgcccagcagcctgtccaccgtccgtacgatgacccgtatcaggtcgatgttcttccactcgttgaagcccccgatgttgtacgtctcggcgaccttgcccctgtggaagatcacgtcgatggcccgcgcatgatcctcgacgtacaaccagtcgcgcacgttctgcccgcggccgtacaccggcagcggccttcggtggcggatattgttgatgaacagcgggatgagcttctccgggaattggtagggcccgtagttgttcgaacagttggtcaccagcgtcggcatcccgtacgtgtcgtggtaagcccgcacgaagtggtcggacgaggctttcgaggccgagtaggggctgtgcggcgcgtacttcgtctcttcggtgaagaactcctcgccgaagggcccgccgccgctctccccgcccgcagcatctccctcgggacgggtcagctccagcgccccgtacacctcgtcggtggagatgtggtagaacagcttgcctgcccaatcaccgttccagtactcccgcgcagcctcgagcagcgagagcgtgcccaggacgttcgtacgcgcgaaggtgaacggatccctgatcgagcggtcgacatggctttcggccgcaaggtggatgaccccgtcgatgtcatactgcctgaacagcgcccgcagcatatccaggtcgcagatgtcacccttctcgaacacgtagttcggggaatcctcgatgtcccgcaggttggcaaggttgcccgcataggtcagcttgtcgaggttgacgatccggtaatcggggtatttggtcacgaacaggcgtactacgtgcgagccgataaagcccgctccgcccgtaatcaggatagtgcgtttcatgggttattttctgtgagtcgtttcatgcagtagatcaaagcctccctccagtgcgggatatccatttggaaggtctccttgaagcgggtcttgtccagcaccgagtaggccgggcgggtggccttcgtggggtattccgacgtgtggcaggggatgatgcggcatgtgtcatgtcccgcggccgcggcgatctccaccgcgaagtcgtaccacgagcacacgccctcgtcggtgaagtggtacaccccctcgttgcccgcatagcgccccgcctcgatcagggagaagatcgcaagcgccaggtcgccggcgtaggtcggagtgcccacctggtcgaagaccacgcgcagcgtctcacgctccgaggtcagccgcagcatcgtcttcagaaagttgttcccgtactccgaatagagccatgccgtgcgcaggatcaggtagcggcaccccgaggccttcacggcctcctcgcccgccagcttcgtacgcccgtaggcccccagcggcgaggtcgccatatcctccgtgtagggcctgtgccccgtgccgtcgaagacgtagtccgtcgagacgtggatcagcgtcgcacccgtctccttggccgctgccgcgaggtatgccgcggccttgtggttgagcaggtcggctgtcggttcatcctcctcggccttctccacgttcgtgtaggccgcacagttgacgatcacgtcgatacgctgttccttgaccgtttgaagcaccgccccggcgtcggtgatgtccagctccgcgacgtcggtggccaggtagttgttgggcgacacgctcccaagctgccgcagcgagctccccaactgtccgttggcgcccgtaatcaggatattaagcatagtagtccgtattgtagtcgaacagttccgcggcctccgccagccgcgggtggccgctgtccttgggcgagaggacgacatcccccggcgccaggtgccagtcgatgcccagcgtggggtcgtcccacgcgatggcgccctccgattcgggggcatagaggttgtcgcacttgtattggaatacagcctcgtcgctcagcaccgagaagccgtgcgcgaagccccgcggtacgaagaactgccgtttgttgtcccccgagagctccacggagacgtgccgcccgaacgtgggcgagccccggcggatgtccaccgcgacgtccagcacgcggccccggacaacgcgcaccagtttcgactgcgcatgcgacccccgctggaagtgaagaccgcgaagaacgccgtacttcgacatcgactcgttgtcctgcacgaaccgcacggggcgtacgagcctgccgaaggactgctcagaatagctctcgaagaaataaccccgagcgtccccgaagacatcgggttcgaggatgaccactccttctatttcggtagggatgactttcatggctttagcgtcggttttcgtcggtgagtttcaacaggtactgcccgtactggttcctgagcatcggctgtgccaactcccggagcttagcggccgtgatccagccgttatggtaggcgattccctccaggcaggcgatcttgagaccctggcgtttctcgatgacctccacgaagatcgaggcttcggccagagagtcgtgtgtgcccgtgtccagccacgcgaagccgcgctgaagcgtctgcaccttcagctcgccgcgttgcaggaacgactggttcacgctcgtgatctcaagctccccgcgcgccgagggtttgataccccgggccacatccacgaccttgttggggtagaagtagagacccaccaccgcgtagttcgatttcgggtgttccggtttctcctcgatcgacaggcagttgcccgcagcgtcgaactccgcaaccccgtagcgctgcgggtcgtcgacccgatagccgaaaactgtggccttgccatcctcctcggccgtgcgtaccgcctcgcgaagaaggcccgtgaagcccgagccgtggaagatgttgtcgcccagaaccagacacacggagtcattgccgatgaaatccgagccgatcaggaacgcctgcgcaagaccgtccggggacggctgctcggcatagctgatgcgaaccccgtagtcggagccgtcgcccagcagacgacggaaaccgcccaaatcctctggcgtagagatcaggaggatgtcgcggataccagccagaaacaacgccgataaagggtagtagaccatcggcttgtcgtaaacaggcaacaactgcttgctgacgcccttcgtgatcgggtacaaacgcgttccgctgccacccgccaagatgatgcctttcataggtttctgaaattaatatgcgttctcatcctgccgcagggcattccataccgtcatgaagatgatgcggatgtcgagcagcagcgaccagttttccaggtaccagatgtcgcggcgtacgcggccttccatctggctcagggagtgggtctcgccgcggtatcccgtcacctgggcccatcccgtgatgccgggtttgatcaggtggcgaaccatatatttgttgatgagtttcgagtattgctcggtgtgctggagcatgtgcggccgcggccccacgatggacatgtcgcccttgagcacgttgatgaactggggcagctcgtcgatgctcgaccggcgcaggaaatccccgaaccgggtcttgcgcgggtcgtcccgggtcgcctgcaccctgtcggcgtcggcgttgacgcgcatcgaacggaatttgatgcacctgaacgtctggccgttctccccgctgcgctcctgcaggaagagcaccgggccgcgcgaggtcagtttggtgcctatggccacgaaaatatagatgaaggggaacagcgtgcataggaacaggcttgagacgctgacgtcgaatgcccgtttgataaaccggttcgacgcctgccgcaacggctcctcgcggatgtagaggatcggtacgttgcccagcagttcgaggttcatcgtgcgcttcatgtagttgcgcaggttgggcacgtagaagaagcggacgaagttgttttcgcagaaatccatgatcgggaatatctcttccgcgtaacgatccgtcgagaggcagcagtacacttcgtttaccgggtgtgcctccagccacggcagcgcctcgtccacgcttcccaggcagggggtgttgtccggcagggtgtggtcgtcgtggttgctgaaataaccgagtacgcggtagcccgtgctggtgttgtcgaccatttcgtggtatacctcctgtgcattgtccttgctcccgacgatgatcacgcggcgggcgttgcgcccgtgtccgcgcgtgaccttgaccacgatgcggcagatgtagcgccacagcatcagcaatacggtgagcacgatgtagaacgtccccatcaggtgcaccggcagcagcccgtagctccatacggtctggatgagcacgaagaaccccaggtggcagagtacgacgtagaatacgcggcggatgatctcctcgtaggggacgattcgcgaggagaggatcacgccgaaccacgagaggcccgggatgaagcagatgttgagacaggcgaatatctccagcgagcgggcgatacaggccggttgcggatacagcgtgagcgccagtatccaggacaggttcagtaagaataggtctccgatgatgacgggaagctttatgagcaaagactcccgcatgacttgtttcataaccgaaaatttagaggcgttaattttcgaattaacgttgcgcagattgcgtatgtgtgggaagaaggatctgctgatttattttttcgatatacctcagcggcacgtaagccgtcagtgcggtggctatgtccttgatcgccacggcgaccttgctgtgccccttgtgccggatgtagcggccctcgatcccggcgaacaccccgccggtcacgcggacggcatcgcctccggccaggtcgacgtcctgcggtgccacgatctcgacatgctcgttgcgtgtcgccacgaccgccatgaaatcccgcatctggttgtccggtatcaccgtcggcgccttcgtctcccgatccatgatgtagcggatcggcagggtggtgctggccttgatctccttcaggcgcagggccgaagtgcggatgaacagcaggttgtggatgagcggctcccagaccttgcgcgtccgctccccgtatgtccgccgggcgaagtgcatcgggatatagctctccacgccgatgccgtccagatagccctttacgagcatctcgcggccgtaggtgacgcgcaatgcgtaccagcgttgtttgttttccggattttcagccatgggcataccctggggacacctccgcatgggtgcggttgtcaagcgatgaaataattgtgtcggaatacgactcttgtctcatgtacatccctacgatagggcctgcgcattttttcctgtcgaacgcaaagatacgaatttttcccgctccgccaacaactctgctgccatgccgggaataggccattgggcccgcgtaacaaacaataaaggacacaaaaagggctggatattccagttttgcgcctctttatgtccttatttcttgccgatacgcactaaatagcgtataccttgcgttgttttacgatgcaaatatagctctttatttttaaatccaaaatatccggcaaagattttccaagactgaggctattcttcctcctttcgcagccagctttccccggggcggattcggccgggaattccggcgcctgcagcctgcggctacctgaatacggtgaatttctcgttccactggccgcgcaccgtatcgtaatagtacctccatacggatgtccggagcactttgcgcagccgccagcggttccggtacgggccggacagtttgcgcaacaagcgcggcaggggcttgtccggcatcggcgacagggtgagtacctcctccatgaaccgtccgagcatccccgcttcgcattccgggcccggaacctccgccccgaggtattccacggcggcggccgtcatcaggtcagcgaacctgtccatgcggtagtcctccatcgccgtgcggaacagtgcatggtcgatctcgtcccaatgccgtgtcaggaaacatgcccagtcgcagaggtgccgcagtacaattccttccttctggaaatgcacggcggcatggcgtatcaggaatatggcgttgaatgtcgcccggggtgcctgtatgcccggcgccaggccgtgcgtgccctccttctccagcaaccgcaccaacacggcgttcagctcccgctccgtcctgttgcggcgcacgttgagtattgtcctgtggttttctatcagcaccccgtcccagacgtattccgaatgcttcgggacgtcgaaatagaggtgtgccccgatctcatgcaggatgcggtcgcccttgtccgactcgccgtaaaggtaaatgtcgatgtcaccgcattcccggtgctccgggagggggtagtcgcggctcagtccgagccctttgagcagtaacatgcggagtccctcttcggagaaccgcgccgcgagttttgaggccgtttgctgctggtggcggtacctttcctccagtttttcggccgacagcgcccagcgtatgcgggtttcgcgcggcggttgctgtgctgcgggcagccggcatatgccgtcccacacgacggcgctcagcccgtggtcggcggccatgcggtaaatccgctcccacgatcccggcgtgacggcggtgtcggcggtatcgctcacgggggcggccccgaggcccgctccgctgcgtaccagccggatgaaataaagggtatccttgtccaatggcattgaaaggttttgtcgtccgatagtgtcgcaaatatacgacaatcttgcgaataatcaatcatgcagggaattgcggcttgcagccacgaaaaaacggccgccttaaacaaggcggccgttctccgtgatccgcctgggttgtgaaccaaacgttatttcttcctcaatatcagtactttcagaaatttcggctttgcatccgtcacgctttagtccttaaaaactgtctgctgttgtccggtgtctgtctgccaacatcttgggttcaaatgtacacattatttttggattatgcaaaccgttgaaaataaacattctaaggttagtgcaaggtgcaagctatatatatagatatatacttgcaccttgcactaaatttcaatacttatttttccgtctattctccattatcgtttcaaaattttcttgcccccattgtttcaactgctctaaatgagggattaaagtttctccaaattcagatacataatattccactttgggtggtactgagggatatatttttctacctactaatccgtccgtcaccaatgaacgtaagacagtagaaagcatcttttccgatatagagggaattgttttgtatagttcattgaaacgtattactccattctcgtgtagtttcaataaaacgaccaaagcccatttgtctcccaaccattccagtataggggaagcagaacaataatcataatctaacttttttcgcattttttccgtccttgaatacattgatattgagaaaaactaactcaaacgtaagtggctgacagatagtatagttcttctttattcaaaaagaacgtcctaacttcgcagcacaaaaatacggaaaataacgaattccaagtgcttaatttataattatatggaactattacattttacgggacaagtatggcgaccaccatacgaagcaagttcccaactcttacaggtaacagccggatgtactcacaacaagtgtaaattttgtaatttatatcacggaacaaagtttcgtctatctcccattacggaagtcgaagaagatttgaaagtgatacaaagttaccagcccaaagcccgacgagtatttttaacgggggctaatccatttgtgctaagttataacaggctgctggatttaggtcttctaatcaggaaatatcttcgtcattgtgaaagtatcggtatgtttgcccggatttcagatattaagccaaaaacagtagaggaattgaagaacctgcgtcatttaggttttgacggtatcagtattggaacagaatcgggcgatgataatacattggcagtaatgaacaagggatatacggctaatgatattatcgagcaatgcaagaagttggaagaagcaaatatcagatataacctcgtgtatctgacagggcttgcaggaaaaggcaaaggagagcggaacgctattaatactgccaatgtattcaatcagttacacccatttaccgtaaactttgtatcactgaccgtattttccgaatcagaattatacgaggaaatacaacatggttcttttgtagaagctaccgaacacgaaaggttgttggaactacggacttttatttcaagacttcatataaaaacaactttattaggcaatacggtatcaaacactgttccgtttgtcggaatgatacctaatgatagagttagagttcttaatgaactggattcggctataaaaaatgctggagaaaaagaattaaggcgatatagagatagtattaggtctttatagatattctatgcaatttgtagataagatattgttccaaatcaatacagagatagaaaagctcggtatagatgattgtatgggcattgacagtgctttgcatatgatgcgttttattcagcctttatgtgatgaattgagaaaatacatattagcttatcagtttgctgatgaaacggaagaaatctctttttttaaggagtataagccggaagtattgagcaagtatttgtattacaataaaatatatgtcattgagagtaaatatcctaccggtagtgatattgcacaaagagagtatttatataaagaattggatagtttgacgttttatttcagtaggaacttggacttttatcagtattaccgttctaaatctacttatttggataggtattattttacccgaaaccaaaacgatttacgaatatgtacagacagttcccatattgataaagaccctctatattcaaccggatatgattttaaagtggctaaaattattaccaacgaactgttgaaaatctatttgactaacagattgcaagaattggagcgtattgtacagcgcaaagcggataacggacaggttgtagaaactattttgcgttggactggctctaaaagggcgttggtagaactgatttatgctttagaagcgaatggggattttaataaagggacggctattttaaaagaaatcgcagccatttgcgggattgaaaagaccttgacctaccatgtagcgcgccattcgtgcgccacttcggtgctgctcgcaaacggtgttcccattgaaactgtatctaagattttaggtcataccaacatcagaaccactcaaatttatgcgaggattaccgatttgaaggtaagtagcgacatggaaatattggctcaaaagttggatgttccacacaggactgccagccgatgaaactatgttatcgtcagataacagcaaggtgtgatttgtggcacacaaatctgttttccgtgccgcaaaacaccttgggcaaattcactccgaagtcgtgttgccaatgaaagaaagacattccctaactaaagattttttcgctcgtcgggacgggtggtcccgccccttgccgctgggcgttccccaaccgatgagtttatttttgtaattctgcaatcttgttttattgaaatattgatagcttgattgaaagcaagatttcagtatggcaggattgaatgaaaacaataaaccattcaatattgattgaaatactgaatggtttatttattacaagaatataattacttgcgaaaagaataaaactcgcatcatgtatcgttttcatccattcttcggagcagacttttttgcaatgtttccaaataccgagttctatttattttacggcttcgcatttccaaataagaatgatataaatcaccaatatctatactgaacacattttcaaaatatcctgcaatctcttttaaaataaccgtttgataggtgctactcgttgattataagtggtttgcgtaaaaagagaatattagaggtaacgattaagcaacggctcatttttccgatatttgcactgtgttttactcctctaaataacttatgcaaagatagcaattttctttgaatctgcaaaaatattcaaattgtgtaataaacgaaagcacgaggcttatgatctcgtaccttcttctcttttatttcttattacctttttcaggactgctttcgatgacgaacaggcaataagattaaaggattttatgcaagttacgaaaagagagggaacagaatcattccctgaatcatccgtatatcagtctgttgtgtttagactccaatatgagtacaccgaataaaccacagccgatctgcatcgttttaccctgttgcacttggttaacacaaagataagaaaattatgagataaatcaaataatttaaatgtggacttaatttcttttttgaacttgtttggttgaatcagcttgcatatgccgaatcgtaagttgtttgagccttaaatgacatgctttataggtacaattatcccatattttgcgaagttttggtggtaaaaatggggaaattcgttcccgtgacttaagccaagctatccaccgcttttgctcggtagtattttgatattcttcaaccgaagataatcggtttatctccacggtatcaatcggggcgtaatctcgatcgggaatgaaatctccattacacaaggacatataaaaatcccgtagcgacgcagcccgaattaacttcatctcctgccaatagttagcaaccgaataatctttgacttttatttctttcgacaaccatctcctgaaactcttatccatgagttcggcccaggttgcagcttcctttgcaaagagagttttgtatcgtagaactaatcgtttggaagattcaggcataggaaaatctgcgattccgatagtataatctccgggaaaatcccacgacggatcgtagtatttatcgaatatttgggaaatcttttcatattcgcgcaatcttccccaaagtcgttcattagaggcaacgctaatgttcaggtatttatatagagaatcattgtgatatgagtaaatagaatccaaagaaaagcgatggtgggataattttgcatattcttcaacgatggattgaccactccatgtttttaattgcggcagctctatctttagaatcggcacagtggctttggaaaaataaagatccgctatatcatcaggcccgttatgttcacgcaatacgatgatttgacgaaccgtatctatttgagaattgtgcgaaagccggttgagtggtacataatcctgttcgataagggtgttccctcggattttatatacctgatgataattgttggggagatagttttcccactcggaaatgagcagttcgtctttgccgtcaaaatccacgtcgagaaaccgaaaaggtggaggagtatatcccagtaaatataggctgtcctgccactcctctttggacgggtactcgaaatagtaaacatcgccatcataatatcccttgaaattgtcggcgtgagcaacttcatccgtattgaaattggcgtattcatcggaacttacatgaaatgatgcgctggaattcgtattccggaaattcatgacgatatatccatcccaactgtggatatcggaaagcatccagcgagctgtcacctcatagccttttatcggctgtttgtatttgaaatagacgttgattagactgccttggtcaatagtcggaggtagtggaatccggttaagtacaccaatccataccgaatcggcaggatcggtgcttttgacaaacttaagcggctgagccgattcttctatttcatcgagatgtgaggtagatgaaattccttgttttgctgtcttttcctgccgatggccgcaagaaaataacaacaatagcggggcaattaatattattggtttattcatcgaaggaaaagtgtggtacaatttacattgacgtattaaataaatttttctttttagcaaatcaggatgattataattcctaattagcatcacatattctgttttgtgtaacaagaaatattttgtcgcgttaaaataaattctaatacttttttctttttaacattttgtggagattataccaaaaataatactctaatttagatgcagcctgtgtattagcagattgcaataacatttttttgaatcttaaatacgatcctttcgttattgatatgcattttaatgaatcgttatatccgaaggctctgtcgccaattgaattaacagaagacggcatattaattgatttcaaatgactacacccccaaaatgcatacgatccgatataagacaagctttctggcagtttaaccacctctaaacgattgcaatgagcaaaagcattggcttcgacaacagataagccttggggcaattcgaccgtctctagaagtcgattatgctcaaaagccccctgcctaatgatcctcacggtttccggaacttggtaatgtctgagttcaaagctttgtggaaatcttatcaattccgtcatgtcttttgaaaacaaaactccctcaacggatttatagcttttgttatcacatatatatcgaagattattactaaactcaaaagcctttgcttcaagtttagttaaagactgaggaaaaacgatctcttctaaataatagcaatttgtaaatgcatcggattttaactcgaccacaccttctggaatacaatatctttcaattttttttgcttctggatacttaatgagtatttttagatcacctgaaaacaagatcccgtctatagatttataattaggactatcgcagtgtatgtcttccaccttgcatttatgaaaagcataatcatcaataaatataatagatgatggtatatttatttgctgtaaattacaattttgaaaggccccaaacccgattgattgtaaattatctggcagacgaatcgttttgatatggctgtttgcaaaagcatttctgccaataagtcgaacactatcaggtatttgcacctctaaaaaagatgtattctcaaaagccttatccgcaatacataggcaggtgtcggaaattgtatattttttttgcgattgtaatttgctgttttctttgttggacaaacaatgatatcttctaaaaagatctgttgccagcacttgtctgtataatctgccatgtgctgacaataatttcattcgatcgactgtataaaacacgccatccaaattgacataacgctgtttgtcatcgattgctgcattggtatttaatttaacgatgttaattaatttgacaatggggctataatctatttttgttgtaggaaggacatagatacttgatagtttgtcacatccataaaatgcgtatttatcaatttctacatgttgtcctaaaatagcgatggacttcaagttcttacagttggcgaaagctccagattcaatcgtatatacaccatgcggaatattaacatattgtaaacttcgacagccacaaaatgtattggacttaataatttgcaattttttaggtaatgttattttattcagatttatacaatcaaagaatgcagaccctccgatggtcgtaatactattcggtaaattgatttccgtcagttttgaacagccattaaacgcgcactctcccacatagcttactacgtgcgaaatattgactgattccagattttcgttataagcaaatgcacattgtccaatgctcgttatatcttcaggaactgtgtatatcgcaccttttctttgggctggatataatattaattcattaaactctttttccttaaattctgtttttccaaataaaacgccttctacagtcttataaaactgattattacaatatatatattttaaacgacgaggaggcagagaatacctttccaactggatagaaatggtgcgttctggtaactgaattgattctattttcgtataagcaaaagctcctagatcaatagataatggaatccatgaatttgatttatcgttaaatataacacgtttcaaattcctgcagttagaaaaagtctcggccctaatataagcaaccgtatcaggaataaaaatctgcattaaattttctccgccaatcgaattttcaatagcgacacaattttcactgacaactagattgcttattcgatctgaaacattctttaactccactgcttttccgaatgagaaaaatatagtttctgttttctgatacaaaatatcatcgtctgtaattggagaaccgtcgatagatgtagagcaaagacgtttagctgtatcttgcccttgattccattttatacaataaaattcgttaatatacttccatacaacatctttatcattgattatcattatgttttctctattactttgagcttttttagtccaattgtatgaaccgctgataactaacttttcgtctattatgcaaaatttattatgcataactcctccatccatactgattttatgaatttctccaccaaaagatattagtaggtcgtgcgctttattatattgattattgatatcgtcgttctgtaaaataagatcaacaaatatcccttgttttgctttatttaataaaacatcaaacagtgacatatctgtcagccacgccattgctatatatattgaagagcacgaagatttgagataatcaataatccgattttgaatattatcgaaatatacatccataaataaaaaaataaattaatttcacagaaaaatctgcttgacatttttcacactaaagaacaaaaataatcatttttccatttgcgctaattcataaagcaaagataccaaaggaaagctcgcattttcatttctgcaagtcttgcagaaatgaaaaatatctcggaataatttcgtattttgcagaaaagaatggattatgcagcgtcgtaccctcaccttttcaggcagatgtccgcaattcttggcatcgggaaacatctattatctggaacctgaatattgcgaaccgtatcatgtctatattcgggcgcattttcatgaattatcggaaatgctccggattaaaaataggtcttttatctactatggccaaaaaccggcaaccgaaatattgagctacaattatcccggagaacatcgaacgactaagacgggagaatgctttacagccgatttaacccacagattattcaaccggctgaaagtgccgtgcccggacaaaccgatgttgttgactgatgcgtacgaccttaaaagaggacagggaaagattatctgtgtctttccggataaaccggacgacatcgcacggcttctgcaaaatgcagaagaccatacggttctcaatagtttatgcactatcgaacctgcgtataagcattcggatgaagatgcggatcgagacttctccgaaatcgcctatcggctgacgatggaggtcgaaaagaatatcgagatactgcaacggtatgggtatgatacgttgttgcgagagattctggacatgcaccaaccgcagttaagccgtatggagataacggcggactatcgtatttttctgccggactacggaaatatggagatcaagatgacaccgttggccaaggctgtttattttctctttctggattatccgcaagggatcatgttccgggatttaagcaaaccggaatatatgcgaaaactcaatttcatctataaaacattgtcgaaccggagcgattatatgaaaatacaggacagtatttttaaaatttccaatcaccggaacaattcgatcaatgagaaatgttctcgtatcagagaggcattcgtctccaagtttaccgataatctcgccgcaacctattacattaccggttgcagagatacccccaaacgaatcgaactggatcggaagatgataacatggcagggctatccctatgatccggagttgtggaacaagcgaatgcaatacggaaaagattacgatgaaatgattgctttcgagcgccgagaagcggaattgaatcgacagattcgggagtcattggactatttatcagatatttttggtgcaaaatgaagctacatacgtttccctaaacttttggttccttctatgtctatccctattttctggtaaaattcctttcgttgttgtttgaaccactcgtcgccgtcctttccgtttatggtgaatcgaaacccgctcggcccgtccttgtcgggtttgagttgcaggacaatatcgttcgcccgaaacgtatgattataccttatcgagtgcagttctcccgtgtatcggtagggttgcatcgtaaacaacgctcttgtcccctccttgtccagtcctacgttcttacaatagttttcccattttaacagcccctttacatacggacataaatcatcgacacgcatcagggcttttatgacttgttgtgcttcttgtttaaggtcggccacctctttatcgtgcccggcctgtatcgtcgctatttcccgttgcaggctctttatatctttatctttgccctctatcgcgtcccgcaagtctgcgatctgtttttcatacctcgcgggcttcgggtcgtggaacaatgccccgattcgttcgaccgcctttgtcgtggcatctactgccacgccttttaatttgtcggttttgatctcgcgccggggctgcgtcagttccgaccgtacggcctcccgctgtgcctgcaaagcggcaatatcgaccgttagggtttgtcgctgttctttgagattctcgacctgctcggcgatttcgttcttgcggacgaatacctcgcggtaatattgttgggtagatatgtgtttggcttccgatccctcgacgccgcgtcgcagtccgtatttggccatcgcttcggcataggtggtctggtaggctttgagtttgtcccgtgccatcacatcgtcggcgcatagacgcgggcggtctttcttagtgcggtaggttctctttccgcttcgggcgttcttctcccgctccagcttggcctttctgcgttcgccccgtgtgatcggcacgacggtcgcgtggatatgcggcgtcttctcgtccagatgcaggacggccgacacgacgttttcctttccgaaagtcttttgcagccagccgcaggaatccttggcccaagcattcaactgcccggcctgccggatacgcttcatatcttcggggcttccggagagcatgacacgcagggcacgcacttggttctttccgatcttgcgttccagtcctgcattgtccagccggtgctggatcgcttcggtgcggttggtaactcctttggggaactctaccaattcttcattgaggtaggtaagtgtcgttatgacgttggcgggtgcgattctccgctcgacgtgtcccgacatggcggcgtccgttccggccgccttttcgatatgtaatacgacatagcccatagcggtatggtttgaagtgggtgaataatcggtgacggtcgggggtgtccagaggggccgcggcccctttggcctattggggcattttcagcgttgcggagcaatgcggaaagaaaatgccctaataggctatgccttttgtaaaaaggcgcgggcgcgaagcggccgatctgtgggcgacggtgccggcgtcatgtccgtcagcaggagcgggcgatgaaagaaaaccgacggcccgcaagcccgtgcccctgtgcgcccggagggatccttcgaaaatcccatagggcgcacaagggcgtacgggctgttactccgccagacggtatttgtcgcccaaacgttcggtaagcgccgacatgtcgcggcttatcttttcattggtgatcttcgcatagatttgggtggtgagaatattggtgtgccccaacatctgcgatacggtctccaacggtacgccctgcgagagcgtgacggtcgttgcgaacgtgtggcgggccatatgcatcgtgatatgctttttcaacccgcaatcccgtgcgatacgttgcagtgtgcggttcatgttgtcgcaggccgacggcacgggaaagacgaggttgtttttcgatatgggacggtagttttcgatcagttgtttggcaataggcagcagtttgatatggaacggcgttccggttttctgacgatgtgcaatgatccaactgtccccgtcgaacgaggttttaatatgatcgaaggtcagtttcttcacatccgaataagacaaaccagtgaagcagcagaacacgaagatatcccgcacctgccgttgcttgtaacgccgcagttcggcgtgcatgaaggtttgtaactcctcttcggtcagaaacccccgatcccggtattgtgccgtgcaacgaaaccccataaaaggattgtaggatatatagcgtttacggatggaataaaggagcagttgtttcagtttggtaatggctccgatgactgtccccgaagccaaagagcgcgtaacggtcagataatagtggaaatcctcgataaatgacggcgcgatctcccgcagcggaatatccgacagggaatatttgtcgcgcaggaaccagacgatccgcttgtggttgatacactgctgttcgtatgaacccggtgtgcggtctttgccgacccgcttgccgtattcgtcgagaaactcctctgcgacgctcaacaatgtgcggtattcgtcgccgaaacccagataagcgtttttaaccttctcggccgatacgaaattatccgttacggcgatcttgtcgtattgtttgatgatgagtgcacggattttgtccagcttctcgttgatgcgctgggcaaccgtacttttcccggcggctttgttggctttgacatcccaaagtcgcggagcaatggacaatttgcaactgaactgcgcaatcgtaccattgacggtgatacggcccataataggagccatgccgtctttctcgctctgacgtttgaggtagaataaaaccttgaatgtgctgcgtgccataataactttgttttgtgagggacttgtaaaacgtaaatcaaagttatttattgcagagaaggcaagtgcaaattcgtgaaaagcagtactttacaaagtatctcttaaaaattgggcaggtaacgatttggaaacgcaaatagctgtaaactttgcttttttgtgcattcattcgtatcgttgtttattgcctctttatttttaataaactattaaccaatattttacactctaattctctcccttgcccaatcaacggttgtttctttcaagtaatcattcattttctgattgctgataactggtaaaatcttaccggttggcaatttatgtttgtacttttccaatatggctttgggtatatccagcaatcggacggtagatgtaacatttgttttgtgtcttttccgtataatccacaaattaccgtcaaatccggtgcgaatgtcctcctgccttaactcgcatacatcaatgtaggaaagtgccgtgtaacaactgaaaatgaacaaatcacgtacctgctccaaccgtttagagctaaactcgtggttgtaaatggtggtaatttcttccatagtcagataatccctatcggtacgttcaaaccttacccgataactcccgaaagggtcggcagtcactaaccccgtattcttggcaaagtttactaccgtgcgaaaacgttgtacgaacttcatagccgtattatggctgcacccatagttattcttgatatacaacaggaaatcttcaatgaataccacatttatatctttaatgagcatatcggaaacggagtatttaaacttcataaacttcataaactccataagccgtttctttgtcagttcataacgtgagtaggttttgtctgtggtattcattttaaccttttgcaaatactgttcgttgtgctgtttgaagaactctatcaaagtccgttcccttgctatcttgcctaaaaaagcgttctttaccagttctgcggttacatatccgtcttgcgccattaacgcatggtaatgttgatgaactgtgctacgaatactttccagcatggaattgatatgtacggcttctgcggttctgccggaagccttgcctaattccacgctccagtgagccggatttatttccagcttggtgttaaactgggctacaacttggtcaatagtgatacgtgcgataatcggtgcgttgccgttcttctttactgcatttcgtttgacgaaatagagtagcttaaaagtacttctcataatctctttttttagttacaaacttaaattgataaactgaaaatgagatgtttgcagtgcggacaaatcaagacaacaaaccgccaatttgggacattccgtgacctaaaatcttagagggtggacaggtcacgaattggtcacgaaagtgtgtctttttatgaccttttcgtgtcttaggtcacagacattatacaaagaaaaactcctacaataccttgatattgtaggagttatacatttactgtccatttctgtccagcgtttctgtgatcccgctggggctcgaacccaggaccccaacattaaaagtgttgtgctctaccagctgagctacggaatctccgtgtgccaatcggaaattactttccgttttggtggtgcaaatgtatagaatatttttgttttaccaaaataaaacgatatttttgtactcgttaatacgaaaaaataaactttaaatccacaatacctatgtgtagagcgctaattatcggtgccggaggtgtcgggacggtcgtcacccagaaaatcgcagccaatcccgtcttttcggacgtgatgctggccagccgaaccaaatccaaatgcgatgccgttgcggcggccatcggcggcaaccgtgtgaagaccgcccaggtcgacgccgacaatgtgccggagctctgcgagctgttccgcgcgttcaaacccgacatcgtcgtcaacgtggcgcttccttaccaggatctgaccatcatggacgcctgcctcgaatgcggctgcaattacctcgacacggccaactacgaacccaaggacgaggcccatttcgaatattcgtggcagtgggcctaccaggatcgtttcaaggccgccgggctcacggcgatcctcggctgcggtttcgacccgggcgtgacggccatcttcacggcctatgccgccaagcaccatttcgacgagatccactacctcgacatcgtggattgcaacgcgggcaaccacggcatggctttcgccacgaacttcaatcccgagatcaacatccgcgaggtgacgcagaaagggcgttatttcgagaacggcgagtgggttaccaccgagccgcatgagatacaccgtacgctcaattacccgggtatcggcgagcgcgagtcgtatgtgatctaccacgaggagctcgagtcgctggtcaagaactatccgaccattaggcgtgcacgtttctggatgaccttcggccaggaatacctcacgcacctgcgcgtcatccagaacattggtatggcgcgtatcgacccgatcatctataacggcgtcgagatcgtcccgatccagttcctcaaggcggtgctgcccgatcccaagtcgctgggcgccaattaccacggccagacctcgatcggctgccgtatccgcggcatcaaggacggcaaggagcgcacctattatatttataacaattgcgaccacgaacaggcctaccgggagaccgggacgcaggccgtcagcttcaccacgggcgtaccggcggcgctgggcgcgtcgatgtgggccaaggggctctggcgcggtgccggcgtgttcaatgtcgaggagttcgatcccgatccgttcctggccgagctcggtcagcaggggcttccgtggcacgaactgttcgacgtggacatcgagctctgacgcgcagggcggtaaattcccaaaaaggggatcggttcatgaccgatcccctttttccggtcttattatgccgttttttcggtcgcaacgtgaaacttgtaccctttattgtattatatatgatacatttttattatatttgggcgtcaattaacccatttgaatagtatgaaaatgaaatgtatcctatgtgccgtcgccgcacttgcgatgtgctcgacatccctgtccgctgctcctgcggaggaaaaagagaaagtggagtttaaacgccattggttcctgcaggtacaggcgggtgccgcctatacgctcggcgaagtggatttcggcgagctggtatctccggccgcagcgctgtacgccgggcaccggttctcgcccgtatggggtatgcgcttcggcctgagcggctggcagagcaaaggcgcctgggtctcgcccgagtcggtctaccagtataaatatttgcagggcaacgtcgacgtgacgctcgacctggccaacctgttcggcaagttcaactaccgccgcacggtcaatccctacctgttcgcgggtgtcggtgtgaacggggcgttcgacaacggcgaggccaacgccctcgacgaccagggctatacgctccagaacgtgtggtcgggcagcaaggtcttcgtggccggacgcctggggctgggcgtcgatttccgcttttcggactgcgtgtcgttcggcgtggagctgaataccaacatgctttccgacaaatacaactcgaagaaggccgggaacctcgactggcagttcaatgcgctggccgggttcaccttccgcttcggcaagaactataagaaatcgcgcccggcagtcgccgccgcgcccgtaacccccgcccggactaccgagcccgcccaaaaggaggaacctgccgtgcaggagcccgctcccgtgcaggctccggtgacgaaggccgccgagaagccggcagcactgcgtgaaaatatcttcttccgtatcggttcggcgcagatccgcacctccgaacaggcgaaggtcgcagcgcttgccgagtacctgaaggccaatccttccgcccggatcgagatcgtcggctatgccgatgccgctacgggttcgcacgccctcaacctgaaactctcgcggcagcgtgccgcgggcgtcgcagcggcattggaacaggccggcatcgctgccgaccgcatctctgccgagggcaggggcgacaccgtccagcctttccccggggtcgaacagaaccgtgtgagcatttgcatcgcccaataaacagggcggggcagtgtcccttgcggcggcagatttcctgccgccgcttttttttgccccgcatttccgcctccgcctcctcttttcacggtctacgccaatgtcttgccgtccgccgcgcatgtctgtcctgtgtgtcgttttgccgttcgcgcgccttccggtcgccattgcgccggccgtttcttggccccgtccgccgcgtttcccgcctgtacttctgccgtgtctttcagccgcaggccgcaagacggtaagtataaatacctatttcgccgaaattcccccgcggggcgtcatggtttagccggtaatttgctatttttgcatcgttttgagcgtctccgccgtgccgggcagcaccgtttccgggcggaggggacgagggatcgaatccaattgaaaacatttcgatgattgacttcttgaagctgccttctccgtgctacgtcctcgacgagacgttgctggatcgcaatctggccgtgatcgaccgcgtgcgccgcgagtcgggcgccgaaattatcgtagccctgaaggcctgcgccatgtggagcattttccccgagctggcacgccattccgacggtgccacggcgagttccgccgccgaagcgaggcttgtattcgaggagtacggcaagcctgcgcacacctacgctcccgtctataccgaccgcaatatcgatgagatactccgttgcagcgaccatatcaccttcaactcggtcgcgcagttcgagcgcttcgggtcgatggcgctgttgcgcggcatttcgtgcggcctgcgcatcaacccgcagtattcgcccgtggagaccgacctttataacccttgtgtccccggctcgcgcctcggcgttacggccgatgaactgaacgatcttcccgccgggatcgacgggctgcatttccacgtgttgtgcgagtcgcgcccgcaccacctgaagctggcgctggaagccgtcgaaaagcatttcgggcagtatctcgaccggatcgggtggctcaacatgggcggcgggcacctgatgacccacgccgaatacgactgcgacgagctgatcgccctgctgcgcgatttcaagtcccgccatccccgtctacggctgatcctcgaaccgggcagcgccttcacctggaggacgggctgcctcgtctcgacggtcgaggacatcgtcgaaaatgccggcgtgcatacggcgatgctcgacgtgtcgttcgcctgccatatgcccgactgtctcgaaatgccctataaaccggccatcgtcggggcgcacgaacccgccgaaggggagaaacgctggcgcatgggcggcacgagctgccttgccggcgactactgcggcgactgggccttcgaccacgaactgaaagtcggcgagcgcatcgtcttcgaagatatgatccactatacgatggtcaagaccacgatgttcaacggcgtggcgcacccctcgatcgtcattgcccgccgcgacgggcgcacggacgtcatccgcgaattcggctacgaggatttccgcaaccgcatgtcgtaaattacacaaacgcatataaatgaaagattttacacctacctcctacacgctcgaatgtgtcgctacggggcgtgagttcgaggacacgggctggatgctctccgatccgcagtgcaagacgccctcgctcatccgtgcgaaatatgcccgcaggcagctcgaagtgaaacccgccgaatacggtctttaccggttctgcgactggatgcccgtgcggcgtatcctcaagggctcctcggcgcccgtcacctacaaaagcaaggggcttgccgcccacctcgggctggaaaacctctggatcacgttcaacggctactatccggccatcggtgccacgatgtctacctgttcgttcaaggagaccgaagcctattcggtctgcgggcgtgccgccgaacacgaggatcgcgtccttgtggtcgcctcggcgggcaatacggcccgtgccttcgccaaggtgtgttccgacaacaatatcaagctgctcctgtcggtgccttacgacaatatcggggcgctgtggttcgagcatccgctcgacccctgcgtgaaactcatctcgtgtgcggcgggcggcgactatttcgacgccatccacctgagcgacctcgccctcaaggggcccgggttctatgccgaaggcggcgcgaagaacatcgcccgccgcgacggcatggccacgacggtactttcggccgtgacgaccatcggccgcatccccgactactatttccaggccgtgggcagcggtacgggcgccattgccgcctgggaggccaacatgcgcctgatcggggacggccgcttcgggacgaataccatgaaactcatggtgtcgcagaatgcgccgttcgtgccgatgtacgacgcatggcaggccgattcgcgcaagatgctgccctacgaggacgacaaggcgcgccgcgatgcggagatcatcgacgccaaggtgctctccaaccgccgcccgccctacggcatcaccggcgggctttacgatgcgctgaaagccacgggcggagagttcttcgtctcgacgaacgccatggcgcgcaaggcgcgcaagctcttccacgaactggagggcgtggacatctactctgcggcgggtgtcgcattggcttcgctcatcaatgccgtcgccgcgggcaaggtcgaaaaggacgccaccgtcatgcttaacgtcacgggcggcggtgaggagcatttcaaggagggcaaggagctctggtacctcaagcccagccatgtattcccgctcgaacccgacacggacgacgtggtcgccaaagtcgaggcgctcttcaactgatccccgatacgatccggctccggccggatctttttttcgggccgtcgcgtcccggatgccgccccgcggcaagggggcggcagctccgtactttggccccgtttcccgtccgctgcctcgcccgtttcacggcgcctgccgcatgtgccggtgcattttccggtgccgggaaagaaaacggccgcaaaggccggaatactgccggaaactattatctttgcagcggtttccggagggcggcgcgcagccgggcctctcaccgggagctccgatttttttttattattaacccaacaaattcaagatgaaaaacatccgaaccaagcagactccctgcttcaggcgttggagccgcaagggctgggcagcctttgcgagcctgcaccgccatgtaaccatcggagtcctcgccgtgacgatgtcgatcctcttgctcgcgacgcaacatgcgtctgcgcacgatgccgatacggccgccgtcctcaaaacgctgaggatcgacgaggttggcatttcgggcagccagtccgccccgacgcgcaacgtacagtcgcaaaccccgcttttcgaccggaaagcacaggccgcagcgcccgtccagaccctggagtccgccctgcgcctcgcaccttcggtcgatatccgcgaacgcgggggcaagggcatgcaggccgacatcttcatccgtgggggctctttcgaccagaccatggtacttctcaatggcatcgacttcaccgatgcccgcaccgggcaccagtcccattcgctgcccgtcgacatcgactgcatttcggccgtcgacctgttggacggcgtgccgggcgtcggggcctttgccggggcggtgaatatccgcacggcgcccctgaaacccacctacctgcgtttcgagggcgccggcggccagcacggctacgcctatgcgaacctttcgggcgccgtgacttcgggccgtttctcgctgctcgccgccggttcctaccgtcgcagcgacggctaccgccacaataccgacttcgccaattacaacgctttcgtgcgtgcgacctacgaggctccacgcgccgggttcttcgacctgcaggccggataccagaatcgtacgttcggttccaacggcttctatgcggcctataaccccgaccagtgggaggcgacctccacggcattggcgtcgctgcgctggttgaaacaggccgggcgcttctcgttcggcgcttcggcgagctaccgcaagaatttcgaccgttacgactggacgcgcggcacggcgatgaaccgccacaataccgacaacgttggtgcccggctgtgggccgattacgactggcgggcgggtacgacctcgctcggcggcgattatgccttcaaccacatttacagcaccaatctcggcgaggcgctctcccggccgcacggccgctacgcgcacgccaaggcgcgcagtacgggcaacctctggctgcgccatgccaaacagtggcggcggttcgacctcgcggcttctgcgggcatcagcctcacgccctatggtacgtcggcgctgtggagcctctcgggaggctatacgcccgccgcggggctgcacctcggcatcggggcgttccagtcgatgcgcctgccgaccttcaccgacctttactatacttccccggcacagatcaacaaccttgacctgacgccggaaagggctgtcacttatctgtttgatgccggttatatgaagaacaactggaggttgtcgctgcagacctactaccgtgccggccgcgacatcatcgactgggtgtggcgtgaggatatgggcgacaagtggcactccgagcagaccagccgcctcgacacctacggcatcgagctttcgggcggttatacggtcgccgacggctttctgcgccgcgtgacgctttcctacggttatattaccaccgaccgcaacagcgacatcatcgccaagggggcgatggattacatgcgccacaaggcggcgctggccgtcgaggtgcatttcctgcgccgcatgtcgctggcactcacggcgtcggtctacgaccgcaacggcagctacacgcactatcccgtgccgggcgatccgtccctctccgaggtgcgcgattacgagccttattttctgctcgacggccgcctccagtgggagaaaggcatctgccggctttatgtcgatgcgacgaacatcaccgattcccgctactgcgacctgggcggcatcccgctgcccggggcgtgggtcacggcgggcgtagcgctgaccatcggccgctgatacgctcccttccggctgcattcctgcccgtcgcctcgcgcggcgggctttttttgaggctccggccgctcgccccgagcccgagtgacgggcaatatccgttgccttatctcgctgcctgcttgcgcggcgggcttttttgtcgtttggctgccggtcgtgcgcagcgtttcttcggggctttcgccgggacgggcagcggtttcggggagggtattccggcccccccccggtttttcctgcgccgcaaaacccgccgctcgctttttctccctgcgggaatttccggctccgtgcccgcctctcctgcggaaaaaccccggaaactgctgtttcagaatccggagtggcttttttcgttacgattttttcgtatttctcccggattttctttatctttgaaagtataaatctaacctcattacctatggaaaagcgtatcgtggagtgtgtccctaatttcagcgaggggcgcgacaaggcaataatccgtcagatcacatcggccatcgaatcctccgggggcgtcaagctgctggacgtggatcccggcgaggcgaccaaccggactgtcgtcacgtttgtcggctcgcccgaagcggtcgtcgaagccgcctttgcgggggtgaagagggctgccgagctgatcgacatgcgccgtcacaagggtgcgcacccgcgcatgggggctaccgacgtgttgccgctgattccgatttgcggcatcacactcgccgagtgcgccgagctggcccgcaaactggccgaacgtatcgccgctgaactgcatgtcccgacctattgctacgaggccgcggccttcacccccgagcggcgcaaccttgcggtctgccgtgccggggagtacgaggcgttgcccgagaaactggcgcacaaggagacggcccccgatttcggggcgcggccgttcgacgacggggtagcccgcacgggtgccacgaccgtcggtgcgcgcgatttcctgatcgccgtgaatttcaacctcaataccacctccacgcgccgagccaacgccattgcgttcgacgtgcgcgagaaggggcgccccgtgcgcgagggcaaccccgtcacgggcaaggtcgtaaaggatgccgctggcaatcccgtcatgcagcccggcacacttccggccacgaaggctatcggttggttcatcgaggaatacggcatcgcacaggtgtcgatgaacatcaccgacatcgccaccacgccgctccacgtggccttcgacgaggtgtgccgcaaggccgacgcccgcggcgtgcgcgtcacgggcaccgaaatcgtcgggctcgtccccaaacgtgcgctcatcgaggccgggaaatatttcctgcgcaaacaacgccgttcgacgggtatcgccgagcaggagatcgtccgtatcgccgtcaggtcgatggggttggatgacctcaaacctttcgaccccgccgagaaagtaatcgaatatctgcttgaagcggaggataagcaaaaacggcttattgacatgacctgcaaagggtttgccgaagagactgcgagcgaatccccggcaccgggcggcggctcgatcgcggcctacatgggagcgctgggcgcagccctcggtacgatggtcgccaacctctcgtcgcataaggcggggtgggacgaccgctgggaggagttttccgattgggccgaccggggacaggcgttgctcggagagttgctgcacctcgtggacgaggatacggcggcattcaaccgcatcatggccgtcttcgccatgcccaagtcgacggacgaggagaaggccgcccgcagcgcggccctgcaggaggcgacgctctatgcgacgcaggtgcccctgcggacgatgaagacggccttcggggttttcgaaatcgtgcgtgccatggcagccgtcggcaaccccaactcggtgtccgacgcgggcgtcggggcgctggccgcccgcagtgccgtgcttggcgcaggcctcaatgtccggatcaatgccgccgggctgaaagaccgcgccgcggccgatgcgctcgtggccgaagccgaccgccttgcggccgaggccgaacgggccgagcgcgaggtgttggagatagtagcaagtaaaatctgagcgatatgacactgcaagagttccagaatgacatccgcgcgggcattcccgaccggctgcccgccgctaaaccctatgacaaacagatcaaccacgcgcccaagcgcaaggggatacttacgcccgaggaggaggtgctggcgatccggaacgcactgcgttatttccccgcgaagcaccacgccacgctggccagggagtttgccgaggagctgcgcaaatacgggcgcatctacatgtaccgcctgcgtcccgactacgagatgtatgcgcggccgatcgacgaatatccctgccgctgccgccaggccgcggctgtgatgctgatgatccagaacaacctggataaggccgtggcgcagcatccccacgaactgatcacctacggcggcaacggcgccgtgttccagaactgggcgcagtaccgcctgacgatgaagtacctgtcggagatgaccgaccgccagacgctggtgatgtactcggggcacccgctggggctgttcccgtcgcatcccgatgccccgcgcgtcgtggtgaccaacggcatggtgattcccaactattcgaagcccgacgactgggagcgcatgaacgccctcggggtgtcgcagtacggccagatgacggccggctcctatatgtatatcggtccgcaggggatcgtccacggcaccaccatcacggtgatgaacgccgcgcgcaagcgtttctccggcggccgcaacgatgcccggggtatgcttttcgtctcctcggggctgggcggcatgtccggggcgcagcccaaggcgggcaatatctcgggcgtggtgagcgtcatcgccgaaatcaaccccaaggcggcgcagaaacgctacgagcagggatgggtcgacgagatgtacgattcgctcgacgccctggttccccgtatccgcgaggcctgccgtgcccgcgaagtggtctcgatggcctatgtgggcaacgtcgtcgacctttgggagcgtctggcggccgaagagatccccgtagacttgggttccgaccagacctcgctgcacaatccctgggcgggcggctactatcccgtggacgtaagctacgaggcttcgaacaagatgatggccgaggagcccgcccgcttccgcgagtgcgtgcaggagtcgctgcgccgccaggtcgacgccatcaacaaactcaccgcgcgggggatgtatttcttcgactacggcaatgccttcctgctggaagcctcgcgcgccggggctgccgtgatgggcgagggcggccgtttccgttatccctcctatgtgcaggacatcatggggccgatgttcttcgactacggcttcggcccgttccgctgggtctgcacctcgggccgccccgaagacctcgagcttaccgaccgcctcgccgccgaagtattggaggagatccgcgccacggcgcccgccgagatcgccgggcagctcgacgacaacatccactggatccgcgaggccggccgcaaccggctggtcgtcggttcgcaggcgcgtatcctctatgccgacagcgaggggcgcacccggatcgcacaggccttcaaccgggccgttgccgacgggcgcctctcggctcccgtcgtgctgggccgcgaccaccacgacgtgtcgggcaccgactcgccctaccgcgagacgtcgaacatctacgacggctcgaacctcacggccgacatggccgtgcagaacgtcatcggcgactcgttccgcggcgccacgtgggtgtcgatccacaatggcggcggcgtaggctggggcgaggtcatcaacggcggcttcggcatggtggtcgacggctcggaagatgccgaccgccacatccgggagatgctgctgtgggatgtcaacaacggcatcgcccgccgcagctgggcgcgtaacgagggtgccatgtcggccatccgccgcgagatggaacgcacccccggcctgcaggtcacgctgcccaatgtcgccgatgaggaattgatacgtaatatattgaaagaaaacgaataaatccctatcacttcacatggaacatcaccatatctccgcggagcacctttcccttgcccgcatccgtgaaatcctcgaacggcaccttcccctggcactgagcgacgatgcccggactcgcatcgtccgctgccgcgaatacctcgaccgcaagatggaaaaccccgagcggccggtctacggcatcaccaccggattcggttcgctgtgcgacatttcggtgggctacgacgagctggcgcaattgcagaagaacctcgtgatgtcgcatgcctgcggtaccggcgagcgggtgccttccgaggtcgtgaagctgatcctgctgctcaagatccagtcgctctcctacggccattcgggcgtgcagcttgcgaccgtggagcggctgatcgactttttcaacaacgacctcctgcccgtggtctaccagcagggttcgctgggcgcatcgggcgacctggcgccgctggcgcacatgagcctgccgctgctggggctgggcgaagtggaatacaagggggctgtgcgcccggctgccggcgtgctggcggagctggggtggcagccgatcgagctccagtccaaggagggactggcgctgctcaacggtacgcagttcatgagcgcctacggcgtctgggctttgatccagtcccgccgcctgagcgagtgggccgaccgcatcggggcgctgtcgctcgacgctttcgacgggcgcatcgagcctttctgcgacgaggtgcacctgatccgcgcccaccgcgggcagctcgccacggcacgcaacatccggcgcctgttggaaggcagccagctggccgcacgccccaagaaacacgtacaggatccctattcgttccgctgcatcccccaggtgcacggggcttcgaaggacaccatcgactatgtcgagagcgtgctgacgaccgagatcaacagcaccaccgacaacccgacggtcttccccgacgaggacatggtcgtctcggcggggaatttccacggccagcccatcgcgctggcgatggatttcctcgccatagccctcgccgagctgggcaacatctccgagcggcgcacctataaactgatttcgggcgcccgggaacttccgaagtttcttgtcgccaacccggggctgaacagcggtttcatgatcccgcaatacaccgcggcgtcgatcgtcagccagtccaaagggctgtgcatgcccgcctcggtcgactcgatcccctcgtcgcaggggcaggaagaccatgtgagcatgggctccaacgccgccaccaaactctaccgcgtggtgctcaacaccgagcgggtgttggccatcgagctgttcaatgccgcgcaggcgctcgacttccgccgtccggcgcgttcctccgcgacgatcgaacagatggtcgccgagtaccgcaagcgggtgccgttcatcgacaacgactcggtgatgtacccccatatcgaatcctccatccaattcctccggacactatgaggctgctggtaaagaacatcggtacgatcgtcgggatcgagaccgccggccgcctccgcctgtgcggcggggagatggatcggctggagacgttcgacgatgcctggctgctctccgacaacgggcgtatcgcagccttcgggagcatgaattcgctgggcgagatggccgcggacgaggtggtcgacgccgggggcgggatgcttttcccgtcgttctgcgattcgcatacgcacctggtctatgccgggagccgcgaacaggagttcctcgacaagatcaacggcctgacttacgagcagatcgcacgccgcggcgggggcatcctcaattccgccgacctgctgcaccgcacttccgaagaggagctctaccgccaggcgatggagcgtatccgcgagatcgccgccatggggacgggtgccgtggagatcaagagcggctacgggctgactacggccgacgagctgaagatgctgcgcgtcatccggcgtatccgcgagacggcgccgctggccgtgcgcgccacgttcctcggggcgcatgccgtgccgcgcgcctacgtcggacggcaggaggagtatgtcgacctggtctgcaacgaaatgctgcctgccgtggcggccgaaggactggccgatttcgtcgacgtgttctgcgacgaagggttcttcaccgtggagcagacggcacgcatcatgaaggccgggcgcaagctgggcatgcgagccaagatccacgccaacgaactcgccgtctcgggcggcgtgcaggtgggcgtggagtacgacgccctgtcggtcgaccacctcgaacgcatgggcgggcccgagatcggcgccctgcatggcacggtgacctcgccgacgatgctgcccggcgcggcattcttcctcgggatgagctatccgccggcccgcgaaatgataaatgccgggctgggcgtggcgctggcttcggactacaatcccggttcgtcgccctcgggcaacatgcgcatggtcgtctcgctggcatgcatccgtatgcggatgacccctgccgaggccatcaatgccgcgacgctcaacggggcctacgccatggggcttagccgcgactacggctccgtcacggtcggcaaggtcgccaattttttcctcacggtgccgatgccttcggtggcgttcttgccctatgcctataccacgccgcttatcagccgcatattcctgcgcggcgaggaggtcgtggcgtaatatttgacgggagagccgtatgagattgttggttttgatcattggcctggcgcttgccggggccgtaaaagcacaggatatgaagccgttgacaccggaagaaagacgtgtgatcgtcgacaagggtaccgaagcgcctttttcgggccgttattacaagcatcgcggagagggggtttaccgttgccgccagtgcggtgcgccgttgtaccgttcgcaggacaagttcgacgccgggtgcggctggccgagtttcgacgacgaaatccccggtgccgtgaggcgcacgacggatgccgacggccggcgtaccgaaatcacctgtgcccgctgcggcggacacctgggacatgtctttacgggcgaaggctttacgcccaaaaatacgcgccactgcgtcaactccgtctcgctcgtgttcgaacccggaggggaagcttcctccgggtcagaaacggccgtaaaacccgcggtttcctccccggaatccgaaggccgggctgcctcgcagcccgaaaagcagacgccgccgcagcccggaacccaatccgggaaccccggcgctcaggcgtccggggctgacgcgacgtcggccgccgcccggccgggggacgggataccgcccgcagggcaggccgcggagcgtggcgcgacggcgatctttgccggagggtgtttctggggcgtggaatatatgctttcgaaagtgcccggagtcctgaaggtcgagtcgggctacatcggcggcacgaccgaaaatcccacctatgaagaggtatgcagccaccgtacgggacatgccgaagccgtacgtgtggtattcgatcctgcaaaggtgtcctacgagacgctggcacgcctgttcttcgaaatccacgacccgacccaggaaaacgggcagggccccgacctcggcgatcagtaccgttccgagatattctacacctcgcccgcccagcaggcgacggctgagaggctcatcgccgagttgcggcgcaaaggctacgacgtcgtgacgcaagtcacccctgcgggccgtttctggcccgccgaggattaccaccagcgatactacgagcgcaagggtacgcagccctactgccacgcctataccaagcggttttgagcctgcgccggacttgccgtcgcattgcgcccggccttccatgcccggacatactgttgtgtcgtttccgcctctgttatgtcctggacttgccgccgcatagcgcccgccgccggggcattttcgattccgatacgattgtaagacaccccgcctcacagcggggtgtcgtgctgttcgggcgcaatcccggcctggggcgatacggggcctcggcgccgaagggttttgaaaatccgctgcggcgaaacgctcccggccgtagacagattgtcttccggccgtgaacagattgtcttccgtccgtggtcagattgcctttcggccgtggattggtcgccttccgtccgtggacaggctgccttccggctgtggacaggttgctgtgttttaggtagttgctgcctgaaaggcctattctgcggtgagcttcccgatctcgccccgcatgatatggggcaggttttcgcggattttcccgatgggccagtcccaccatcgcagctcctgcaacctggctatggtgtccgcgtcgaagcgcctgcggatctccctggccggcacgccgccgacgatggtgtagggcgggacatcccgtgtgacgaccgcccgcgccgcgatcaccgcgccgtcgccgatcctcacaccggccatgatgaccgcttcgtacccgatccatacgtcgttcccgattacgatgtcgcctttgttgtcccacgccgcggcgacatccttcctgtccagtccccactcctcgaaaaagagcggaaacgtatagttggccagcgatcccagcgtgtggttggcactgttgaacaggaacttggcgccgcacgctatcgaacagaacttgccgatcaccagccggtcgccgttgacggggtagtggtacaggacgttgttcttttcgaattgcgtcgggtcgttcacgaaatcgttgtagatcgtgtagtccccgacctcgatcatcgggttgccgatgaccgtgttcaggtagaccgtctgccggtcgttcgtgcggggataggtcttgctattcatggttggtcgtttcagtctgcttttacggtgatgatctgtttccagtcggtcgtatattcctgcgagaggtgctggcggttcatcttcagcggggcgaacccctgtgccgccaccacgaccctgttgcggccgtaggtgcggttggtcgcatccatggcgtccatcagccgggcgtgcctggcacgatccacggggtcgaacaggtcggtttgcagccccgtgcgcgacgaaatgtccgaaagcgtaatcccggctttcttgtagccgtagcctttgcggaatatgcgttgcagggcctttgccgccagcggcaccagctccagcgtgtcgtcggtcggcaccacggggcgcacggtctggctttcgaaatactggggcagctcctcgtggtggcggttggtgaggatgtagaccgtcacctcgccgcagaggctttgctggcggcgcagtttctcggcggccatcgagacgaacgccgccaccgaggtgtgtatctcctcgtattgggtcagctcgtgcgcgaagctgcgcgagacggtgatctgctgtttggccggcggggcgctctcgaagtcgatgcacgcctcgccctgaagctctttccatgtgcgcagccccgtgacccccatgcggccgcgtatccatgcctcgggacgctgcacgaagtcccatgccgtacgtacgttggcggcctgcaacatgcgccggtgcttgcgcccgatgccccagacatcctctatcgggaatttgcgcagtaccttttcgatgtcctgcggacggtacatcaggcaggcgccctgcaacttggggtactccttgcagagtttcgacgcgatcttggccagcgttttggtcggggcgatgccgatgctcacggggatgcccgtattgcggcgtaccgtgcggctgatgtgccgtcccaactcctccagtcgtccggtgtcgatgccccgcaagtcgaggaacgcctcgtcgatggagtatacctcggcggcgggaaccatgcggcggagcgtccagatcacgcgccgcgacatgtcgccgtagaggttgaaattactcgaaaagacggctacattatgccgtttttcgaggtcgcggatctggaaataggggtgtcccatgcggatgccgagcgccttggcctcgttcgagcgcgcgatcacgcagccgtcgttgttcgacagcacgaccacgggccgcccctccagttcggggcggaagacccgctcgcacgaggcgaagaaattattgcagtcgcaaagtccgtacatcgttttttcgtgttgcatgttgtccgtgcccccccccctcgggcgttgtggttccctcgcggggatattgctcggcgtgaagtgactgggcctccccgcggccgcttcagacctttttgatggcgtacgtcaccacgccccataccgtgaaatcgctctcctggccgatctcgatcggtttgtagcgcttgttcgcgggcacgaggacgatcttgccctgtcccatccgcaggcgtttgagggtgaattccccgtcgaggaaacatacggcgacacagccgtcgtaggcctccagcgacttgtccacgaccagcaggtcgccgtcggcgatgccgtcgtcctgcatgctgtcgcccgcgacccgagcgaagaatgtcgcacccggattgcggatcagctcccgattcaggtcgaggggcgggtcgaggtggtcgtcggccggcgagggaaaacccgccgagacgccgctcgtcgccacgggaagttccgtgcgggtcgaggtgtcggggcggacgagccggagccgtatttcttcctggttgtccatcttgttatccatagtcgctgcaaaattgcaaaaaatttcgtgtaaaccggcaatatttcctacatttgcctcctgaaatcccggttttatggaacgtgccaaaggtattctctacgcggccctgtcgtcgtcgactttcgggctggcgccgctcttcacactgctgctgctcggcctgggctactcttcgttcgaggtgctgtcctaccgttggggtgtcgcgtcgctgtttctcggtgccctggcgctgctcgccgggcgcagtttccgcctctcgtggccggaattgcggacggtattcttcctgagccttttccgcgccgccacgtcgttgagcctggtcatcgcctaccagcatatcgccagcggcgtcgcgtcgaccatccatttcatgtatccgctggccgtcgccctggccatgatgtgcttcttccgcgaaaaaggctccgtatgggtctttgcggccatcggcatgtccatcgtcggcgccgtgctcctctcgctgggcaacgtcgatttcacccgggggaataccacgctgggcatggtctcggccgccgtttcggtcgtctcttacggcggttatatcgtcggcgtgcgcaagagccgtgccgtggggatcgactccacggtgctgacctgttacgtgatggggctgggggctttgtatttcattgccggcggcctcgttacgggcggtatccgcatcgagacggacggcacggcgtggctctgcattctcggggtggcgcttccggccacggccgtgtcgaacatgacgctggtgcaggccatcaaacgcatcgggccgacgctgacctcggtcttcggggccttggaaccgcttacggccgtggtcatcggcgtcgcggtcttcggcgaaccctttacggtgcagggcgctgcgggcattctgctgatcgtcgcagccgtcacgatcgtcatcctgcacagcggccgccggaaagcctgaccaggccgcactgcggcgtgctgccgcccggggagcgcagcttccggataaaggcggcgcgcatccggcagcgggggacggcttcccggatatggataacgtactcccggacaaaatagaaccgacggaaaacccgttttaccgatatgatcatcagtgccagccgccggacggatattccggctttctatgcgccgtggtttttcaaccgcctgcaggagggttacctccttgtacccaatcccttcgacccgaggacgctcagccgcatcagcctcgggcgcgacgtcgtggactgcatcgtattctggacgaagaacccggtgccgatgctgccgcggctcggggagttgtcgggttacaactattatttccagtatacgctcaatccctacggcgccgacctggaaaagtacctgccgccgctcgaaaagcggatcgagaccttcaaacgcctctcggataaggtagggcgcgacagggtggtgtggcgctatgacccgattctcaccaatgcgacctgcgacgtggatttccactgcgaggcctttgcccggatcgcccatgctctgcgggatcatacgatgacctgcatgctgggcttcatcgaccattaccgccatatccgcggcgtcctcggggcgctcggcatcgggcccttgcagcgggacgaaatccagcggatggccgtgtcgttccgccggacagtggcgtcgacgcctatcgcattgaagacctgcaccgcaaaggtcgaccttcggcacctgggcatcccggccggcatgtgcatcgaccgcgggctggtcgaacgcattgcgggctatccgatcgcggcgaagaaggatgcgaaccagcgccatatctgcaattgcgtcgagagcatcgacatcggcacctatgaaagctgtctgaacggctgtgtctattgctatgccatccggggcaattacggtacggcggagtataaccgccgcaggcacgatccccgctcgccgctgatgatcgggcatctttgcgacggtgatgtggtgaaggagcggccggtgaaaagcctccgcagcacgcagcatacgctgttttaacaggacggcgcctcttcgggggagtgtttcttcgatattttcccggatagctcccggtatgtgcagttcattatttcatagcgttttacttcatgcgtcgcgcggtcttcctgcaccagataggcgcgttttgcccacgcctcgatcgtgaaatcgcatgccggcccttccaatttcagcacgtgcgaatccatcaggttccagaaaatgaagcgcagcttgttggcatagcttccgtttgcaaacgacatttgtgcgcctgtttcgtccttaaaatagacgctgttgaaattttctcttgcccgtcccatagcagttgtgtttagtcggtgcaaaggtcggaaggcgtaatgacaagttttgacaccgttgtgttttttttgaatgcacgatgccggaatggagttctcgaactatcgtttcagcacctttcgcagcctgtcgagcccctcggccagcaatttccgcgggcaggcgatgttcaggcggatgaaatcccggccggcctcgccgtatatcgacccggggtttatgcgcagtttcgcctcttcgagcagcttcgtctccagctcgtcggacgtaagccccgatgcccggcagtcgacccacaccagatatgtcccctccagcggcagcaccgggtactgcggcaggttgcggtcgaaatactcccgcaggaagcggtagttgccatgcaggtattcgttgagcgcatcgagccattcggcgccttcgtcgtaggctgcgatcagcgcttcgatggcgaaggggccgatctccccggtttcgttgatctggagcgagtgcccgatccttgccctcagggccgcatccgccgcaaagatgttggcgacctgcaaccccgcgaggttgaatgccttgctcggcgaggtgcaggttaccgagcggcgttcgaactcctcgcagagcgaggcgaacggcgtatagcggaatcccggcatcaccagctcgcagtgtatctcgtcggctacgaccacgacgtcgtggcgcaggcacagctccccgatgcggtgtagctccgcgggcgtccagacccgtccggcagggttgtgcgggttgcacagcagcatcagcttcacggccgggtcggcggctttacgctccaggtcgtcgaagtcgatcgtgtaggtgttgtcgcggtataccagcgggctttcggccgcctggcatccgctgttgtggatcgaggtgaagaaatggttgtagaccggcgtctggatcaggactttgtcgcccggttgcgtcagggccttgatgacggccgacagggcggggatgacgcctgtcgtatggagcacccattccggccgtatctgccagccgtggcggaggcggaaccaccccgtaatcgcatcgtagtaggctttcggagccgtcgcatacccgaaaatgtcgtgttgcacccgccgctgcaaggctgctgcgacagcgggtgccgtgcggaagtccatgtcggccacccacatgggcagcacctcgggatcggtatccatatcccatttgatcgcgttcgtcccgcggcgcgggattatttcatcgaaatcgtatttcatgcggaattgtatttgcttgttcataaatacgtcggagcctccccgaaagtttcattccgggttccggttttgcacggcaggcaggctgccggcttgccctcgcgttccggcagcgtacccttatgctcgccgatgtacccttatctgccttgccctatccgtaccgccatgcgatgcggggaaacaggaaacgaggcagtcgtaaactgcctcgtttcctgtttcttgcctccggggattttcccttcggtttgctggcggtgcgtaggggactcgaacccctgaccccgtgcgtgacaggcacgtattctaaccagctgaactaacgcaccattttggtattgcgagtgcaaagatactatattttctaaaacctgcaaataattccgggatatttttttgccgtttgcctgccgtgtccggctgtgccgccgccggatgcgtgcctcccggcaggtgtgctgttccctgccccctcccggcctgtccgctgcttccccgcctcccgccggcggatgtttttcctttccggggtcgccgggcggattctccggagcatcctattgtttccctttcccggaaccgtagggtaggtgtccttggggactttctttccggcgtgagcccccccccttgttccggcaggcgtaccccctcccttatgctcgtcgacgtacccttatctgccttgcctttccccgtccgcaccgccatgcgatgcggggaaacgaaaaacgaggcagtcgtaaactgcctcgtttcctgttttttatctccagatatttcctctccggtttgctggcggtgcgtaggggactcgaacccctgaccccgtgcgtgacaggcacgtattctaaccagctgaactaacgcaccgtttggtttattgcgagtgcaaagatagtgtaatttttcaaaacggcaagcgcttttgcggctttttgaagaaagaaaattgtacgcttccgtaactccttaattgccagaactcctcgcaggccgagaaatccatttttttcgagtgttcgaagatgaaaatcccctccgggcgcagcaggttgccctccagcaccagtttcaccacctgttcgctgccctccaggtcgtagggggcgtccgaaaaaatcacatcgaactgcttggtgcagctcttcaggtagaggaacgcattggccttcacgggatagaggttgccgatgccgagctgtgccgccgtctgccggataaagttgtaatgcaccgggttgatctccaccgatgtgacgctccgtgctccgcgcgaggcgaactcgtagcttatcgaccccgtcccggcaaagaggtcgagcacgtcgcactgctcgaaatccaccaggttgcccagtacgttgaacaggttttccttggcgaaatcggtcgtcgggcgtgcccgcaggttgcgcggcgggttgatggcccgccccttgtattttccgctgactattcgcatacgatccgtttgaaataacctttcagcagcttgccgcacgccttggcgtcgtcgccggaaatcctgagttcgcagcttttgagcgcgaactccttttcgagccgttccgtgaagtagcatacgtccgccgtgtccggtgcggggatcacccccgcgaagcggaggctgccgtcgtacaccttaatatataggagtcccgccgtgcagtatgcccatacggtcggtgttccggcctgcacctcccggagcagcggggtggtgtagcggatgcggtctcccagcttctcctccgcctgccgcaacgcctcccggtgcgcagccattacggcgacgatcccctgcacggggaggctgcatacggcgcgctcttccgcggcgggagccatgccgtttgccgcgagcagcgtcccggcgtccccggtgccgagcacctcctccgggacgagcatcgtccgtgccgtcagcagctccgcctccacgggttcctcccccggaaattccccgtcgaggccgtgcgccgaaaaagagtgtccatccaacgtaagctgaatggacaccttatttgtagcttgcggagtgttactcccagttacctgcttcattgttaccagcttccattgaaccgaacttgacgccggggtagcggttgaagttgttctcctcgtcgtcgatcaggttgatgatctcctggcggtaagccaccgtgtcgaggaacatcttgtagggtgcgcggcactccacgatcgggatcacgaccttcgactcggtggtgatgatgcctgcctccatgatgtactgggccttgtcatcggtgccggggatgtaacgcagctgctcaacgtcctgtttcgaaaggcgcttgggcgagaagatcgtatcgatcacggcgatcttgaacttctcgacgttctttttgcccatcttcttcagctgtgccatggctacggagtcatcctcgtcgacgatcttgcgctcgagttcgagcgtatcctgcaggatgaaattcgccagcgtgtcgaaactgcccgtgaaacgctggtacttcgacttgaatgcgcgctgtgccgtacggatgtccttgatgcggtcgatgacctgggctttcttggccttcaactcgtcatcgaacttgatcggggtcgagatctggtcgtagataacgtagaccagcgccacgatagctacagcaagaatgatttgagcgatttttttcattttttaagctaatctaatatttgtttgtaattttgtacaaaataaaacacacgcatgttcagcacacgtattgcgacccaaatttacgctaaaatttgttttgaaacaactcttgggcaaaaaaaaatcatagaaaaattgtccgaataccttgcaggtgacgatttttcgcggattttcgtgctgaacgggtatgccggcacgggcaaaacgacgctgattgcggcactcgtgggggcgcttaaggatttgaatatcaaacccatcctgctcgccccgacgggccgtgcggccaaagtcctcgcccaatacgctcaggaaaaggcttttaccattcacaagcggatataccgacagcgcaccaatgccgattacgaatcgaaatattcgctcaacttcaacgccgagaagggggcggtattcatcgtcgacgaggcctcgatgctctccgacagcccgggcgacggggcgcttttcggttccgggtcgctgctcgaagacctcgtgcaatacgtccgcagcggccgtgactgccgcctggtgctcgtcggcgacagcgcccagctgccgcccgtcggggcggatcgcagcccggcgctcgacgccgcgtcgctcgcccgtttcggcgatgtcgagtacgccacgatggatgacgtggtgcgccaggaggccgagtcggggattcttttcaatgccacgctcgtgcggtgcatgctcgagaacggcatccacgaaatcccgcatttcgaaatgggcttccccgacatcgaggcggtcgaaggcggggagttcctcgaaaagctggaggattgttacgcccggtacggccgcgacgaaaccatcgtcatcacccgttcgaacaagcgtgccaaccgttacaacgagggtatccgccgcaacgtgctctatgccgaggaggagatcgagagcaatgacatgctgatggtcgtgaagaacaactattattataccgggcacaccgaaaactgcccgatgcactttatcgccaacggcgacatcgcgcggctcaaacggctgcggcgctacgaggatttctacggtttccgtttcgccgacgtcgtgctcgaattccccgactacgaggatacggagattgaatgcaggatcctgctcgacacgatcgcctcggaatccccgtcgctgacccgcgaggagtcctcgcgccttttctacgaggtcgagaaggactacctcgacgtcaaaagtaaaatcaagcgcttcaaggagattcgcgagaacccgcatttcaacgcgctccaggtgaaattctcctatgccgtgacgtgccataaggcccagggcgggcagtggaaggccgttttcgtcgaccgctgcctgttcggcgacgagcccatgacgcgcgacatgctccgctggctttacacggcgctgacgcgcgccaccgataaactgtacctcgtaaatttcgacaagaagttctatgaatagcgaactgcatcccctcgaacctttcctgccggccaacgcccgggtgttgatgctgggcagcttcccgcccaagcgcatccgctggtcgatggatttcttctacccgaacctgcaaaacgacatgtggcggatcgtaggctaccttgccacgggcgacaagtcgcatttcctgatgcccggcggccggaaattcgacaaggagcgcatcgaggccttctgccgctgccgcgggatcgcactctacgacacggcggtcgaagtcatccggctgaaagacaatgcgtcggataattttcttcaagtcgtgcgcgaggtggatctcgcctccctgctggcgcgtatcccggcctgccgcaccctcgtcactaccggccagaaagccaccgatacgctgcgtgcgatcacggggtgcgacgaaccggccgtaggccagagcattgggttcgaatatgccgggcggaacatgcggctgtggcgtatgccctcctcgtcgcgggcctatccgcggcctgtggagtggaaggccgaattttaccgaaaagtattcgaaatgaatgaaattctgtaaaatagagtatctttgcgtagcaaaaaaaacaaaaataatttccattcccggcttggtttgagaaccaaattctgttatctttgtatggaaattacatacaattttttattgtgaacgcagagaaaaaaatagacaaaaaatatgtcgagacaccgctgatgaagcaatattattcgatcaaggcggtgcatcccgatgccatcctgctcttccgggtaggggacttttacgagacattcggcgaggacgcgatcaaggccagcggcatcctcggcattacgctcacgcggcgggccaacggatcggcaacctacgtcgaactggccgggtttccctaccatgccatcgacacctacctgcccaagctggtacgggcgggcgagcgcgtagccatttgcgaacaactcgaagacccgaagctcgtcagggggctggtcaagcgcggcgtgatcgagctggtcaccccgggcatcgtgctgggtgacaatatcctggccaacaaggaaaacgccttcctcgcttcggtctacttcggccggcagacgaccggtgtggcgttcctcgacatttcgacgggcgagttctacgtggccgaaggctccgacaactacgtcgacaagctcatttcgaacctcgcacccaaggagatcatctaccagcgcggttacgaagaccgcttctctgccgctttcgggtcgaaacattacacctaccggctcgacgaatgggtcttctcggaggaggtcaaccgtgaaaaactctgcaagcagttcatgaccacgtcgctcaagggcttcggcgtcgaccatttcaccagcggcatatccgccgccggcgccatcctctactacctcgaattcaccgagcaccgcgacatcgcccatatccgttcgatttcgcgtatcgaccaggacgactacgtgtgggtcgacaaattcacgatccgcaacctcgagctgttctcgtcgaacggggggtgcgagaagtgcagcttcgccgatgtcatcgaccgcacgctcacccccatgggcggccgcctgctcaaacgttggatcgccatgcccgtcaaggataccgtgcagatcaacgaacggctggacgtagtcggacatttcgtcgaggatgccgacctggccgacaccgtgcgcgagcaggtggcgctggtgggcgacatggagcgtatcgcgtcgcgtatcgccgcggcgcgggtgacgccccgggaactggtgcagctcaagaattcgctctttgcggtcgaattgctcaaggcggcgctcgaatccacggacgacgaccgattgcatgcgctggcggcgcagatcgacctgatgaccgacgtgcgcgaccgcatcgcgcgggagatataccccgatccgctcaacaaccagattcagaagggcggcgtcatcgccgacggcgtggatcccgagctggacgacctgcgccgcattgcgctccacggcaaggattacctggcacgcatccagcagcgcgagagcgagacgacgggcatcccgtcgctcaagatcagctacaacaacgtcttcggctactatatcgaagtgcgcaacgcccataaggacaaggttccccagagctggatccgcaagcaaaccctcgccaatgccgaacgctacatcaccgaggaactgaaggaatacgaggagaagatcctcggggccgaggagaagatgctagtgatcgaacagcgcatctatgccgacatcatcgcccacataagccgttcgctcgccgtgctgctgcgcgacgccgccgtcgtggcgcgtgtcgactgcctgcaatccttcgcccgcatcgcctgcgaacgccgctatgtccgtcccgtgctcgacgacggcaagcgcatcgacatccgccagggacgccatcccgtcatcgagacgcttatgcccgtaggggaggagtatattcccaacgacgtgttgctcgacgacaaggaacagcagatcatgatgatcaccggccccaacatgtcgggtaagtcggccctgctgcggcagacggcgctcatcatcctgatggcgcagatgggatccttcgttcccgccaagtctgcgcatatcggtgtggtggacaagatattcacgcgcgtcggggcgtcggacaacatctcgcagggcgaatcgaccttcatggtcgagatgctcgaatcggccagcatcctcaataacatctccgaccgcagcatcgtcctgctggacgaaatcggccgcggcacgagtacctacgacggtatttccatcgcctgggcgatggtcgagtacctgcacaaccacccgacggcgcacgccaaaacgctcttcgccacacactaccacgagctgaacgaaatggagcagatgtgcccccgcgtgaagaactaccacgtgagcgtcaaggagatgggcaaccagatcgtcttcctgcgcaagctcgaacgcggcggcacggaacactcgttcggtatccacgtggcgcgcatggccggcatgccgatgtcggtggtgtcgcgtgccgacgagatcctgcgcaacctcgaattggtctatggcaacaacgaaatcgtaccgagccgcagcctcaaaagccgcggcaagaaaccgtcgccgtcggtcagggaggccgccgaggccggtgccccgcagaacatgcaactgtcgatgttccagttggacgatccggtgctggtgcagatccgcgaccagatcaaggggctggacatcaattcgctgacacccatcgaggcgcttaataaactcaacgaaatcaaaaagataacaggcatatgatcaagcatcgcatcatgtccgtggcgactttgctgggcggagtgatttttaccggacatgtcgtggcgtaaagcccggaggtggcgcggcggctcgatgcgaaatacgatgtggtgtggcctgcggtcgacggacttataagggtcaataagggcgggttccgtattcccgattcgcgtatggaatccaacgggaaatacggctatgccgataccctcgggcaggtggtggtgccgccggcctacgacgatgccgcggatttcggcaacggccatgccgtggtcgggcggaaagtccgggacggcaggatgctctacggcctgatcgaccgctcggggcgtgtggtcgtgccgctggagtgggagcgcttggacggtgtccgtaacggagtctgtgtggcccgcaccggcacggccgccaaacgggaattctcgctcgctgatacgctgggcaatgtccgcagcctcggttacgactattgcagcgatttttccaacgggctcgcccgcgtgggtgtcggtgcctatgtcgagaaggaaaacgtggcggggattacgctccgggatgcgtacgaattccgcgggaagttcgggtatatcgccccggatggcggaatcgttattcctgtgcagttcgacgacgcccgggatttcgcgcaggacgggctggccccggtcggcattcagggaaaatactatgtcaaatgggggttcatcgacaagtcggggcgacaggtcgtgccgtgcaacttttacagtgccgaggagttcctgggcgaccgggccgtagtgagcaaggtcgttgcgggcgggaaattggcctacggctatatcgaccgcagcgggaaggaggtaatcccctgtcagttcgacatggcttcgggcttccgctttgccaacacatggatcggtatggagcaggacggcgaatatacctatacgctgatcggccccaacggggaaactgtgctgccgttccgggtgggcgatttgcaggacggaggaaaatacgggcacgcggcggcctccatctccgatgccgcggggcgtaaacgcttcgggatcgtcgccaataacgggaaggtgatcctgccgttcgagtacgaccatatagctattttttcggagtgggatgcggcgaacaaccgctggcaggagagcgccatgggaacaaaggacgggcaaaatttcagcttcgacatctctcggcggggcgagtagccttttccgccccggcgtgttccttccttccggcattcggttccgcggcagacgagtgctttctgttttgtttggccccgggtacccatgtgcagtgccggttggctgccgcagccggcaagtcgcaggctgatcgtagccttagggtgcaaagcggctgcggcttggattccgattccgaaataaaaccccggcgcaaagagattgcgccggggttttcgttacaggatatccgtaaattcctcggagtctcgtcctgttatctcctttcccgtaatgcagttctcgggcctttcggtcacccggttgtccggttactcgttacgcgcgatcagcgaactgatgttctggatcagcatcgctacggccaccgagttgaaaccgccctcggggatgatgacatcggcgtagcgcttcgagggttcgacgaactcgtcgtgcatcggcttcacggtcgaggtgtattgcgtgatgaccgactgcatcgtacgcccgcgctcgcagacgtcgcgcaggatacggcgcgccaagcgtatgtcggcgtccgtgtccacatagaccttgatgtccatcatgtcgcgcagctccttgttttcgaagatcaggatgccgtcgacgatgattaccttcgaaggcttcacgcacacggtttccgccgtacgatcgtggtcgacgaacgagtagaccgggtgctcgatggggacgttgtccttcagcgccttgatgtggtcgaccagcatctgcgtgtcgaacgcctgcggatggtcgtaattgagtttcgtgcgttcctcgtaggtcagctcggggtgcgccttgtaatagtagtcgtggcagagcgtcacgacgtcgtcgcctacgaaggcctcttgcaggcgcttgacgagcgtggactttcccgagccggttcccccggcgactccgattacggtaacattcatagtttcagttggtaatatcggttatataaagaaaaggatcgctcctttcgcaagggcaatccttttcctttccattatgcgtcgatatttgcgtaatgcgcgtttttctcgatgaattcgcgtcggggcggcacttcgtcacccatcagcatcgagaagatgcggtctgcctcggcagcgttttcgatgttcacctggcgcaggatgcgcgtgtcggggttcatcgtcgtttcccacagctggtgggcgttcatctcgccgagacctttgtaacgctgcacgtgcgcccccttgccgaattcggcggtgatggtgtcgcgttccttctccgtccagcaatagcgctcctgcttgcctttcttcacgaggtagaggggcggggtggcgatgtagacgtggccgttctcgatcagctccttcatcttgcggaagaagaacgtcagcatcagcgtcgcgatgtggctgccgtcgacgtcggcatcggtcatgatgatgatcttgtcgtagcggagtttctccaggttgagcgccttgctgtcctcctcggtgccgatcgtcacgcccagcgccgtgaacatgttcttgatctcctcgttctcccacatgcggtgctcctgcgccttttcgatgttcaggatcttaccgcgcagcggcatgatggcctggaaattacggtcgcggcccgatttggccgtgccgcctgccgagtcaccctcgacgaagaagatttcggcgatcgaacggtcgcggctcgaacagtcggcgagtttgccggggagcccggctcccgaaagtacggtcttgcgctgcaccatttcacgggcgtggcgtgccgcgtggcgcgccgtcgcagccaggatgactttctgcacgatggccttggcatccttggggttttcctccaggtagtggcccagggcggcggacatcgcctggtctacggcggccgagacctcgtcgttgcccagtttggtcttggtctggccttcgaactgcggctcctgcaccttcaccgaaaccacggctgtgagcccctcgcggaagtcgtcgccgttgatgtcgaacttcagtttggcgagcatgcccgaatcctcggcgtatttcttgagcgtacgggtcagcgcgcggcggaagcccgtcaggtgcgtaccgccctcgatggtgttgatgttatttacataggagtgcacgttctccgagaacgagtcgttgtactgcatggccacctcgaccgggacgccgttcttttcggtatcgaggtagatgatctggtcgatgatcggcgtgccgcgcgtggcgtcgaggtactggacgaactccttgaggccctcttccgaatagaagtggtcttcgcgggtattgccttcgtcgtccctgcgcttgtcgtagaggttcaggcggatgcccttgttcaggaacgccagttcgcgcaggcggttggccaggatgtcgtatttgtattccgtcgtgagcgtgaagatgctctcgtcgggtttgaacgtgatggtggtgccgcggtcggagcattcgccgatgacctcgacctgcgaggtgggagcgcccttgctgtacgtctggcggtatattttcccgtcgcggctgcggatctcggcgatcagcagcgtcgaaagtgcgttcacgcacgatacgcccacgccgtgcaggccgcccgagaccttgtagctgcccttgtcgaacttaccgcccgcatggagcaccgtaagcacgacttcgagtgccgatttgccctccttttcgtggtagtcggtcgggatgccgcggccgttgtcgcgtacggtgatggagttgtcctcgttgatcgtcacgtcgatgtcggtgcaatagcccgccagcgcctcgtcgatcgagttgtcgaccacctcgtagaccagatggtgcaggcccttctcgcctatgtcgccgatatacatggcggggcgcttgcgcaccgcctcaagcccttcgagaacctggatattcgaagcggaatattcttcttcttgcttttttacgttttctaattcggtactcatctgtcgtctttaaaatatcgtacaaatatacgaaatatatcccgaataaacaatagccgtctggcttctgccagccgattttttgcggttgcaggacgtttcggaggcatccccgcagggtgtgccgcaacataccccgggcgggatgcggcagcgtggggtttacggtctgttatccgagttcggctttgaggtctacctcgcggattttaccctgcgcgaagagtatggcgcgggcggggtagttctcgatcagtgcggtgttgtgcgtggacatgaccacggcacagccgcggccggcaatctcctggaagagccgcatgatgccttcggccgtcacggggtcgaggttgccggtgggctcgtcggccagcagtacctgcgggtcgttcagcagggcgcgtgcgatgaccagccgctgctgctcgccccccgagagttcgaacggcattttgtagcttttggcctcgaggtctacgagcttgagcacctggtcgatccgctcccggatctggtcttcgcgcttccatcccgtggctttcattacgtaatagaggttcatgaagacgttgcggtcggtcagcagctggtagtcctggaatacgatgccgatccggcggcggaggtaggggatgtcgcggcgcctgagtctgcgcaggtcgtagcctgccacgcgtccttcgccggagagaagctgcacctcggcgtagagggttttgagcagggtgctcttgccgctgccgacgcgtccgatcaggtaaacgaattcgcccggagccacacacaggttcacatccgacagcaccatctctccccggcgcatcagcttctcggccgaggtgctgccgaacgggttgtccgcatggtagatggctgcgtttttcagccttacgacatatttttcgctcataggttctggtcgctggaattattttccaaagatagtcaaaatatccgtacggggatgtcggcacggcgaaaaaaaccgccaaaactgcttctgaagggatattttgatccttctcgaccggaaatatacaacaaaaaagccctttgggttgcgcaaaaacaaccgtataatttgcatttccgcccgagggtgcttaaatttgcacgataggccgtgacgcctcggtctgttggtaagcaaaaaatctgtgaatgaaagaaaatgagatcctgcgggagattatgcgggatgccaaaatcggttggtggcaagccgaccgtaaccgccgcgtgttccatatttcggaagggctccgcgacctgctgggggtcgcttcgtgcgaagtgacctacgaagagttcgggaagatgataactccggcctaccgggaatacgccctcgcctcgatcggggtgcggggcggcgccgaacgcctctatccgctgcaaggggcggagggagagatatggtgctactggaaactgttgcgcgaagaggtcgccgacgacgggggaatgctgctgacgggctatttccgggtggtcgacccgccgtccgaagtggtgaattcgcaggaaaagcaacgcatcaatgacctgctgttccggctgaacagcatttcgcagacgctgctttcgctgctcaaggtcgacgacctggatgccgtggtgaacaaaatcctggccgacgtgctgaccatgttcgatggcggcagggcctatatcatcgaatccgaccccgaacaccgcttatataattgcacctacgaagtcacggccgagaacgtcaccggggagcaggagctggtaagcggtatttcgatggacgaggtgccctggtggacgcagcgcatcgccaacggccagcccgtaatcatctcttcgctcgacgaattgcccgacgaggctttccgcgagcgcgaggtgctggccatgcaggacatcaagtcgctgatcgccgtgccgctcctctcgcgcgacaaggtgtggggatatgccggcatcgacatcgtgaaccggccccggagatggacgggcgaggatttccagtggttttcgtcgctgatcaatatcatcagcctctgtatcgaattgcagcgctccgagcgcgaggcgcagtccgaacgcaagtacctccagagcctctaccaccacatgcccctggggtatgcccagctgcgggtcatccgtgacgagcaggggaaacccgtcgacctgctggtgctggataccaactacaccgccgacaagatcatgggtaccaagcgcgaaacctatatcggcaggcgtatttccgaactggggctggatatggagcaatatctgaaaacttttacggaggtgctccgcagcgacggattcatcgaacgcgactccttttacgagatctctaaacgctggatacactccatcctctatacgacccggcccgacgaggtgatcagcctcttttccgatactaccgaaatgcgcaatgcccacgaggcgctgttcaacagcgaaaaaatgctgcgcaatattttcgacaacgtccaggtcggggtggagctttatgacaaagagggctgcctggtcgacatcaacaccaaaaacctcgacatcttcggcatcgcggcgaaggaggatgtgctggggatcaattttttcgagaacccgatcgtgcccgaggagatccgccgcaacgtgcgcaacgggcaggagcagtccttcaggctcgattatcctttcgaccggctgggcggctactatccctcccgcaagaaaggcagcgtgcagatatataccaaggtgaccatgctgtacgacatgtacggcgaactggtcaacttcctggtgctgaatatcgacaacaccgagatcaacgaagcccaccacagactggaggagttcgaaagttcgttctcgctggtgagccgcttcggcaaggtggggtacgcccgcttcgacctggtgacccgcgacgggtatgccgtgccgcaatggtaccgcaacctgggcgaggagagcaatactcccatgacgcaggtgatcggcgtctacaaccatgtcaatcccgaagaccgggaggccatattccgggaaatcgggcgggtcaaggccaacgaatcgaacggcttcacgctcgacctgcgggtcgggctccgcgacggcaagagcgggtggacgcgcgtcaatgtggtgcgcaacctgctgaataccgacccctcgaagatcgaaatggtatgcgtcaatttcgatgtcacggaactcaagcagacggagaagagcctgatcgaagccaagaacaaggccgaggtcagcgaccgcctgaaatcggccttcctggccaatatgagccacgagatacgtacgccgctcaatgccatcgtgggattctcgaacctgctggccgaaaccgacgatatcgcggagcgccgcgagtacatgcaggtcgtcgaggagaataacgatctgttgctcaaattgatatcagatatcctcgacctttcgaagatcgaggccggaacgttcgagttcaattacggcatggtcgacgtcaaccgcatgtgcaaggaggcggtgcgagcgctgagcctcaaggtacaggacaagcccgtcgaattgcttttcggcgaccatgaggcgcaatgctgcatcgtcggagacaagaaccggctgttgcaggtcatcaccaacttcatcaacaatgcggtgaaattcaccgagcaaggctccatcacgctgggctaccgccgggaggtcggggacttgctgttctacgtcgaggatacgggaaaaggcatctccgaagagcatctgcgcactgttttcgaccgtttcgtcaaactcaacagctttgcgcagggcaccgggctggggctttcgatctcgaagagcatcgtcgagcagatgggcgggcatatcggcgtcgagtcggaggaaggccggggctcccgtttctggttcaccatacctgccgtggcatgcaatgccgggccggacgacgaaccgtccgttgtggctgaggctccgcatcccgtgtcctgtcaggacggggaactcccgttgctgctcgtggccgaggataccgacagcaatttcctgctggtgtcgctgatgttccgcaaggagttcgacatcgtgcgggccgtcaatggcgaggaggcggtgcggatatgccgggaaatgaaccctgcggccatcctgatggacatcaagatgcccgtgatggacgggctcgaggctacgcggcggatccgcgcgttcgatcccgtcgtgccgatcgtcgcggtcacggcattcgcctacgaccgtgaccggcagaaagccctcgccgccggagccaacgaatacgtcgccaagccgctgagcggggagcatatccgccgcgtattggggacattgctggcaggggtgtaaccgcgccgcgcgttacgggcttcgccggccgggaagtatccgccgttttcggggagttcgcccgccgggaaacaatggcgcagcatagccctccccgcagggaaacgtctgcgggcgggattgcccagtgcctcacccgcagccgcctgccgatggggcgtacctcgttgccgcaccccttccgggagacgtcgcggtgattttcgacggctgtatccgatagggtaatatcctgttgcaacactcctcacggtaatcattctggtgccctcgacggtcgcgccgatatggtaagattcccgctgctgcacgtccgccgggggatcgttgcggctctccgacggctgcagccggtatggctgtgtccgttcctgccctgtttccggaaaatctgcaccttcccgacgctatttcctgccggagggtcgatatttggaaaaaaagtattatttttgcactgtttccatgaggctttgccccgcgaaattctgggggtgcccggttttgacagcaggcagagtttgattgtaagcacgccgagcgctgtgtggcggctcgtaaatcccgacactcaagattcaaatggcaataatagctatgcactcgctgcataattttcaaggaaaattagcttaatcgccgggcccaaggcggcttggcgacgagtatcccggggagtggttccgccctttaaccgctttccatatggggtatcatcaattcagggatagtgcatcggagcgtcccggccggtgtgcgaaattcagggactgggactcgggttcggttgccgcctgccaggcccgggtagaaggatcaaacggcggctaagcgtgtagaaagctttcgggttccctgtttggacgcgggttcgactcccgccacctccacgaatgtaaaacgcatctggtttattattaaccagatgcgttgtttttgttctctatatctcgatgatgaatatttactgttggcactattttataaagaatcaaataaggtaggttggtgctttttcttgtctgatattatttttgttatcgacgaaatcaaattgatcctgtttattattgtgatttccctttcttcctgaatcaactgcctgtttaaattatacatcggattgttcatgtctgaattcgaatcataaattacagctcttgggatagaatattttaatgcgtattccatagccaatctcgcaccgctgtcctttcccatatcagttttcgaataacttgcggataaaactacgcaatcactaaaaagcgcctgtaatctgtcgcgctcctgatacctgctgcttaattccattttggatttggctgcattataatattcactaatcagcaatccgccatggtcgacaatttcggcagcaagctttttgtttgtagcaggtatgatgttgtttagtgagcttggaagaatggcaaccgttttcccattagagcataatgcttgtcgatgggcgatcgaatcgcagcctaaagccaatccactaattatcgttgctccgttttttaccaattttgcgacaacctcttgttctatcatttcaatttgggcgtctggcgtcaatagtccgataacggcaatatttttattctctgaatttaacaagtttaagttgccgcgataaaaaataacgacaggccggtcactgtttttcacttcaccacgatagggggggaacagattatctccaagtgcaacgattccatccagatgcccttctaatttcaatatttcgcgtcctactgcctctcgtcttttttcgaattcaccaatagtaaccggcccttcttttgaattcatatttaacttttcgacaatagtatcagcggattcatttcccctgagattttttacaatccaggcccttcctatacccttgaaggtctgtattgttaaaatattgattgcgtttgtcgtgtatttcatttcagttcgttgtttaatggctgcgggtgcggccgacagcgtaaaaagttacggatttagccccgctttcaattaatgcctgaatggcatcttcgtctatatttatggttttggtatatatgtcgtcaatcaataagatatccttatcctttacgttgtctgaaattgtacatgtgtcgaatgtaattcctgggtagggtgttgctccttcattacctttaagattgcgaagatgcgtggtttttgtatccctatatcgcttgaggtaatttgtgccgtcgcaataattttctccgagtcgatttatgacatttttaaccgtcgatttaaacagcaactgattcggttgatactcggctttagcccgtgggattacgcatacggttaaagattcgcaatgcaatgattcgaagatttggggaatatctcgcatcaagacggcttccaactcatgacaggctgtgtttaatctttcggatgagaaatctccaaatgtatttttcaaggtatttaaatagtctgggttgccggggttattatgccctacgtaatctgtgtggtaataagcctgaatattccgatccaaatactcattggccaggattgtgaaagtgcgcatgattgtgggttttaaggtgtgacataaataatattttcgcaaggaattcctgctgaaatagcattttctatctccgttttttcattttcaaagacgaaaacagatgcgggggacattcctaatgaagcaagcgcatattcgtacttgttatgttggttcctgtaaaatttgtggtcaaaatcattgaacaatccatggtatcttaatgtcatcaccgctctatcttctcggcagtttgtgaccaataccgtcgtatttgttttgaagtatttttttaatatttgaacaatggcaacattcaattcagttttagacaactgctcggtgtaaaagttgtttttcaattgaataattttatcatactctgccttttcgagagagggaaatatttttttcagatgcattcgggtaaatcttatgtcaggagtatatgaaatatccgattccgttttcaagacctggtggatcgcctgagtataagaaagatagttggcatagttcgtgtcaattaatgtgccgtccatgtcgaaaaaaagaacatgttgcctgtcgatcctttggggtaatgtttctaagatcttgttgtcaactccctggttcatgacgattaatttaaaattgcaatataaaattagctttttttgctaaaaaaacaatcgaaccgggcgtttttttcgtgatttgcaatataaatatactgtcttttcctgagaatgatttttttccgtcaaggaatccggaagagcttgccttcggcgaaggtaatccacagcgacccgtcgggcgcctggcggaaatcgtttcctgccgaattgcagcatttcacactccacagcagcgtgccgtcttcgcgcacggcggcaacctgcccgagcctcctggcgacatagaccacaccgtcgcgcacacaggccgggcaggagttgtattcgtatccccatcccagatcggtgcaccatgtttcgcggtaggcgtccgccgacgtgtccacggccgccagctcgccgtccatcgtcttgtaatagaattgccgtccgtcaccgccgaggcccgtcgtttcgcgcgctttgcggctgttgtcgcgccatagctgccgtccggtagccaggtcgaggcaggtcacggcccggtcgggcgccacgatgaagaccttgccgccggcgatgcggggcacgacatgccccggggagaggaacacgccggggcggccgttgttccatttccagaggcatctgcccgtcgcggcgtcgaggcaataaaggtgcctgtcccatgccccgaataccaattttccgtccgcgagcgtcgggcgcccctgcgcctgtccctgtccgtagtcgtaacgccagagcagtttgccgctgcgcaggtctatgcggccgacggagccgacgcccagcccgatgtagagcgagctgcggtcgacgagcccgtcgccgacgacggccgtggcggtcggcagatgccaccttcggcggcctgtccgggcatcgaaggcccatatcccgcccgaggcggcgccgacgatcacgagcccgtccgtgcagagcggggtggtgtagagcgcgtcgggaaacctgtgccgccacacttcgcgcccccggcgtgtgtcgtacgcccgcaatacgccctgtgaattgccgtagtaaagcatgtcgccgcagcatcccgcacccgtcagtaccatggcgctgtcctgcagaacgtattccatgcggccttcgtagtcgggtgcggcgggcggcgggtcgcagggcagggcgagtatctgcggatccccctccaggcataccgtatggcgggtgcgtgcggcatgtccgagcggcttttcgcggatgcgcaccgagtcggcgaagaaatcgagcagggtatatcccggcgcctcgcccggcctgccggccagtgcccggccgggtatgcccgcgatgccgtcgaaattgcgcaggtcgagccggtggtagtgcccgtagagcgaggcggtgatgcccagccgtttgagcgttgcgaccacctcctgcctgttggtgaggtctttgttgagcgggtagtggcagaggcttacgatacgttcgccgggacgggcccccgcggcttgcgctccgagccatgcgaggtcttcggtgcgcacgacgccgtcggccattttcatgtagggcccgcagttgtagcccaggaaaaggtagcctcccgcacggtgcgcgacgcgcccgtcatggccgaatatgcagcggaacgtcgtgcatccgctctccgaccaggtcgtttcatggttgcccatgacggtgaaccacggtttttcgagctgtgacatcagcccgtacacgtgctccagttcctcgtcgctgcccgtgttggtgagatccccgccgaagatgaccagttcggcatccgacgcgttggcttcggcgacggccacgcggaagagcgagtcctgtgcattgcccggcgtgacatgtatgtcggtgaaaaagacgacgtgcagcgtatcggccggggaggggcgtgtttgcgccgcggcggttcgggtgtcccgccgcgctgcgtgatccgccgtcgcggaggctcctgccgcaggcgcatgcacgggaacgagtgccgacaggcaccacgccatgccgaagcacagccggaggatttgatttttcatggccgtcgaggtaagttttaatgcggtaaggtacgaaattcagggcaaaaaacatatctttgtgccactgaaaaatacagacatatggctaaaaagatcatgctgctcggttcgggcgaactgggcaaggagttcgtaatcgcggcgcagcggctgggacagaccgtcgtggcgtgcgattcctatgcaggcgcccctgccatgcaggtggccgacgcctgcgaggtgttcccgatgctcgacggcgatgagctcgccgccgccgtggcccggcaccgccccgacgtcatcgtccccgaaatcgaggcgatccgcaccgaacgcctctacgacttcgaacgcgagggcatccaggtcgtgccgagcgcccgcgccgtcaatttcacgatgaaccgcaaggccatccgcgaccttgccgcccgggagctggggctgaagaccgcccgttatttctacgccacgtcgctcgccgaactggaggaggctgccacccggatcgggttcccgtgcgtggtcaagccgctgatgtcctcctcgggcaaggggcagtcgctcgtcaggaatgccggcgaactggagagagcctggcactacggctgcgaagggtcgcgcggcgatatccgcgagctgatcatcgaggaattcatccgcttcgacagcgaaatcacgctgctgaccgtcacgcagaaggacggcccgacgctcttttgcccgccaatcggccatgtgcagaagggcggcgactatcgcgaaagtttccagtcgccctacgtggcaccggaacacctcgctgaggcgcagcgcatggcggccgccgtcaccgaagccctgaccggtgccgggctgtggggcgtggaattcttcttgagccacgaaaacggggtttatttctccgaactttcgccgcgcccgcacgacacgggcatggtgacgctggccgggacgcagaacctcaatgagttcgaactgcacctgcgcgccgtgctggggctgccgatccccgcggtgactttcgaacgcctgggcgccacggccgtggtgctctcgcccctggcaagccccgtggcgccgcgctacgaggggatcgaccgggcgctggcctccgatccccgtaccgacgtgcggatcttcggcaaaccctcggcgcgcgtcaaccgccgcatgggcgtcgtcgtgggctatgcgccgctgggcgacgacctcgatgccctacgcggccgggtgaaggccgcggccgccgaaatcaaagtcctcgaaccttaaaaacctgtttcgatatggcacaatatgcaattatttcgaccgagaaaggcgacatgaaggccgagctctatacggaggagacccccggtacggtggcgaacttcgtcgagctggccaaccacaatttctacgacgggctgaccttccaccgggtgatcccgggcttcgtcatccagggcggctgcccgcggggcgacggcacgggcggccccgggtacaagatcaaatgcgagacctcggcgccgcgccagtaccacgaccggggtgtgctctcgatggcccatgccggaaaggacacgggcggctcgcagttcttcatctgctgcgcccgcgagtcgacgcagcacctcgacggccgccacacctgcttcggccgggtggtcgaggggctggacgtcatcgacgacatccgtcccggcgatctgatcctctcgatccgcatcgtggaggagtaggcataccgcccgcgtgtacatgaacaaagccctccctgtgcggagggctttgtccttgccccccccttatatttttttcaccatttcgaactgccgccccgtcacggcgatgttcgccgcctccaggaacgccgttaacgattcgcagccggcctcggtgttaatgaccttgaccgaatccgccttgttgagccggagcgcttcccgcagcagcgaggtggcgatcccccgtcgcctgtaccgcttgtcgacagcgatcagggcaatgtcgcccgaggcgggttcgaagatgcagtatcccgcctgtgtcccctctgcgcgggcgctcagcccggcgaagtcccccgcagcccgccttatggcctcggggctgttctgccaggagggcatgaaatcccagaactgcgggtcgggggcgaaccgtcccacatcgacgggcattaccgtacaggcaatgtccgggattttcgcgccgaggtgcacgtgcgcgccctgttgtatggaataattgaattcacgcgccgtttcgaacccgagcttccggtagaccgataccgcctttgtgttgtgttgcaggacttccagcaggtattgccggattccggcctcccgcaagtaggggatggagtgttcgaagacctttgcggcgagcccctgcccgcgataggcttcgagggttcccgtgccggtgtcgtaggctgtcggcaggccgttgaaattccctatcccgttcagggtgaacgcggcgatccgctccccgtcgaacgcggcgaacgacaggcggggatcgaaaccgcgcctgcgcagcatgcgccggagctgtgttttgtccagttggacttcgtaatcggcgaatgcctggccgaatgcctcggacagcgtgccaaagctcgttttttccagtgattttatctccatatgcgtttgctgtggttttcggcgggtatggctccggatgcggctgcgtcttcctcttccaaaggtagctattttcaggtttttcctgccgtgggattgcgcttttttttacggcggctccgattgccaccgcccggcatcggacagaaaaaaactcccctcgggaaccgatgtccgcaaggggagtgccttattccgtatcgctcgggagttatttcccgaacttggcgatgatgttatccgtagcttttttcagcaattcctcggggcagcagagggtgatgcggatgtaacggttgccctccgagccgaagatgccgcccggggtcaggaacacgtcgcatttgtccatcacctcgtccgagaacgcaaagctgtcgccttcgtacgattcgggcagctcggcccatacgaacaggccggcctggtgctcgcggtatttgcatcccagcgcgtcgagcagcgcataggcctgcttctcacggccgtaatagatgccgttgagctcctcgaaccactcttcgcctagtgccagcgccgtgtcggccgccgcctggatcgggtagaacatgcccgagtccatgttcgacttgaacgtcaggatcgagtcgatccactccttcttgcccacgacgacgcccacgcgccagccggccatcgaatggcctttcgacagcgagttcatctccagtgcgacgtcgcgtgcgccctcggcctccatgatcgagatcggggcggcggcattgcggatgaaactgtacgggttgtcgtgcacgatcaggatgttgtgccgggcgccgaaatccacgattttctggaacagctccatcgtcggggtctggcccgtcggcatgttggggtagttgaccagcatcatcttcacgccgtccaacccggccttctcgatcgcctcgaagtcggggtagaagccggtctgtttgttcagcgcatagggaaccatctcgccgcccgagaggcgcacggcagccgagtaggtggggtagccgggattgggcacgagcaccttgtctcccttattgaggaacgtcatgcatatgtgcatgatgccctccttcgagccgatcaggggcagtacttcgttgttgtagtccagttccgtgcggtaccacttcttataccactccgcaaaagccttgcgcaggatgggctctcccttgtaagacatgtatttgtgtacgtcggggcgctgtgcctcctttgcgagtcggtcgatgaccgactggtgcgggggcaggtcggggctgcccatagcgagtttcacgatctgacggcccgttgccgcttcgatttcggcgatctcgcgcagacggcgcgaaaaatagtactctccgatgccgtccaaccgatgggaacgggcgatgttgactgcttttgccatagtataagggtgtttggatttttgccagcagcaaagataggtattccgattaaaatttaaaagccatcgttgaattttatctgccatccgactctctccgatgcttcatttcccgcccaaaactgcttttgagcgacatgcgggacgggtaacagttcgtaacattttttacgaaccaccccgcttacagcgcgaagaggatgaatatctgcgccgtcagcacgcgcaggaacatcactacaggatagaccgtcgaataacccacggccggcatgtcgttgcccgccgtcgcattggcgtaggccagcgccgggggatcggtcgtcgatccggcgataagtcccatcagcgtgtaatagttcattttgagccacagccgcgccaccagcgcgacgattatcagcggcaggacggtgatggtgacgccgtatccgatccagcggtaaccgccgtcgacgatggcgtcgatgaacccgtcgcccgcgccgatgcccaccgccgcgaggaacagcgcgatgccgatttcgcgcagcatcaggttggcgctcatcgtagtgtaggtgaccaggtggaaatgcgtgccgaagcgtccgatcaggatggccacgatcagcgggcctcctgccagtccgagcttcacgggctggggtacgttgagcagcggaatcgaccccagcagcacacctaaagcgatacctacgaagatcgtcaccaaattaggctggttcagcttcttgagcgagttgcccaatacgtcggccacctgcgccacggctttcgcgggccctacgaccatcacacggtcgccgacctgcagttccaagccctgataggggatcagatcgacgcccgcgcggtttacgcgcgtgatggtgatgccgtatttcgtgcgcaggcgcaggtcggagaatttcttgccgttgagcgacgatttcgtaatcaggatgcggcgcgacaccagctcggcattgggcgtattgttgccccactgctcgtcggtcatctccacgcggcggccgaagaaggccacgatcgcctcgatgtcctcggcctgcgagatcagccacagccggtcgccgatatgtatcacgctctccgcatcggccatcgagatcgttccgtcgggacgcaggatgcgcgatatgacgaactgacggttgatcaggtcgcggacataggccaccgtgcggccgtcgagcgtcttgttggtgaattcgaccgaaaccttgtcggcgagcttgtgttcacggctcagcgccgccagcccctcgtcctccttttcgaacttcacgcgcagggcgtagcggatgaagatcatcgtgaatatgatgcccacgacgccgagcggataagccacggcgtaacccagcgcgatcgtggggtcttcgattcccgacgcatcggtgtatgcctgctgcgcggcacccagtccgggggtgttggtcactgcgcccgaaaggatgccgaccattgtcggaatcggcgtgcccgtcgccagatgaactacataggccgtcgccacgcccagcagtacgatcgctacggcacacatgaccagcgtcatgccgccgtgtttgaacgacgcgaaaaatcccggtccgacttgcagaccgatcgagaagacgaacagaatcagcccgaattcctgcacgaagtgcctgacctcgccgtccaccgtcattccgaaatgactcaggacgatacctacgaacagaatccatgtgattccgagcgagatgccgccgattttgacttttccgagcaaaatgccgatggtgatgaccaatgcgaaggtcagcacggcatgggcgatgccgctgccgaagaacaaggtgtgtaaccactccatattaacctacttttgtacgaattgccagcaattttgcaaaagtagtatttattatagaatttaaaaaactttgatgcgacttttatgagcccgatatatgcccgtccgtctgccgcagggcttaccgctaatacagataccgctccatgagcggcatcagcagcgccgtagccagtcccatcagggccatcgccagtccgctcagggctccttcgacggcccccatctcgatggcgcgcgccgtaccgatgccgtgcgccgcggctcccagcgcaaacccccttgcttcggcatcccgcacgccgcagcggcgcaggatccactcgccgaagatactgccgaaaatacccacgcagaacaccacgaccgacgtgacggggacgatgccgcccagcggccccgaaaccgacacggcgatgggcacggtaaccgacttgggggctatcgagttgagtatctcgcgcccggcgccgaacgccatggcgatatatacgacgctcagcacgcccgccacgcaacccgcaagggtggcgatgccgaccgggagcaggcttccgcgcagttgttcgacctgttcgtagagcaggtagccgagtgcgaccaccgacatgcccagggcaaagtcgaggatgcccgtggcttcctggtagcgggcatagccgatgtccgccgcacggaggaatacgatgacggcgacgaacgtgagcagcacgggatgcagcagcggcatccggatgcggcggtagaccgccgtcccgaggcagtaaagccccacggtgagcgtcagcaggaagaggtcggtggagaggaatgccttgtcaatcattgtccggggtgtttgcggcggtttcacgaaggtgccggatgcggcgtaggcgcgagcggcggttcaggctctggaacgtctgccccgtcaccagcaggacgatgatcgtcgaggcgatgcccgagattacgatcgcccacaggttgtcgaggatcacgcggtaggagtccatcagccctacgccgtaggggacgaagaagagtgccatggcccccagcaggaaccgggctgcgggacgtaccgtttcggctttgacccaatgcaggcacaaggctgcgaagagcaggatcatgccgatgatgttacctgaaacataacctccggtaaggatgctcaatgcattgccgatcagccagaaaagaaggatgtaaaaaagtccgggcattgtgtgtgcgcttgattccggggcaaagatagcatttccggccggaagttgttgcgcccgcctgtgattttatgtgcggcgtgtctttttcaacgggcactgcgtactggcgcacgatgcgcatcccccgcggcgcctgcctctgaagaagcaccacatccgccgcaccacgacggctgcgaccacgatgccgatgccccagacagtatagtcctgccaccccatgtcagagccacatgaaaaggcggtagaccgcccatgctacgacccacgccagcaccgtgttgtagaccacggctgccgtggcccatttccacccggcctcggcgccgatggcggcgatggtcgcaatgcaggggaagtagaggaggatgaataccaggaaagccagtgccgatgcctgcgtgaagtcgccgcttgccagcagcttgcgggagaggttcacggtttcctcgtcttcgccggccggctccgtgaccttgcccgcctgcgtgtccgtgccgacctgtgcgtcagtgttttccgcaatgcggatcgccgtctgtccgtccgccccgccgataatggcgatgctgccttccggcaggttcccgatctcgatcttttcgcccgatcccgtgacgatctccgtcgtgccggcaccgggggcgcttgccgcctccccgccgtcgggatagagcacgccgagcgtgctgacgacgatctccttggccgggacacccgacagcagtgccacgcccgccttccagttcagccccagcggagtgaataccggcgcgcagctctgtccgagacgcccgaggtaggagttctcgtagtgggccgccgtgccgccctcttcgctgcgggggtaatagctcaggaaccatacgaccatcgaagcgatcaggatcatgcctcccatcttgcgcaggtattgcgcgcatttgtcccacatgtgggtgagcgtcgtcttccatgtcggcaggcggtagggcggcagctccatgacgaagggcgtttcgtccaccgggaacatgaagcgccgcatcagccgtgccgtgacgacggccagtaccacgcccagcacatagagcccgatcattaccagactggcgtcggcggcgaagaacgtcccggcgagcaggaggtagatcggtattcgtgcactgcatgacatgaacggggttataagtatggttatcagcctgctgcttcggctctcgatcgtccggctggccatgatggccgggacgttgcagccgaagcccatgatcagcgggatgaacgatttgccgtgcaggccgatgcggtgcatcacgcggtccatgatgaacgcggcgcgcgccaggtagcccgagtcctccatgaacgagatgaacaggtagaggatcatgatgttgggcaggaagacgatgactgcccccacgccgccgatgatgccgtcgaccaagaggtcgcgcagcggccccgcgggcagcagcgcgtccacgccgctgccgatccatcccacgagcgtgtcgatccactcctgcgggtaggcgccgaggctgaatgtgcaccagaacatcagccacatcaggaaaaagaagatcgggaagccccacagcttgtgcgtcacgaaggtgtcgatcagcttcgtggccgaggcctcttcgcgtttccccggggtgtaggtctccttgagcgccccctgaatgaacccgtatttctggttggcgaaagccgtctcgacatcctcgcccagggcttcggcaatgcgtttggcctcgcggtcgcggatctccgcccactcggggtagcggctgctgccgcgcagctgttcctcgacctgcctgtcgccttcgagcatcttcatggcgtagtagcgcggcgggaaggccttgggcagttcgccgcggtagtcgctcatgtcgtccttgagccgccggagcccctcttcgatgacggggcccatgtttatgtggatgtggcgtacgcgctcgtcctggttctcgtacacggcgatcacggtgtccaacagcgcttcgatgcctttgccgttgcgtgcctcgacgggtaccatcggtacgccgagcatccgtcccaggttgtcgtaatcgagctccgaaccgcgtgaatcgagctcgtcatacatattgagagccaccaccatgcgcgggtttatgtcgatcagctcggtcgtcaggtagaggttgcgttcgaggttcgacgccacgaccgagttgatgatgacgtcgggcgtcttttcggcgatatgactgcggacgtaacgctcctcgggggtataggccgaaagggcgtaggtgcccggcaggtcggtcacctcgaagcggtagccgcggtagtagcggtgcccgctcttggcgccgacggtcacgccgctgtaattgcccacgtgttcatggccgcccgatatggcgttgaaaagcgaggtcttgccgctgttggggttgcccacgagcgccacgccgatcgtgcggctgtggcgcgagatgacctcgtcggccgtggcgcagtcgtcgtccgcgcccggcataccggcggcggggtattcgggggcttgttccggcgttccgcagccgcattgcccgtggcggtgcccgggatgatggcggtggtggtgatgtcctccggcaagatattcgttcacttcgctgtcggagagtacgacgaccatgtcggcctcggtacggcgcagcgagatgtcgtagcccatgattttatattcgatcgggtctttcaggggggcgttgagcagtacttcgacccgctgcccgcggacgaatcccatctccatgatgcgccggcggaagcctccgtggcccgtcaccttgaggatcgtggccgactcgccggttttaagttcggataaacgcattgtcgctctttagttttggcgccaaagatacgactttgcggccggatatgcaatccccatttgtgggtatattcgggcggccttaccacccgccgcccagtgccttgcagaggttcacgtagttgatgtactgctgtgccacgatgttgaccagctccatctgcgactggtagaggctccgctcggcgtcgatcacgtcgaggtagtccgacagcccgctgcggtagagcgcctgcgtcatggtggcgatacggtcgttcgagacgaccagttcgcagtagcgctccgcctgcccgcggtaggtggcgatggcgaccagcgccttctcgacatctgcgaatgccgtcagcacggtttgctcgtaagtctttgccgcctgcgtataacgttccatggccgccagctccgagcggcgcagcttgccgaaggcgaacaggggttgcgtgagcgagcccagcgcatcccacgcccaggggtttgccgcagttaaacctttgatcgagttggatgctattccgcctttggccgtcagtgcgatggacggaaaccttgccccgcgtgcgaccccggcttcggcagccgcctggagcatgtcgtaacgcgcttccatgatgtccgggcgccgctcgagcagttccgacggaagccctacggggatatcggcgggatggcggtttacgagcaggcgcagccccgagcccgtgctgtccgccgcctgcggcgtttcgcccagcaggatgtcgagcgacagccgcgtctgcttcacggcacgttcgtattgcgggatgtccgcctcggccgtgtagaccaggctgcgtgcctgctccagcgccacgccgtccgacatgccgtagcggaacatcgagtcgatcagtgcggcggattcgcgccgcagggtgcagctgcgccgggcgatcgctaggtcgcgttcgtattcgagcagcgtgaagtaggtcgtggcgacctccgcggccagcgacagccgcacgccccgcagcgcccattccgaggaggcgatctgcgccctggccgcccgtttggcgttgcgcagctgcccaaacagggcgatttcccacgagagcgacggttcgacggcgtaggtctgtacgatcttggtctgcggcgtgtattccccctcggccgtgacgcctatgcccacctggggcaggaactgcgcccgcacgacgccgaggttctgccgcgcctcttccacgcgcgaagccgctacggccacgtcgcggttgttctccagcgcccgctgcacgaggttgtcgagcaccgtgtccccgaacagccgccaccagtcggaggcgagtgccgcggtgtcccgcgggaagccttcgccgtagaggtagccgtcgggcacgtcgatcttgggcgggtagaaacggggtgtgcaggccgcgcaggcgagtgcgaagattagggtaaggtatccggttttcatagtttttcctcctgttttttgcgttcgcggcggcgttcgaaattcccgatgcgccccacgaaatagtagagtgccgggtagacgaagatgcccagcagcgtggcgaacagcatgccgcccaccagtgccacgcccatgatgttgcgtgccgtggcgtagaccccgctggcgaataccagcggcatgacgccgaggatgaacgcgaaggcggtcatgatgatcggccgcacgcgcagtttggcggcgccgatcgcagcgtccatcagcgacaggcccttttcgttgaacagccggtcggcgtactccacgaccaggatggcgttcttggccgccaggccgatgagcatgaccagcgaaatctgcatgtagacgtcgttgacgaagaaggcgtccaaaaggtgcgataccccgatgaagagcacggcgcccagcaccgcgacggggacgctcatcaggatcgccagcggcagtccccacgactcgtagagcgccgcgagggccaggaagacgaacaccagcgccagcaggtagaccagcccgcccgtcttcgaggcattggcttcctgataggaggtgccgctccacgccgtgccgatgtcgtcgggcagcacctcgccggccgtacgggtgatctcctgcatgacggtcgtggtcgaggcgcgcgccgcgggcgtcaccgtgagggagatcgagcggtagaggttgaactgcgagacgtattccacgcccaccgtgtcgaccacctccacgaacgacgatacgggcacgctctcgcccgaggacgaagcgacgtagtagttgtcgagcgagcgtttgtcgaggcggtattcgggcgccgcctggatataggtctggtagagcttgccgaagcgcgagaagttgttgatgtaggcgccgcccagcagggtcgtcagttcgccgtacaatacgcccaggtcgacgcctgcggccagcgcctgctccttgtcgatgcgcaggcggcgctggggtaccccggcgttgaactgcgtggtcaccgaggcgatcgagggctgtttgcgcaacgaatccatcagccgcccggcctgggcgagcaggtaggccgtaccgcgcccttcgagatcctgcacctcgaccgatacgcccgaggtgatgcccagcccggggatcgagggcgggatgaaggcatagcactcggcgcccggcacagcgacgtacagctcgtcggtgagtttctgtgcgatctccatggccgagagtttgcggtcggcgaagtcgaccagcgagacgaagatgatgccgctgtcggtcgaggcgatgcccgccatcatgttgaaacctgcggcaaacgaggtcgaggccacttcgggcagggtgcggatcacggcgtcggcctcctccatggcggcctgcgtgacgggcagcgccgaggcttcgggcgtggagaccatcaccatgacgtagccctggtcttcctcggggaggaacccggcgggcagcttgcgccatacgacgaagatgaccgcgagtaccacggcgatgaatacgcccgtgcgcgtcacgtggcggataagcgtcggcgtaaaggccgtatagcgatccatgttgcgggagaaccagcgattgaaagcggcgaaaaagcctttctgcggcggttcgcggcggcgcagcagcagggcgcacagcgccggggagagcgtcagggcgttgaatgccgagatcaccaccgagacggcgatcgtgatggagaactgctggaacaaccggcctgtgatgccgcccgtgaacgacacggggacgaatacggccagcagcacgaccgtcgtggcgacgatgggcgaggcgacgttcttcatggcttcgagcgccgcggcgcggggccgcatgccggcggcgatgttgacctgcgcggcctcgacgaccacgatggcgtcgtcgaccaccaggccgatggccagcaccagccccagcagcgagatgatgttgaccgagaaccccagcagcgggaagagcgcgaaggcgccgatgagcgagacggggatcgccacgagcgggatgacggtcgcccgccagtcctggatgaagaggtagatgatgaagatcaccagcaggagggcgatcaccagcgtgtggaatatgtcccggataccggcgtcgatgctggtcgtggtgtcgacgatcgtggtggccgcaatgccgtcgggcatgcgtttttcgagccgtgccatcgccgccctgaccttcttgcccacctccacggcgttgctgccgggctgctggtagacgacgatcatggccgtgggcttgccctcgaagagcgagctcacgccgtagctctggctgccgagcgaaacctcggccacatcgcacagccggatctgctggccttccgaagtcgtgacgaccacgatgtcgccgaactgcgcgggggtggtgatctgcggcggcatggtcaccgtataagtataggtggtgccgtcgggcgcaggttcggctccgaactgcccggcggggtagatgccgccctggttctcgatggctgcggtgacggccgagaccgggatgccgtagtatttcagcacgtcgggcttgagccatacacgcatggcgtactcgccggcgcccatgatcgacactttgcctacgccgtcgatcttgagcagctcgttctggaggttgatgtaagcgtagttggagaggaactcggcgtcgtagcgtccgtcgctgtgcagcgagaagaccagcaggaagccggtcatggtcttgcgcgtggtgacgccctgcttggtgaccgtcagcgggagctgtgcggtggccgacgagacgttgttctgggtgaagatggcgtccaggtcggggtcggagcctatgtcgaaggtcacctgcatgaccatcgaaccgtcgttggcgctggtggtttgcaggtagagcatgtcgcttacgcccatgacgctctgcgccacgggtgtcgccacggcgttgttgaccgtctcggcatcggcgccgtcgtacgtggccgagacctcgaccacgggcggcgtgatgtcggggtattgttcgatcggcaggttcaggatcgaaatcagccccacgatgacgatgacgatggccagcgacagggcgaagatcgggcgcgaaacgaaaaatttctccatggcgtcactttttttcggggatgaccttcataccgtcgtgcagtttctgctgtccggccgttaccaccagttccccgtcgatgagcccttcgtcgatgcaccacatcgacccgtacgtgtcacccgggatcacccggcggtacatggccgtgctgtcggtgcgcaccacccagaccgagttgacgccctgcgcctggctcacgcacgcctgcggaacgaccacgcgcggccgtacggggcctacgctggcctccacacgggcgaactgcccgggtttgagcgaacggtcggggttggggaacatcaccaccagcacgagcgtcccggtcgtgctcgacacgtccttgcgcgtgtagtcgtaaagcccctcgtaggggtataccgtgccgtcggccagcatcaggcggatgtcggtaagcagccccgcgttgtcgaagatcgaggtgcgcggccccgccgcgcgcaggtattgcgccatagggatcgccacgtcgacggtcagcgtatcgatgttcgaaatggtcgtcagcacgccgaattgcgtgcccggccccacgtagtcgcccacgtgtgccgaggtgttggagatgatgccgtcgatgggcgagcgaagctccgtgtagccgacgttcatgcgggcgctgctgagggtttgctcggccgagcggacggtggcttcggcggctttgtactgggccgtatactggtctaactgcgactggctgatggcgttgatcctggccagcggcacggcgcggtcgtagttgttgcgggcttcgacggcctgtgcccgggccgattgcagggcggcctcggctgcgagcatcgaggtcgagagctggtcggggtcgatcgtgaacagcagttgcccgcgcttcacgggcatgccgttggcgaactgcttcgtaagcaggtagccgttcacgcgcggctggatcaccgcgtcgaaattgctcgccaggtaaccgatgaactccatgcggttgggaacgctgtccgtgacggcttcggccacgccgaccctgagcgggggcatggcggtttggggcttgtgcctgcggcaccccgcgaggagtacggcgagcagccccgtgataaggaaaagtctgttcataccgggatgttttacgcccttgcagggacaaaaaacgtaccgtgaacagggtgagagttagttaaaaaggggattttatgctaaaaaaggctgatttttttggctgcaaatgatgatgtttagataatttttatatctttgcgttgataacaaacccaaattaatataaaagttatgaaagaattagtagcaaagatcaatgccgaatacgaagtattcgcagcaaatgcagcagcacaggtggagaaaggcaacaaggctgccggtacccgtgcccgcaagtccgcactggagatttcgaagctgatgaaggaattccgcaagatttccgtagaggctgcgaaataatcgctgaccacgtagacgcaacaaaggctgtccttgggggcagcctttgttgttttcgtgccgtatgcggatcgttcccgcgataagccgcacggtcgcggcgcaggtcagggctcgatgccgaatttgcggaataccttcatatcctctgcggagaggcccgtcttgcggaacggtacggcctcgttgtggtcgttcaggtaacggcgcggccgggtgcggtcgtagtccgcgttgaccagcgacacgcccgtgtcgatgtaattcccccggatcgaagccatgtcggccatggtgtggaacagcgcatgggtcgtggcgggcgccgtggcgtttgcctcggcggcagcggccttgtcggggaaattctgccggtaagcgtcggagaaccacgccagcgaagcgacgtagagctggtaggccgtcgtcgtgggcgaagcgtgcaggaaccgttcgcgcctgtcatcgaggatgtcctcgccgtggtcggcgcagtagagcagcgccgacgaagtcccgcgcagtccgcgcaggtactggatcgtttccgagaggaagaaatccgtgtagaggatcgaattgtcgtaggcgttgcggagcgtctgcacgtgttcccgcgagatcgccacgtcgtcgtcggggcggaaatgcgcgaactcgcgcgggtaacgctggtggtagctgaagtgcgagccgtagcagtggagtatgaagagcatcttctgcgccttgttgctttccacggcgcggcgcacctcgtccagcagctgcatgtcgtggcgcggcgagcggatatagatcaggtggtcggcgtcgcgggcgagtttgtcgatcatggcgccctgcggcgactggttggagatgaaccaggtctcgaaaccggcctcgttgaacagcgccgggagccccttgcggcggtagagttcgggatgttcgtcggtcgcaacggacgagaggatcagcggcacgctcttgtgcgtggtgttgctctgcgtgagcatgtcgcggaaaacgaccaggtcatcgacctgcgaaaggcggggattcgtctcgcggccgtaaccgtacagctgccagttcatcgcacgcgaggcttcgccgatgacgtagacgtatatctcgcgccccggtgcctgggccgtgcgcgacgcgccgtaggtgaaatcctccgaggtctcctcgaaattgtaggccttgcggaattccgtggcactcaggtgtacgttgtagagcacgttgagcgggaagatctcgtcccgcagcacgtgccggtcttcgctcacgcggtaggccggccacagcgccagcatgcccagcgccatgagcaccgccccggtcagcccgacgttcatgcgcgtggtgcgcgatatctgccgtttgtgcccgatttcgcgcgcggcgaaccacagcagcggcaggtacatcacgcagaccaggatcacggaggggtagatgttgctcagcagctcgcccgcctcgcccgggttggtcgtcaccaagttggtgaacatgtccgtggcgatgatcgagttgccgaagaggtacagcagcacgatctggaacgcgcacaggaaaatgaacgggaacgccagccagatcattatgcccgaacggcgcagcgccacgctccacatcatgtaaaatcccaacggcatcagtatcagtgcctcgaccgtccagacggagtagggttcggtattggccagcacgcagttggggataatcagcgcgacaaagaaatagacggtcagcagcgtggtgaaacggctgcgggttttgaccgtccgttgtcggttatgtttgttcggatcagcattcatatctttactaacctaaaaagcttcgttcaggctcagcaggaatccgctggttttcttgccgaagccgtaatcgagccgcacattgacccgttttttcagctcccatcgcaggccgacgccatagttggaaagcgtttccgaccagtcgaaccggtcgagactgttgaatacgttgccggcaccgccccataccgtgcagccgatacgccgccagatgcgctggcgcaactctacctggaaggtaatcatgtcgttgtccgtatagcgcccctggtagtaaccgcgcatgcgctgcgaaccgcccatgcgggccagcatcggccacggggtgccttcggagttgaactccgcgtagaggtcggtggcgatcagtccacctttccacacctgccggtaccagtcggccgtgaaggtcgtgcgccacagcgacttgccgcagttgccaagccccttggcgtagaaagtctcctccaggctgacatagatgccccggtacgggttggggatgaagtcgcgcgagtcgtactcgaggatggctccgatgccggtggcagtgtagtgcgttttctgcccgtactcctgcaggtagccctcgctgcgggcgtcgaatttcttgccctgcgtgtgctcgaagctcaggatgccgcccacataggtgttgggcagcacgcggtgcaggtagcgccccttcacgaggtagcgtttttcgttgtacgacccctcttcgttataccgcccgtcgtggtagccgatgccccacatgtcgcggggcgccgaggcgaacattaccgtgtagtcgatgcgtttgctgttgcgggcgaagatgttgttgcccgtgacccccagcgcatagaaccccgagatcgagacattggcgaagatcgagatgtccgagggtgccgtcaccgagtccgtgcggtcgatgcggtagaggcccgcggccagcagcccgatgccgaggctcgtattcttcgagtagctcgggccccccgcgaaagtgaagtcgatcttcttttcgaacgtgcggtcggtggtcgaaccttcgaaatattttacgacgcgacgcaggaacggcgggcgcttttcggcctgcggttcctcttcctgccccggaagcggggtgtatgtatagtgcagcgtatcgctgccgttgatgtatacctcctgctcctgtgcccgtccgtgcagaacgaaacccaggacgaagcatacaacggctatcctgcgcagcatccggctatttgtacttctcgattgtttcgtagaaatcggccttgtcctgctccgagagcacgcccttgcgcaggaataccagctcgccttccttcgatacgatcatcagcacgaactggttgttgcagtcgcccagctcccatgccgtgctcaggatacgatcctggtcggccagcaccagcgcgccgttcttggccgtgcgcttcttggccatgttgcgggccatgccgttgggaaccatcggtgcatccttgaggttcatcaccccgaagccgtagatgttctccccctgtgcacggtggttctcctccagctcgaccgtgaagtcgttgttctgcttgtggcggtcggggtctacatagaatatcatcaggttcttctcgccccagtacggcaacttggcaggtttgccgtcgaggtcgagcacttcgacattgttcactttgcgcggcagttcctgtgctgcagctgcggatgccgtgagcgagagggccgccagcatcgcgattactttcatcttcattatattctgttttttggttttaaatgaaaacaaatcgggacaaagttacaatatttccgccaacataccgaccggcaggcgatctaatattgttctcttcgttcaattttttcgtttcgcagggaaaagggccgtgtcgaacgcatagagccccccgccggacatggccaggaacacatagacccccagccaggtgaatgccagcgtcccgaagcccggggcgccccagagcagcaccccgaggattcccgccgccatgacaatggccgatgcccgtacccacagacccatgattatcagggtagcgagcaccacttcgaccagcgaaacaatgacgaatacggccgggctgccggcgaatgcgaaagagggatacgagttgacgatctcgttgtaatcctgtattttgcctatgttgtggaagaacatcatgcctcccgcgaacaggcgcatgtacaacacggcccaatccatgtgcctgcattgtgcgatccgttcaccgattcttttttccatgccccgtgccgtgcaatttgcattccaaacccccgcacggcgaatatccggcacgccgcaccgcctcaatcgtcctgccgggcgaaagaccagtgcgtatgtacgatctcccaaccgccggacgttgcggtcgtgtaaacttccgtgtagtgcatcctgaacacctgcccgtccctgagaacctcgtaatcgtatgccaggacggcagcgcccggcgacaaccgcacgacgggatcgatcatccggtacgtgtcgatcctgactttgcccctgaccgtgccgtagtactctccgagggctttttgccgatgagtttgcgtccgagagccgggtcgaaataaactacgtcgccggacgtgagttcgaggaacccgtcggggtcgccctggttccaccgctccggtgcccgccgttccaatgcgatgattgcggcttcgggagccccgccgcaaggggtgtggttcgtgtttcggtacataaaattgaatttaggatgtatgacgtgtcggacttgttataccgcgggttgtcggcacaggctccgccttttggacgggcagcggcacggcacgacccgataaatttggcactcctcgcgtcttgtactatctttgcggccatggaaacaaagatacttttcgtttgtttggggaatatttgccgctccccggctgccgacggaatcatgcggcacatcgtccgcgaacgcgggctcggggcggaggttgcggtcgactcggccgggacatatgccgggcacacgggcgaattgcccgatgcccgcatgcggcgggctgcgttgcgccgcggttacgaactgacgcaccgtgcccggcagatccgcgaggaggacttcgggaaattcgacatgatcgtggtgatggacgaccgcaactacgagcacgtacaccggctggcgccgtcgcgtgcggatgccgccaggatcttccgtatgcgggagtttttcagccgtcacccccgctgggatcatgttcccgatccctattacgaaggggccgagggcttcgagctggtgctcgacatgctggaagacggctgtgagggaatcctcgcgcacctcgggaaataggctgccggaataccgggcggacgggtgcaggtgtcatttgtcggaaaaccctgccggcaccgcggctcggaatgcgaaacaccggcccggaaatacctggccggagcgttcatgttccggaaatcccttagaaatcgagcccgaagctgatgctgtacgtgttgtgcaacagcgtctccttgcgtgcgatcaggtaggcgaaatcgaggcgcaggtgcaggaaccgcacgccggcgccgaccgacccgtaggtggggtagtaattccgccgttcgccgtagtggtagcctgcccgcagctggatgagctgcatgaggttgtattcggcgcctacggacatctggaacccgcgcacccgtgccggggagaaatagtagccccagtccgccccgacggttatttcgtgggcatcggagaggaacgtatccagcgccacgcctgccgtgagatccatcggcagcgtatagtccgttttcccgaggtatccgcccaggttgcccagcttgccgccgacgcgcagcgtggagtagctgccgacgttctccagcggcatcgaccatgccgcgctcaggtcgacggccagtgcgtcggccgtgtcgtcggggcgtttgaggtgcatgtagcgccccacgatgccgacggcccacctgtcgcccaggcggcgcgaatagcccaggtcgacggccatgtcgttgttgccccgttcgcgcaggtattgccgccagccgatctgtgccaggttgacgttgtcgaaccggcagaatccggtcacggcataataatcgaattcgccctgcccgtagtaggacgaggagacctgcgagggcatctgcgaaaagatggccgtcgccgagttattatagatggcatgcgaacccgacagggtcgtcatggctacgccgcccatgccgagtgccttggcgtcgggtgtcgggagcgtagcctcttgcgccgtcgcatacagcgcggcggcgaggagtgccagggtggttgtcagacgtttcatacggcaaatatagcaaaaaagatgcaacttgtattccggggcgtcggctgcgcccgttccgcgggcatgagagccgcttcaggaacgctgcgaccggctcgaagaagtgcgaaaaggcttctgccgacggagcgtaagcgtgcggaactcccggtagggtacgcatataagaaaagtgcccgccggatttgtccggacgggcactttttcttttcggccggtgtctcgcggcgcggtttttcgtatttctatggtctgtaccgtcttttagcagttcatcgcgccgcagcagtggatcacctgcccgctgacatacgacgagagatccgacgcgaggaacagcgcgaccttggccacatcctcgggcgtaccgccgcggcggagcgggatctgcttgtaccagccttccttcacctcgtcgggcagcttgtcggtcatctcggtcatgatgaagcccggggcgatggcgttggcgcggatgccgcgcgggcccatctccttggcgatcgacttggccaggccgatcatgccggccttcgaggccgaatagttgcactggcccgcgttgccgctgacgcccaccaccgacgacatgttgatgatcgaaccgctcttctggcgggccataatgggcgtcacggcatggatgaagttgaacgccgacttgaggtttacggtcagcacggcgtcccactgcgcctcggacatgcgcatcatcaggccgtccttggtgatgccggcgttgttcaccaggatgtctatgcggccgaagtccttgacgatccggtcgatgacctcatgcgtctcttcgaaattcgccgcattcgaggcatagcctttggccttgacgcccagcgccgcgatctcggcctcggtggccttgccgttctcgtcgatcgccaggtcggtgaacgccacatcggcgccttccttggcgaattcaagtgcgatggccttgccgatgccgcgggccgcacccgttacgacagccacttttccttcgagtaatttcataactttcaacgtattaagagtttcggtaaaatattctgtttttccttttttcgtccaaaagacgaacaaagttaagaaaaatattttgaaacgtcccgccgccgccggattttcgccaaatattactaactttaccctccgtaaacggaatttcgtaaaacccttaacgatatgaaaagagacacccagattttcgatctgatcgccgccgagcgcagccgtcagatgcatggcatcgaattgatcgcctcggagaatttcgtcagcgaccaggtcatggaagccatgggctccgtgctgaccaacaaatatgccgagggctatcccggggcacgctattacggcggctgcgaggtcgtggacaaggtcgagacactcgccatcgaacgcatctgccgcctctacggcgccgaatacgccaacgtgcagccccactcgggcgcacaggccaacatggcggtattcttcgcctgcatgcagccgggcgataccttcatggggctcgacctggcgcacggaggccacctttcgcacggttcgccggtcaacatgtcgggtaagtatttcaacgccgtgggttaccagctcgacgaggctacgggcgtcatcgactacgacgccatggagcgcaaggcgctggagtgcaagcccaaggtgatcgtcggaggcgcctcggcctattcgcgcgaatgggattacaaacgtatgcgcgccatcgccgacaaggtgggggcgttgctgctcgtggacatggcgcacacggccggcctgatcgccgccgggctgctggacaaccccgtgaaatacgcgcatatcgtcacctcgacgacgcacaagaccctgcgcggcccgcgcggcggtattatcctgatgggcaaggatttcgagaacccctggggactcaccacgcccaagggtgccgtgaagatgatgtcgcaaatcctcaattcggccgtattccccggtatccagggcggcccgctggaacacgtcatcgccgccaaggccgtggcgttcggcgaggcgctcgagccctcgtacaaggagtatcaggcgcaggtgcagaagaacgcccgggcgatggccgaagcgttcgttaaacgcggttacaagatcgtttcgggcggcacggacaaccacctgatgctggtcgacctgcgcacgaagttccccgagctgacgggcaagctggccgagaagtgcctcgtggcggccgacatcaccaccaacaagaacatggtgccgttcgacagccgctcaccgttccagacctcggggctgcgcttcgggacgccggccatcaccacccgcggcctgaaggaggacaggatggactacatcgtcggcctgatcgaccgggtgctgcacgaccccgagaacgaagccaatatcgccgccgtacgcaaggacgtgaacgccctgatggccggctatccgcttttcgcgtggtaaaactccggtaggatgaaagaggtcatcgactttttccgccgcctgcacgacaacaacgaccgtgcgtggttcgacgcccatcgcgccgaatgggcgcacgtgaagggacgcttcgcggctttcacggagcaactcatcgccgggatcgccgagttcgaccctacggtgcgcggcctcagggtgcaggactgcacctaccgcatcacccgcgacacgcggttcagtcccgacaagtcgccctataaaacatatataggtgcgtatatcgcgcccaagggcaagaagtcggggtttgcaggctactatttccacatcgaaccctgctgcgacagcctcgtatggagcaacctgctttcggcggggctctactgccccgagccggtcgtgctgcgcagcgtgcgcgaggagatcctcgacaacggtgcggaaatcgcggcggccatccgcaaggccaaggggttcggcatcgtcgaagagaacaagctcaagcgggtgcctacgggattccctgccgacagtgagtacgccgagatgctgaagctcaaggatttctatatcgccaagaagatcaccgaggagttcctgctctcggacgacctgctggagcgaaccctcgcggagttccgccgcacgcagccgttcatcgcgatcctgaaccgtgccgtgcagttcgcccacgaagagatgatgtgacctgcccgtgcaataacgcaaccgccttcccggatcgggggaggcggttttttgtcggcgggagcctccggcgcggcacttcgcagggaatcgcatgtacggcgggcgccatctgccggaggggtcgtcagggcgggacggcttccaaccgtttcgccgtcggcgaccgcacggccgggggaagaggggcatgaaaaacagctccccggcatcctgcggaaattcgcaagggatcccgaaatcccgtttcccggcgggacggcaatttccatccctgcagcggtcgtgtccccggttcggtgccgtggccggaagctccgcccgcgacaaaaaacggcgaaatccgccgccgcccgaaaaaaacagggcgattctttgcctgcggaataggtgattcgcgcgctttccttgtattatatacaagaaagaaagctatgcgacaacaaatacagaaattcggcagggccctgagcggcatggtcatgcccaatatcggcgcgttcatcgcgtggggattcgtcacggcgctcttcatcccctcgggatggtggcccaacgcccagatggcacgcctggtcgacccgatgctgacctacctgctgccgttgctaatcgcctatacggccgggcgcaacgtcgccggcgaacgcggcggggtaatcggggccattgccgccatgggcgtcatcgtcggcagcgacatcccgatgttcatcggagccatggtcatgggcccgctgggcgggtatacgatccggtggttcgacaaacttacgcagggacgcataaaggcgggcttcgaaatgctcgtgagtaatttctcgataggcatcctcggtatgctgctggccatattgggctattgggtcatcggcggtgcggtgacggggctgacgctgctggtcagcaacggcgtggaggtcgtgatccgccacggactgctgccgctcgtgtcgcttctggtcgagccgtccaaggtgctgttcctcaataatgccctgaaccacggcatcttctcgccgatcggcatcgagcaggcccgcgaaaccgggcagtcgatcatgttcctgctggaaacgaatcccgggcccgggctgggcgtactgctggcctgctggtttttcggccgcggcaatatgcgccagtcggcacccggcgccgtaatcatccagttcttcggcggtatccacgaaatctattttccctatatcctggcgcgcccggcgctgatcctcgcccctgttgcgggcagtgccgccgggctgctgttcttttcgcttgccggggccggactggtggcgccggcttcgcccggcagcatcatttcggtgctggccatggctcccaaaggccagaccctcgtcgtgctggccggggtgctgatctccacggcggtgtcgctgctcatggcggcgcccttcgtccggcgtgccgccgctgcggaggatatgccgacaggcggggttcccgccccgcaggccggggcgcccgacgtaaaggccgcgcagcacttcccggcacatatccgcaaggtggttttcgcctgcgatgcgggcatggggtcgagtgcgctgggtgccacgcggtttcgaaaaaggctctccgatgcgggcatcggcacggtggtcggcaactgtgccgcggacggcattcccgccgatgccgacgtcgttgtctgccagtccgtgctggccgggcggatcgccggatcggcacatggagccgcgctggtcgtgatcgacaatttcctggcagacccggccctcgacgccctgttcgcctggttggcgcagcaggacggtgccattcaccgaacaggcggcctgcctgccgggacggcggacgcacagccctccgacgccggcctgcgaagggcgggcgatgccccggattgcatggcctccccgcagccggacgatgccgcggggcggtctcccggcgaggtcttgcgccccgggaatatccggacgggactttcctccgaacccaaggaagccgcgatccggcgggccggggaactgctcgcagcgggcggatatgtcgaacccggatatgcggatgccatgctgcgccgcgaggaactcgcaacgacctatatgggcatgggcatcgccattccgcacgggacgtccgacgccaagaagtgcgtcctgcactcgggcatcgtggtgctgcaataccccggcggggttgcgttcggcgacgaaaaggcatacctcgtagtgggcattgccggcgtgggggacgcccacctcgatatcctggcccggctgggcgaggtattcggggacgaagaactgttgcggaggctgacgaccgaaggcgatccgcaggcgatatacgaagcactgaaataactacctatatgacaaccggaaaagtaacgatcaccgccccgaacggcatgcatgcgcggcctgcgggcgaacttgtaaagttaatcagggggcttgcgcccgccaggatcaccctgtgcaccgcggcccgggaggccagtgccgtgagcattctttcgctcctggcattggggctcaaacacggcactgaagtggaagtctgcgccgagggcggcgacgaagccgccgccgtgcgggccgtaacggatttcatcgccggcatccgcgaatgatgttcacgatccgaggaatcccgacggcggggatcgccgtcgggacagcgttcgtgctgcaacgccgcgcatccgccgctgctacggccgcggcaggcgaccccgtggccgaggccgggcggtttcatgcggcgctggagcgtgcgaaggcggagctgtccgcactggcagaaggcgaggctgttttcgccgcccatctggagatggccggcgacccgatgctcgccgggctggtcgagggaaggattgcggaaaagcacctgtccgccgggcaggcgctcggcgaagcctgcgaagaggtgtgcggcatgttcgcggcgctcgacgacgactacctgcggggacgtaccgacgatgtgcgggacgtatgcgcgcgtatccgccgcgtcctgtcgggcgaaaccgcccacgacccctttgccggactggctcccgggacgatcgtggtggccgacgaactggcgccttcggatacggcacagatggatttcggcagggtcgccgggctggtgacggcacacggaagcgtgacgagccatgtcgcgatcatcgcccggaacaagggcatcgcggcgctggtcggcgttgccgggtgcatgcggcaggtcagaaccggcgaccggctgataatcgacggggagcggggcgagctgatcgtcgaccccgatccggctaccggacgcaaatacgccgcacggctcgaatcgctgcgccaggatgcgttccgctgcgcggcggaggcgcaggcgcctgccgttacgcccggcgggcggcggatcacggtgctgggcaatgccgcgaacgtcgatgaagtgcgacgcgcgctcgatgcaggcgccgagggcatcggacttttccggagcgagttcctctacatgcagggcccggcgctccccgacgaagagacgcagtttgcggcataccgtgccgcggcggagctttgcggggcacgtccgctgactgtacggacacttgatataggcggggacaaagcattgccctacatgcacttcgagccggaggaaaacccgtttctgggatggcgtgcgatccgggtttcgctggccatgccggagctgttccgcacccagctgcgggcattgctgcgcgcgagcgcattcggcaacgtgcgggtgatgttcccgatgatagcttcggtcggggagttccgcgccgccaaagcggttgtcgagacctgcatggcggaactcgacgcagaaggggttgcctacgaccgcgacatagcgctgggggtgatgatcgagaccccggccgccgtattcatcgccgacgaactggctgcccgggcgcggtttttcagcatcggcaccaacgacctgacgcagtacgtgatggctgccgaccgtggaaacccccgcgtagcctacctttgcgacgcattcgacccggccgtgcaacgcagcatcggcatggtactcgacgccgcgcaccgggcgggtatcgaagccgggatgtgcggcgaactggccgccgacccgcgcgccacgcagcgcctcgtggcgctcggcctcggggaattcagcgtcggccccccggccatcgccccgttgaaacaccgtatacggactgacaaataatttttatctttatcccaacgtctaaaactcgaattatgaagaaaacaatgctcctgctcttcgccctcatgctgtcgtcggcgatttgtgcgcaggattaccacgttgtcctgtgggacaacacgacggcacccacctcgaacgggctttcgggcgacgaggtcgaatccaagcccggacagtggaaaaacacgcagacggccgaaatgtggatttacaaggccggggacaatgccacgggacaggcgctcgtgtttttccccgggggcggctattcgtcgctctcggtcggtaacggacataaggaggcccagtggttcgcccggaacggcatcacggccgcggtggtgaaataccgcctgcccaacggccacagcgaggttccgcgcaacgatgccgacgaggcgctgtgcgtgatgcgttcgatggctgcggagctgaacatcgaccccgcgaaagtgggggtgtcggggacttcggccgggggttacctcgccgggagcgtcgggacgctttcggacgtgaagccgggcttcatgatcctcttctacccggtgatctcggccgacccggacaaacgtcacaaggggactttcgtacagctgctcggcgccgaagatgccgacaaaccccttgcacaggagttctcgctcgagaagaaggtcgatgccgccacgccaccgacgctgttgttccattgcgacgacgacaaggtggtaccggccgtgaacagcgcgctgttctaccagaagctcaaggaacacggcatcaaggccacgctgcacatctatccgtcgggcggccacggctggggcatgaactcccgcttccgctattacgacgactggcagaaagccacgctcgactggctttcgacgctctgatcccgcggcgcctgcggccccatgaaacgataaaagaggctctggaaagagcctctttttgttgtgcagttctgccggcattccggtacgcgagctggcgccggtgccgcgtgcggccgatcccgggaatccggcggccggtattccccgctgcgcttatttcttgcggtagatgacctcgcaatgctcgcccgtgaggtattcgacgatattgagcacctcttcgagcgaattggaacgctggtaattgaacgtatagcgtttgtcgtcgtagcgtcccgccaccgagagccgcacgccgaaggtcgtctcgatgtgcgagatgatctcgtgcagcgtagcgtcggacatcgtcaccaggtcgtactgggtcagcacgaggtgcgaagcgttaacctgcgtaatggcgaggttgtcgtccgcagcgtcgtacagggcgcgctggtcgggttgcagcgtcaccaggttgacccctgcgggcgtctgaaggcgtacggagccgtgttcgaggacgacttcggcctgctgcgaaccttcgtaggcctgcatgcagaaggaggtgcccagcacgcgcacgcgcaatttgttggtggacacgacgaacggggcggcttcgtcccgcgccacctcgaagaaggccgcaccggccagctgcacgttgcgctgcgtcgggccgaaagcttcgggcagtgtcagcctcgtacgggcgttgagccacacgtgcgtcccgtcgtcaagcgtgacggtcgtcaccgcatcgcccgtgttctcgtaaacccggtatattttgggtgccgaaaagaaaagccacgccgtgccggcgcatacggcgagcaggacggcagcagcggcccccagcgtccaccgcaccagcttgcggcgcctggcggatcgctccccggcggcgatcttcccgatccggtggtcggtgctgcgcatgaacgatgcgaagcgcgccaggtcggtgctctcctcgaagacgcggcgtgccccccacaggctcttcagttcgaagaagtatttgcggtgctcctccgactcctccagccacgcgaggaggtatttttcctcctgttccgaagtctccccggcaaaatatttttgtatgactgagtccattataatcgtatcgtccatttgttctgtgtccgtttagtatacaatccacgggagaaatctacccaagcggatgggaattattttgcaaaaaaatgaaaaacagcagcagaatcagctccgatttcgacaatttcgcccgcagttgcctcagggcaaggtaaatatggttttcgaccgtgctctgcgcaatccccatctgttcgctgatctcgcggtgggagaacccttgcaggtaactcagcgaaaagacctcgcggcatttggccgggagggctgcgatcgcctcgttgatgctcgtgcgcagatcctgcgagtagagcttttcgatgaccggattccggtcgggatcgtaataggcgtagccgatgctttcgatacgttcctggtagtaggagcggtaactgcacgcatggcggtgcttgttgacgtagttgaccgactggttgtagaccgaacgcagcaggtagccgtagagcgactgtcccgggtcgagcgcctcgcggcgcacccatacgttaacgaatacgtcctgcacgacgtcctgcgcccagttcccgttcaggaaaaggcgtgcgtaggccgtcagcggcgcataataacggccgcacatctcgtcgaaggcttcgcggctcccggcgcgtatggcggatatgagttctgcaggctccatgttcgtatgcacaaagttagaaaatatttgcagattggcgagcccgcctgccttttttgttttccgcagggcaataaaaacggcggcgggcatgatacccaccgccgtcggctgtcggtcgcgccttcagggaactgcggggtgccgggcgtaatccccgggtacaggcgcaccgccctgcggcagtcagttggccgacacgaatgtcctggtgaggagctccttcagggtctcggggttgttggtggtgatgaaatccattccccatgcgatgcaggtcatcatgtcctgcactgtgtcgaccgtccatacgttcgtaaccatgccgttggcatgtgcctcctttacccatcccggattgcccgaataagccgaaaaacggtagtcgatacccccgatgccgtcctgccggactgcggcgggagccaggtcgccgttcagatattgcaccatggcacccgggagggcgttgacgatgcgtttgcaggtcgtatagtcgaaagcgatgtattccacacggtcggtcagcccctttgcctttacggcctcgatgacggcatccgccgcacgggcgttgttggcggccgaactgtgcctcttgatttcgaggatcagcttggtgtccgcatttttcgtggcctgctccaggtaatcgtcgagcgtcgggagcttttcgccgttggcgagcgtcagatccttgatctggtcgtaattgacgttctcgatcacgaggctgctcccgggaacggtgctgtcgtggttgatgacaaccttgccgtcggccgtgatccagacatcgaactccgagccgtagatgcccagctcctgcgccttgacgagcgcagctacggagttttgggcggctccgtccttgtggtagcccctgtgggcgatcacccggggtttggcgactcgggcgggattattcgaaaacgtgagctgcgtgatgcccagcgggtactggttctggccgcgcatcagcaccatccggtacctgcccgaggcaaatccgttcgggatgcgcaccgaaagcgactccgctgcggccgacccgtcgagcgtgaaagccccggcactgccggcgagcggttcgaagcggatcctgtccccggcggcaaaccccttgccgtagagcgtgtaggtgtaatcggcgcccacctcgcagcccgaaaggtagagcagcccggtaatgttgatcgcggcgggctgctggtcgcgtttgacggtttcccacagagccttcaccttttcggccgtgagcggggcgtcatagacgcgtgcgatggccacgtcgcctttccaggcgttctgacccacggtcgcactggcgtcgacgccgatgccgaaccagtagctcgtcgtggtggtgggcggcacgtagttgcccggggcatccatcgtacccttcagctcgccgtctacgtagatgtaggtcttggcctcctgcttgttccatacgcccacgacgtggtaatagcgccccgcctcggggttgatgccgctcttcgtccatacccagctggatttaccggtcgtgctgacgttgggcaggaaggtcagctccgtacccctgtcggccttgctgataaggaatccggtgccgccgctcgacatcgaactgaacatcttcagctcggccgaaccgtccgacttctcatccagcttgaagagcgcctcgagcgtgtgcccgtcggcgagcgcatcctggaactgcttgttggccgagtagtcggccttgtagaacccctcgttgacggacgtgcccggcgtgtggttgaaatgggccgcatacctcgaatagaggtcgttgtagtaggtcatcatcgccgtaccttcgagcgcccgcacgggcgttgccgacggggagttgtccatggccgaaccgtcgttgcggaacaccacgtcgagcaggtcggccgtcggaaggagcggctcgccgccgctgtccatggtcgtggcattcgccgtttccgaccagtcggaatcgaggctgccgaccgccttgaccttggcccagtaggaggtgttgctctccaggttggtcagctcctgcgacgttgccgtggacgcgatgccggtcttgtaggcatactcgctttcgggggctgaggccaaacctttccagtaggcgaccgtgtaggaagtcgcatcggggacagcgttccatttgagcgtcagcctgtcggccgccgctgcggcgtcgaacgaaaccccgcccggtgctgcgggtttggtcgcgggggtgatggccgtgcaggtgacgaccacgttgtccagcagggcgcgtttctcgctcgtcgagatcacgatgcggcaatcgggcgtcacgttcgtgagggttgcctcgaactcgcggaaccgggctttggcagccgaaatatccacagggtcggccgcggagacctccgtgaccgtgccggtgatggcgccctttgcgccgagcacggcgccgcggacggccttgacgaggattttcccggcatcggcgcccgaaccgtcgtatttctcgctgtaagcctgtgccgagaagcgcaccttgacggtcgccgcatcgggcagggcggtcagttcgggggtgtaaagcgaggcggccgcacttccggcgcccatcttgacatagcccgggcggcctgcgatgttgcccgacttgccccaggccgcaaggcccgtgccctcggtgtagggcgcagccacgccgccgccgctgaacacgtcgaactcattggccgtacagcgggtggccgagaaccccgaaggattgtcgcccgaagctgcggcgtaagtcccgcggttcgagctcgggggatagtagcccgcggcgaaattggcgatgtcgccgccgtggatcaccctggagaaatcttccgccaggaggatgtcgcccgcctttgccgagcctgccgtcgtggcacccgcctgcggccctgcggcggcagtcgcatatgcgagcgggtcggagaagaaatcgttggtcttgtcgtccacgcagacgtagtaggtcgtggcgggggccagtcccgagaaggtgaagcggaagcggttcccggccgtgatgccgaagacgttcgaggcattccagccgacgaccagatccttgcattcggcgtcgctgtaaagtttcacgtggtaaacctgagcactgctgttgacacacgcctggccgtccgcacgggcccattcgaccgtgagggtcgaggaggtcgccagcactttcgacacgacgatcccggcctgtaccggggctatgtccgtcttctgcgacacgacggcggagtagtccgaatcgtagtcggggttgttgtagcggcacgccttgaccttcgcgtggtactcggtgccggcctccagttccttgagcaggtacgaggccgaggtgatgccctccgctaccgtggcgtccttctcctcggtgccgtcggcccaccatgccaccgtataggaagccgccccggccacttcgtcccattcgagggtcagcttgtcggaatagacggcttcggcgtcgaatttcacgttcgccggaacggtgagtttctccagtctggtctcaccgtcgtaaaccacgacgatgtcgtcgagcaggtagcgggtcttgttggcgcccgcctgtgcggggttcgacgaaaatgcgatgcgcgaagtaggcgagaggccgtcgagcgtcaccgtgaaggtctcgaaccgacctacggccgacgagatgtctacgactttcgaagccacggccgtgcctttcttgctcacggagttgttcgacccgaactcggcgccctcgatggcttcgaccacgatgtcgctgccgtatacgttttcgccttcggcataggcgctggccgagaaactcaccgttacggtcgtgttcttgggcagggccaccagctcgggcgtatagaggataccgatgccgccgccaccgccgccgcacttgatgtagcccggacgggtcgaggtgttgcccgacagcccccagcctttcatgccgacgctttcgatgtactcggccgacgtgcctccggtgaatacgttgaattccgtcgtccagttgcagaccggacggtcgccgtcggcctgcgggttctcgcccgtggcaggttcccacgtcttgcggtattcggtacccgatacggcgttgtaacctgccgccgagcggacgatgtcgccgccgtggatgaatgccgcgaaatcctgcgccagcacgatatctccggcctgtgccgggttattctgcgaggctttgggcccggccttggccgtggtcccggcgacgacgggggtcatgatgttgccgaagctggcattggtgacccgggcgtagtaggtcgtttcgggatcgagccccgagaaggtgaacctcacgacgggataacccgccagagcggtgaaaatgcctttgtccgacgcgagttttccgtcggccagccagctgacatgcagctcgctgcacgcctcgtcacggaacagttcgatgttgtagaggcgcgtggcatcggtcgccgcatcgtcggtatacgaccactcgtaggtgagcgtcgaccccgtcgcggcattgagcgtgagcttcgggtcgagttcgaggatacccaccgaggccatcagcatggccggctgctcgtttgccgtgacgtatacccagtccgaggtggaggagtaggggaagttggctctgacgcggccgtagtatatccgatcggttgccagatcggtgaattcgtggtagtcgatcgcgtcggtggtcttgcagagcgcttcgctcacggggttcatctccccgtcgacgagctgcacggtgtacgacgtcgcgccgcggatgaaatcccagcagatcgtaagcgacgtgggtccgtattcgagcagtttcacgttcttcggggtcttggacttgttggcccccgatatttccacgccgtcgtccttgcaggccgtcagcgagactgcggccgatagcgagaagagggcaaacagaatatataaaatgctttttttcatgattgttgtccggttttagtatacgagcttgatgtcgtcgatgtaccagcggcccgccttcaccgaggagcccgagaaccagctgtcggccgtggagatgaagaatgccggattggctttcgcgccgggattggggatgacggccgtgacctcaacccacgtgtaggtggggatgtcgagcgaaacgtagctcttggtcgaagctacgatcttgtccagcgtgcccttcgagatccagaacccgtcgttcttctcgcagatgcccaccatgccctggtcgggggctgcggcccagatggcgaccttgcaggtcagcagcaggtcgtagcccgcggggatgttcagcaccggggagatgaggttgcccggctgcccgtcggcattgtcgctcgcagcgcccagctggatgtaacccgggcacatataattcaggtagcccgtccacccctccatgccgatggcgcggtagaacgccgcgttgccgttgcgtacggtcgaggtgatgccgccgatgctggcgttggtgcccgccgtgacgctcaccgtctcgttgtcgaggctcaggttggccacggtcttgtcggccgtcgtgacacccgccttctggccgatgcagtcgccgccccaggggaatttgccgaagttctgcgtcagcaggggaagctcctcgccctgggcgtcgaacccggcgcggacgatggtcgaaacggagccgaaatccttctccgcgccagcctcgtccgtagccttcacggcgaaggtcacgatgccctggcgggtggcggtgcccgtcaggggtacttcgatgtagccgttgccggccgtcgagatcgaatagctgccgctggtggccgtgatcccctcgccgccggtctgcgtcaccgtgacggtgtatttttccgtgccgagcgccttgatgtaggggatgcggagcttggccccggcttccgcgttgagtttgagcatacccgagacgtcgaactgctgtccgttgtcgaagggtttccactcgaagataccgttgtcctgcctgatggcgatggcgacgttctcttcgccgcagccgtgcaggtagatggtggcgttacgctcctcggaggtgttctggtcgcaggtgaccgtcaccttctggtaggtgccggggtctcccttgcccgagagctggtcgacatgcacccagccgtaggcgttcgtccactcgcggctgtcgggagtgtcgctgatataccagtcccccgtggcgcggatcgtgaacgtatcgctcgattcgacgtacgggaaactcatctcgcgcaggttgcgtttgaggaacccctggtcgtcgtcgctgcacgcggcaagaccgcagatcccgcccaacgcgagaactatcgtcagtttatgaataaatttcatcatgattggatcgttagtttgtttgtaaaaccaataaaaaaaacagaaaccgactccggatacactgccggatgtcaatttcctacacggtttctaacgatatcgaatgacttgcactgcaaatatagcaattttccgggattcgcaagaaaaatgtttaaaattttacgaaccttgcggcgaaaaaccgaaaaataaaatatctgtaatatataggtataaaaatttgcattgtaatcttgtgaaaaaagcttccggcattgggtagtttgccccggtcgcttgtatctaatgcagaccgggcggaaaacgccggccgcaaccgacccaatgtaaactttaaaaaagcgattattaaccggaaactttaaaacagcttcgaaaaatgcctgactaatccccctacaccagcactacacggttttttatcggacgacggatgacttgcaaggttctgtctgccgtatcggaacgaatttccccggagcccgcctgcacggcgcggctgcggacgtgctttgcacgcggcagcgggaaataaccaattaaccgaattgaaactatgaagaaattattccataaaggactatgtctggtcatggtgctctgcgcgggggctttcggctgctatgccgcccaaggatcgctccccggtgcgcaagggcaggggtatgacctgaatttatcctactcgcggacgacgctcaaggccgttgccgatgctattacgcagcaggcgggcatcgccttctcctacgaaacggcactggccggctatccgatggagaacctggaggtctcggagaagggtgccaccatcgaggccatccttgccgccgtattcacgccccgcggcatcgactaccgggtggttgacaaagtggtcgtgctgacgcgcagcacgcgccccgtcccggcagccagggccgccgccaaatcggaggtgaaaggggtcgtccgcgacgctgcgggcaacccgatgatcggcgtgacggtcactatcaaggggacgctggtcggcgtctcgacgggtgtcgacggcggctatgcgatcccggccgacgggaacgccacgctgctcttctcgtatatcggctaccgcccccatgaggaggtggtagggcgccgcacgcagatcgacgtcacgatgcaggaggacgagctggtgatggacgaagtagtcgtcgtaggctacggcacgctcaagaaacgcaatatcgtgggcgcggtcgagaacctttcgggcgacgcggtcgaaaaccggcccaatgccaacatcacccgttcgttgcagggccagatccccggcctgaacatcgtacaggtcgacggtaaggccgaccatgccggcgaagtcaccatccgcggcgtgaacaacacgttcaaggcccgtgtgagcggcggtgaaaagaccaacaaactcggacagggcggcggcgcgctggtgctcatcgacggagccgaaggcgacatgggttcggtgaaccccgacgacatcgcctcgatttcggtgctcaaggacgcttcgtcggccgcagtatacggcgcccgcggcgcattcggcgtgatcctcatcacaaccaagaaccccgagaagggcaaggtgcgcgtgagttacaacggctccgtgtcgctgcaccgccgtacggtgatctgggaggacaacgtggtcaccgaccccgtgcagtgggtcgatgccttccgcgagtcgtatctcaactcctcgccgacggcgaccgtaccgtcgctcttcaacaactacatgccctattcgaacgcctggttcgaggaactcaagcgccgccgtgccgatccgacgatggacaactacgacatcgacgccaacggcaactacaactactacggcgagaccaactggctcaaggagatctacaagtcggtgaactattcgaccacccacgccgtcagcatccagggcggccgcgaaggggtcagttactacatttcgggccgttactacaaccaggacggcatctacaaggtgggcgaggagacctacaagaagtataacctccgcgccaagggttcgatccgcatccgcccgtggctgacgctggacaacaataccagcctgatgagcagcaagtaccaccagcccatggtgcactacggccagcaggtgatctcgcgccagatcgacatgttcgccttcccgttcgccctgctgaagaaccccgacggcacctggacgcagaccgcggccaagaccggttatgcggccttcgccgagggcacctcgtggcaggagaacaacaagctcgaagtggccaacaccacgacgttcaacttcgaattcgtccccgacgtcttcaaggtctcggccgacgtgacctacaagggatcgcgctggtcgcgcgaccgcatggagaacctctacacctactacaccggcgtgaacgtttcggggcaggacaacagtttctcgtcgctcgaaaactggacgtaccgctcggactacatctcgacgaacatcgtcggtacggtcacgcccaagctgggtgccgaccacgacctgaacgtggtcgccggatggaacctcgaggactacgactaccgcacgcagaagacctaccgccagggcaacctctatccctcgaagccgagcttcacgctcatggacggcgagtattactcgaccacctcgggcggctacacgtgggggctggtcggattcttcggccgcgtcaactacgcctatgcaggccgttacctggccgaagtgagcgcccgttacgacgggtcgtcgaaattcccgtccagttcgcagtggggcttcttcccctcggcatcggtcggatggcgcctctccgaagagccgtggctcaaaccgcacgtcgaagggtggctggacaacttcaaggttcgcgccagcatcggttcgctcggcaatgccaacatcgacccctaccagtacctcgagaccatgaccgcttcgggcagcgcctcgatcgccaagtcgtcggtcatcatcaacggccagaacgtaccttacacgtcggtgcccagcctgatccccgacgacatcacctgggaaaaggtcaccacctacaacatcggcctcgacctcgacctgttccacaaccggctttcgttcaccggcgactattaccgccgcaatacgaccgacctctacaccgtcggcccgaacctcccgcaggtactcggtagcgcagcgccctacggcaactacgccagcctcaagaccaagggatgggagttgagcctttcgtggcgcgactcgttcaacctgggcggcaagccgttcagttacagcatcaagggtatgctgtgggacagccgcagctggatcaccgactactataacgaaacgggcgacctgacgacctactacaagggcatggaaatcggcgagatatggggtttccgcacggcgggcatctacgccagcaacgccgacgccctgaacggcccggcctacaacttcttcaagaacggcgagatgttccgcgcctatgccggcgacctgcgcttcgtcgacgtggacggcgacggcatcatgaccaagggcaaccgcacgctgtccaaccacggcgacctggagatcatcggcaaccagtcgccgcgctaccagtacagcatcaacatgtcgctgaactggaacggcatcgggctttcgatgctgtggcagggcgtgggcaagcgcgactggtacccgtggacggagtccggattcttctggggcaaatggaaccgcgcctacaactcgctgatgaagacgcagacgggcgacaacgtggtcaagatcgacaagagcaccgacaactggcgcgtcacgaacatggacaagaacccctactggacacgcatggtatcgctcgccgccaaccgcaacgacggcccgctgacgtgggagaacgaccactacctgcaggacgcttcgtacatccgactgaagaacatcaccgtcgactacaccttccccaagcacatctgcaagaagctgcgcctcgaggggctgaaggtctacctgtcgggcgagaacctcttcacccactcgccgatgttcaagcacacggacatgttcgaccccgaagtcatcaccagcggcgactccgatttcgcggcctcgaccacttcgggcctgaacggtacgggtaacggctattcctacccgatgctcaagaccgtgaccctgggtataaacgtaacattttaaccgacagcaaccatgagaaagatactgctatatacgctgatgaccctcgctgccgcgggaatggcctcctgcgaggatttcctgacgcgcgacacctacgaccagatcggcagcgacgagttctggaaatcggaaaccgacctggaactctatgccaacggtttcatccagaagatgatccccggcgacggaaccattacgcgcggcgacatctatgccgactactgcgccgtggacatcccgaccgacctgctgcgccccgacggcaacgtctcgcccgacaaccagaccggatgggctgagagcaactggacgaaccttcgccgcgtgaactacatgctcgacaacatgcacaagtgcagggggcgtgtgagcgacgagatctacaaccactacgagggcgtcgcccgtttctggcgtgcctggttctactacgacaaggtgcagaccttcggcgccgtgccctggtacgacttcacgatcgcggccagcgacaaggaagcgatgatgaaaccccgcgacagccgcgagtacgtcatggacaaagtgctggaagacctcaccttcgcaagcacctactgcctctccgacgccaaattcacgaaaggctcggctctcatcaacaagtgggtggcactggccttcaagtcgcgcgtctgcctctatgaaggcaccttccgcaagtaccactcgcgcgagccctcgtccgacaaaccgtggcaggccgagtataacgccgacaacaaattcctgcgcgaggccgctgccgccgccaaggagatcatggacaaggggccctattcgctcgtcacgggcgatgtgaagaccgcctaccgctcgctcttcaccagcgccgggctgctcacgcaggaggtgatcttcggccgcgagtacagcaaggagctctcggcgttccacgagaccagctggtactactattcgccgacctacggtgccaaaatcgctatgaccaagaagttcatgaacacctacctcacgacccggggcacgccgttcaccgacatcgacgggtatcagaccatcgacttcatccgcgagttcgacggccgtgacgcccgcatggcgcagacggtcatcagcccgacctacaagatgaagatcagcggccgcgaacggctctattcgcccaactggaaagtgacccgtacgggctaccatccgatcaagtggtcgatcgacgacgatgccgacaacgtgctgtcgaaggccgcgagctggaattcgctgccgatcctccgctatgccgaggtgctgctgaactacgccgaggcgaaggccgagctgggcgaaatggacgccgcggtatgggatcagaccatcgcgcagctgcgcagccgtgccggcgtgaccccggtcgtcccggacaaggccgacccctacatggaggcctatttcctcaataccgtgaccgacaagtggatactcgaagtgcgccgtgagcgcggcatcgagctctgcctcgaaatggggctgcgctgggacgacgacatgcgctggcacatgggcgacctgctcacgagcgacaacaacccctggacgggcatctggatcggcaacacgggctacacctacgatttcacggggcagagcaccgacgacaacggcgatcccgtacccgacttctacatccgcccgggcgaggataccgaacattcgatcgccatttccaatacgggggccaaccagaccttctcgctcaacgccgcggggaatatcgtctgggagtacaagcgcacgtggggcgaaaagaaatacctgcgtccgatcccccagacggcgatcacccgcaacccgaacctcgaacagaacgcgctctggaaataagcaataaaaaactcaggatatgaaaacgaaaatcatgttattatgctgtatggcggcgacgctgatgctggcatgcagcaacgacaagtccggcgggcatgacggcgacgagggagtcgaaaccgaagtcaacggcacgcagctcgacggcaatacgaccctctacggactggtgaccgacacgtcggggaaccccgtcccgggcgtggtcgtgtcggacggctacggctgcgtcacgaccgatgccaacggcgtctaccagatggagcgctacaagaaggcgcgcttcgtacattacagcacgccggcagggtatgccgtcaacacgtcggccgacaactacccgctcttctacgccgagatcgtccataagaacatcgccgaccgccacgacttcgtgctgacgccgctgccggccccggaaagcgatttcacgctggtctgcatcgccgacccgcagtgtgcgaccacggccgagatcagccgctacgtcaacgagacgatccccgacgtcgaggctacggtcgacggttacaaggccaagggcacgccggtctacggcatcacgctcggcgacatcgtcttcgatacgcccgacctgtggagcaacatgaaggagtcgatggccaaccgcaacctgcccatcttccagaccatcggcaaccacgaccatttgcagaccgagacctccgatgacaatgctgcggccaatttcgaaacgcagttcggcccgcgcaactattcgttcaaccgcggcgacgtgcacatcgtgtcgatggacaacgtcctctacgaaggcaagaaaaagtacaagggcggcatcaccgacaggcagctcgagtggctgcgccaggacttgtcgcacgtcgacaaggacaagctcgtgatcttctgcgcgcacatcccgttccgcgggggtacgagcgtgacggacgagagccacgagaactacgacggcgtgctcgacctgctgtccgggttctccgaggcgcacatcatgatcggccatacgcattaccaccagaaatacatccacaagcgtaacggaaagacgatcctcgaacatgtccacggcgccgcctgcggtgcatggtggacggcgaacatctgcgccgacggcacgccgaacgggtacagcgtctacgagatctcgggcaacaccattgccaaccagtactacaagtcgaccaacaaggaagccggctaccagatccgggcctattcggccacgcaggtgttcggcaagtcgggcagcttcaccttcggctgggcggccaactccccggccatgaacgatgcgaagtgcatcgtggccaacgtctggaactccgacgcctcgggcaactggaaagtctcgctctggcagaacggcacgaaggtctgcgacatgacccgcgtcaagacctacgactactgggcctatgcctaccacgtgctctattacagcaagagcgtgggcacgacctggggcaagaacctcgaccattactattacgggaacctggcgtcggggacgcccgagaccgccgatttcgaaatcgtggcggaggacggcatgggcaacacctaccgaacctcgaaactccagaccgacttcatcggcttctgaccctcccgctcctaaaagcgatgccgcgccccgaaaagggcgcggcatttttcttgccggttcacaggcgcggttgcaggcacgtcgcctcccgggcgcaggttcctcctcccgccttgcgggaccgccgtcgccgcccctatacggcggcgttccgtcccgggcggtcaataccagccttcggtctgcgtgaggttgtaatttcggctcatggccgcctgcgtgatgggccatagcagtatgttggggttcttgtcgcgctgcgccgcgatgtcggcgctgtactcccatatcttgtccgtgcgcaggagcatccaccaggtgcggccttcgccgaccatctccctgaggtattcgtcgacgatcgcctgcaggacggcttcgggcgacgtgtcggtatagtaatccctccgcccgtaggccctggcggccagcggtgccagggcttcgagcgcacccgcgtagtccttcccgtaataacgggcttcggccgccatcaggaaggcttcgccgtagcggtaaagaatgaaatccgagtcgaagatgcgtgtgccgttgtccacgcgccccatcagtttctccgtccagccgatcctgcggccgcccgtgccgtaatcggccgtacggcaggtcagcgccgcgcgcgtatcggcggggtcggcctgcaacagggcccggtaggtgtcggtataccaccaccactggttgcccccggtggtggggacagggttgttgcggtaggccgcttcgacgtaactctcgttccagccgaggtagtaggccgggccgttcagggcttccgacacatcctggtgcacggcgaaaatgacctcgcggccgcatttgttcgacgaactgaaaatatcggcatacgcgggctcgagcagggcgtccgacaggccgagttccccgagcgcctcttgggccatcgccaggtaagcctcgcccccggcctgcatacggtacatccacagggcatagtcggccttcagcatcgccacggcggccggcgtggccacggtcttgtccgacgtatcggcgacgtacctttccgcgtcggcaatgtcgcgttccacgcgcatcagcacttccgagacgggggtgcgtccgaggaacagctccgtgtcggtcgattcgtagccccagagcggcagcggggcatcgccccagatgcgtgcgatctggaagaagcagtacgcgcggatgaagtgggcgttccccaggcagaaggcccgcggtttctccttcaaccccatcgcagggacatgcctgatgaccaggtttgcctggttgaccgtcgtgtagagcgccgtccagtcggcatactcgttgaccgaactcatggtgctggtgcgcacctgcgactggtcgacgccgttgagcgtgttgtgcgtccccgggccccacagcccgttgcgcagctcgccccagcagaggtagatgtcgttcatgctcttgagcgcgctgcgcaggtagacgtacagcccgtaggtggccgacgtggcgtcgctctcctctttccacatgttgctggccgagagcttgttgtcctgcatgatgtccaggtcgccgtggcagccgcccgccccgtatgcgcagaacagcagcgcgactccggctatgatctttccgaatttcgttttcatggcagtagggtgtcagaacgtgagtttggccgtgaagagcactttgcgcgtcggcgggtagggactgaacccggtgtcgtaggtcgacgacgcggtgtagaggccgccggtggtcgcggcctcgggcgagaccccgtgcacggccgtccagtagcagagcgtgttgcccgagacggtgagcgtcacgtcgcttatgtgcagtttgcgcagccacgccttcgggagcgaccacgagagcgaaacgtcgcgcaggcagaggtagtcggccttctcgacgaatatgtcggacgtgcgcccgtagttgcggttgccccagtccgtatcgttggccgtgaaacgggcgtagcgcgtgtcgtcgcccggctgcgaccagcattttttcacctcgttcaccaggttgtagttgcagttgcccatcgtcgactggaaatagcgcatctgcatgtcgttgcgcaccgaatgtcccagggcatagtccatgtagacgttcagcgtccagttccggtaacggaacgtattgccgatgccgcccgtcgaatggggcagggcataccccagcaggaactggtcttcggcgttgatgatctgccggccgtccatacgcgtcgatcccggacggtctttccactcgtagtcgccgatgtccttgcgcccggctatctgccgccggtcgctgcgccggtagccgcgcgactgcgtgtcgtaccgggccgcgtcggcctcctcctgcgtctcgatgatgcgctctgcgacatagccgaagatacgccccatgcgctcgccctcggcgatgcccccgaactggctcccatcaccgaccgagatgccgttgatgcggttgcggggattgccgttgtcgggcagttcgagcacgcggttcatgttgtagctgtacgtgaaatccgtcctccacgaaaaacccttgcggtcgatgttgaccgacgacagcgacagttccgtgccgtagaacctgacacgtcccaggttggtcgaaaccgaattgtagcccgtcgtattggggaggctgacgtcgaacagcaggtcgcgcgtctccttgttgtaatagtcgagcgccagcgtgatgcggttgtccagcagcccgaggtcgatgccggcgttgaactggagggtcttctcccagatcaggccgttgttgggcatcgtattggtcgtggtggtcgcgttgccgttgtaggtgtagagcgagttgtagctgccgtaggtgtcgtacagcccgatcccgttgttgcccgtcagcccgtagctcacgcgcgccttgagcatgctgaccgcactgttttggggccagaacccctccttgctgaccacccatccggccgatgccgccgggaaatagccccagcggtggcctgcggcgaatttcgacgaaccgtcgatgcgcatcgtcgcggcgaagaggtaacgcccgccgtagtcgtagttcacacgcccgaaataggagatcaggcactcccgcgtgcgggtactcttcggatagttggcgatgttcgaagtcccggcgtcgagcacgggcagcttatccgacacggcgccctgcacccgcacgtcgaagctgttgagtttgtcgagcatgtattcgtagcccgccacggcacccaggcggtgcccgttgccgaacgtacccttgtagtcggcataggcctggaaatccatgcggttggtctccgaaaagccctctttcatgggccgtatgttcgagcccgtcgtggggttgtcctcgacatagaaatagctgcgcgtatggcggttgtagttggtgaactgcccgaccaggcgcagcccgtcgaacacctcccagtcgaggttgatcgtggccgtcgaacgcttgatcgtcgacccggcattgtggtagtaataggcgtagtaggcggccggtatcgtcgtgttgttggtgcccagcgcgggcgtgcccgccagctcctcgcccgcctcctcgccgtaccagtcgcggtgggtgttagggacggagagcccgcgtatgaccgagttgcgcaggctgagcggcgcgctctcgaaggtctgctgctcgatctgcgaatagccgaacgtcgtcgaggccctgagccgccgcgtcacctgaaaggtcgtgttgccgtggaacgtgaagcgcgaatagcccgtcgtgaccccgatcccgctgtcgtccgtatagcccgccgaggcggcgtattggatgttgtcgccgcccccgtcgatgccgacgtagtaattctgccaacatgcgtcgccgaaccattggctctgctggtcgttgtcctcgaatacgatgatgcgcccagggttcaccgggtcttcgacccattggtagccggcgggaaccggttcgtccggccggaggtaacgggtcgtccagagcgatttggccgtattgcccgtgcctgccgactgttcgccgcccagcaccgatgccggatccatgccgccgcaatacccctccatgagcgccggacgcaccgtgaggatgtaatcgcgggcgttcatcaggtcgaacttcgtggcgggcgacgcccaggcccactgcccctcgaatacgatccgggggccgaggtgtttcgaacctttcttcgtggtgatgaggatcacgccgttcgacgcgcgggaaccgtagatgcccgccgccgcggcgtccttgaggaacgaaacggattcgatgtcgttgggattcagcccggccatttcgcggactacgccgtcgaccagcacgatcgggtcgttcgactggttgatcgacgatccgccgcggatcaggaatttggggtctgcgcccggtgtcgcatcggtcgtagcgaccctcacgccggggacgcgtcccttcagggcgtcgccgaccgaattgacggggataccctccaggagatgcccgtcgaatttgctgatggccgcagtcaccgtcctgcgcgactgcgtgccgtatccgaccaccaccacgtcctcgagcacggcttcgtattcctccagcacgacgtcgatggccgacttcgtcccgatgcgttcctcccggtcggcatagcctatgtatgagaaaacgagggtggcgtccggatcggcgaagatccggtaattgccctccgccccggccgaaacgccccgcatcgtatccttcacgacgaccgaggcgccgaccagcggcatccccgagccgtccttgacgcgccccgtcacgagtaccagctgcgaacgcgcggaatccgtgtcgtaggtcagcaccacgatgcggtcgacgaccttgtaacggaatccccgtcccttgaataccttttccaggatatgttccagcggcgccgcggtttcatgcaccgacacgtcgccgagcggcatctgcgacagtgccgattcgtaggagaacagtacgcccgtctgtgaggtgacggcctccgtgaaggtcagcaccgttgcggatccgagcgtgagatccacagcgtaggtcttttgtggcgaggcatttctgccgtcatccgtagcatgggcctgcggacacatgccggtcaacaggagaagaaataccaattccagcttggggatggaatttttcttcatattttaaggttcgtgaagcgtgttccgggttgtgcggtgcaaaaggcctgcggtggtcggccgcaggccccgtatcattcgttgcggatcacctcgcaatgcgttccggtcatgaactcgacgatgtcgacgacctcctcgagcgaattgctccgcaggtagttgatgtcgtagcgtttgccgtcgtcgggcgacatgatgcgtatgcgtacgccgtagctcttttcgatgccggcgatgatctccgtgatcgtggcgcccttcatcgtgaccaggttgtaacgcctggtcacatagagcggcgcgttgatttcggccacctccatgtcgcccatccgggcatcgtacaccgcgcgctggttgggatgcagccgcacgaggttgtcgccgccgggggtttcgaggcgtacggtgccgcgttcgagcaccacctccgtgaacgggtcgccggcgagcgcccggacattgaaggccgtgcccagcacccggatcgccagctcgcgggtctccacgacgaagggatgccgcgcatcgtgcgacacgtcgaaataggcctcgccgtcgagccgcacgatccgctccccgtcccccttgcctacggcatagcgcaactcggtgccgtcttgcagccacacctgcgtcccgtcctccagatgcaggacggccacgtcgccggtatggttggcataggactggaaccgcccggcttccggcaagcgcagacctgccagccaggctgccgcgaccgcgatcacgaccacggctgccgcagccgctgcggacatccaacgccgccatgcgaaccgcgcggttcgcatggcggcgtcggcgtcgatacgcgcgttgagccgccgtagcatggcatcgcagcgctcgccggtggcgggggagatgagcgtcctgtgtgcgctccatacggccgcgacttcgaaaaacaggctgcggttcttctccgaggcttcgagccaggcatatacctcccggtcttcggccccgctcgtccggcggacgaggtatctgtatagcaatccctccatgtcggttatggtaggggtatctgtatggcgttccaatatgtatacttttagggtgttacctatactatacagccatagacacaaaaatacctagtctgtcttcacttttttttcgaaaaagtgcattttttctggaatcccgggaaatacgggtcgaggacgaagctgcgcagggctaaaggtaataaaaatatccgggcttcaaagcccggatatcatcccggccgtacctccggcacaggtgccgggcaggatacggaacggttcggtcagttccatttgcccagcagcttgcgggggtagttcgtgcagatggcgtagagtttgtccttgtaggtcaggtagtaatccatgtcgacatccaggtcggcattgtatacgctgagcttcagccccgcatcgaggaatttctgcaccgaataaccgttcttgttcacggtcttcccctcgaaatagaggttttccgtcgagaggttcgcccacggatagccgtaggagatgtaatcggccgggttgcggaagctcatccacccggcattgctgcccacggcgcctgccgcggcgagcgaacgctgccagatggtgacggggctgctcgaactgattttcgtcgcattgcccgtgacgatgaactcgcagaaattctgcgcgcccatctcttcgatgatctcgcacgcccgctcacacgccctggccgaagcctcgcgcccctcttcggtcgatttgccgtcgatggtaatgttcttcacgtcgagccacaggcgcgtggttcccgcctcgagcaccacgtcgatgaagtcggccagcgagggcagctgttccccgttggccagcgtcccggcggcacgcagttcggcgagcgtatgctcccacggcttgaggttgttgatgtaacatcccgccgatgcgtgcgccaccacgacatcgtcgtccttcgtaaggtagatgtcgcactccgacgcgtagcagcccagcccgatggcatagttgagcgccgccaccgaattgtcggggaactgccgtgtcccggcctccgtcgaaccgccgcggtgcgcgacgacacggttgccgacctcggccggggttttgatctcggtgccgggcttcgacggccccgtccagtccttcagcggatcttcgtcgtcgctgcatcctgccgccaggccggctgcgacaagggtgaggagcataagcattttatagtatttcataggtttttcttttttattcgttgtcgttccatggccggagcccgggccggactggggcgtactcccgtccggcccgctccggattcagaaattctcgtaatttttcacacagcgcaccgcggctcccgaaccgttgcccacgtcgaacccgtcgtcgaataccatatcggccgaggtcgtacagtaggcgcgccacagggccatcttcgaggccgtcgtctgtcccatcatcggaatcaggcagtagaagcgcacgttgcccgagttggcgcagtagtcatagccgctcttgtagaggcgccacccctgcgggtagaggttgaaagcgaaggcctcggcaccgttcgaaatggcggtcgcggggttgaactcggcgtcctgccactccttgcagcgcaggtgcgccgccacattggccgcattgcccgaggtcatggcgccgtacgatgccgtcgcagccgccacggggtagtccgaatagctcttcgacgactccgccaccgcgtagatcaggtctttccagtcggacatgttggcgatatgccagccgtagggacagatgccctgcacctgcatcgagagcgacgggtggtcggcctcggcctgcgtattgccgccgtcggaggctgcgtagtctttcaggtcggccttgaggatcggttccagcgtgatgctgttgcccacggcatccacgaccaccgtcccggcgcctcccagcgggaagggcatcagcagggccgggctcagcgcgccggccgggtcgcccgtcagcgtttcgtacgaactgtaaaggcgtccgtagaccgaagcgcgcgtcgtcacgccgtcgggcatcatcagctccttgagcgtcccgccgttctcctcggtgtcataggccgggttgcgcatcgaatactccgcttcgtcgtaaccgcccgtcttcgagcccccgaccagaccgctgcccagcttgtaggtgcccatcgccgcgccgccgttccagtgcaggccggtcgtcatccacgtcttggtctttccgtcacgcgtgacgtattccttggtggggtagccggccagttccgattcgggcatgctgttcacggtcgagatgcgcgtgaactcggccttcgagtcggctgccaccacgttgttgtcgtcgtcgagcgcgatcgtcacgcgcagggcgttcatccccgcaatgccgaacgtgagctcgggcgctgcggcctcggcagccgcgtcggccagtacggtgagtttgccgtcggccgtcagcgcatagcgcggataggcgtccggcgtacgcgaagtcgagaggatcaccttgccgctgcggaaatagtggtcgaggccgaacaccaggtcgttcttgttcatctgtgcggcatcgccgaaggccgcaaagtggggtatgcccgacccgtaaataaacaggtaggtttcgttggccagctgccgcaccttgatctgccttgtggcgaggctcgtatcctccgtcccggcgctcacggtcaccgtcgcctcccgcatgtcggtgggcgaggtgttgtccgaagccgcgaggacgatcgtcccggcctccctgtcgagcgtgcaggtaagccactccacgccctcttccagctcggccgtgacggtcgaggcgggcatgttggtctcgaaggccacagtcacctcggcaggctccagggccatcatttcgatgtccgattccgtcgagagggtgagcgtggcatcgggtttgagcccgacctgcatgatcgaaaaatcgacgctttcgcccgtcttggagagcgttacgcgcagcgttcccgtgcgcttgtagtccgtgttcgcggagcaggtgatccgcagcgccttttcgaccgcgccgtcgggcgaggccgtatggtagtcgagcgtggcccagtcggtgccgaccagttcggcatgccagtcgctatacattttgccgtaggggttcaccgtcacgatgtatgtgccgaacgccagtccgtccgtcgtccgcccgtcggcatcgaacccgatcgcggcgggcgaaatcgagatgcgcgcctcccggctcgtgttgtccgcatcggtgcccgactcgtaacagcctgtgaatgccgcggcggcgatggcgagcaggccggatatgaattttctcatagctgaatagttttctgttgggtaaatggattaagaccagccttcggtctgcctgaggttgctgttcttgttgatcgccgaggtcgagatcgggaagaggtagatgttggggttcgtcgaaccgcccacgccgccctcgacacccgtattgggccagtatttgagcgggcagtaggtgtcgatgtaacccaggcggatgtaggtgaaccacaggttgccctcctcggcgaattcccagcggttctccgcagccagcgcttcgagcacgtcctgctgcgtggccgaggtgtagaagtccgccttcccgtaggcgcgctgggcgaccacgttcagctctccgagcgcctccttgtactgtttcctgtaatagtacagctcggcacggaacatatagtactgcgcataccggtagaggatcaggtcgtcgtcgtagagcagcgttcccgaagaccagtcgcccgtgaacttgttgggccatccgaccttttcgtacatgtcgctcacgcccgtgcgctccatataggtcacgtcgctgcgctggtcgttgttctgctccttgttccgtttcagttcgccgatgaattcgtccgcataacagaaccactggttgctcgataccggcacgccgccctcgacgttgcggtaggaggccttgacctgcgtcgagccccagatgaagcgctggatgtagctggccgaatgcacctcgttcgtcgcatcgacatgcagcgcgaaggcgatctccttgttggccttgttcttcacgtcgaacacatcggcgaacttgccgagcagcggcgtgcgcgtaacggcgtcgagcgcctccccggccatcgtcaggtaggaatcgccgcctttctgtgcggcgtacatccacagcgcgaagtcagccttcagcatgttgatgttgtccaccgtggcataatagcagccctgggcgttggaagtgatgtgcgtgagcgcgctttcgatgtcctgcgccacctgggcgtagacctcggccctgggcgaacgcgaagggtagatctcccgcccggtgctctcggtgggcgtcaggatgacgggcgcgtcgccccatacgcgggcgatccagtagtagacgtatgcccggacgaaataggcgttcccgaggcagtagctgcgcgtctggtcggacatttcgaccgacggcgcgtactttatcaccgagttgcactggttgatacaggtgtagaggttcgtccagcttaccgacgacgtgcctccgttgagcaggctgtgcagtacttccagcatgtccgagtccatcagcgaacggttcgtaccgcgatcccacatggcgggcccgacgcgcagttcgccccagaagaactggttcgtgtaattctgccggaaggcgttgcgcaattcgaaatagatacccgtcgtcgcgcccgtgacatcgctttcgtccacccacatgttcgtcgtgttgagctggtcggagttgacgatatcgagctcgcaccccgccatcgccatcgaggcggcgcctatcgctgcaatatatagcttatggaatttcatattcgtatattcgatttagttgttgagaatcatcccgttcagaacgtggccttcaggctgaacatcaccttgcgcgtgggcgggtaaatgttataatcggccgagctggtgttcaccgcgctgtacatgcccgtgctcgatcccgaggaggccaccgccgattcgggcgacacgcccttgaccttcgtccagtataccagcgtgttgcccgataccgagaccgtcaggttgcccagcccgagcttgccgatccaccgcttggggaagctgtacgacagcgtcacgtcgcgcaggcagaggtaatcgcccttctgcacgttgatgtccgagatgcgcgaatagttcttgttgccgccgtcggcgtcgttggccgacaggcgcgccagcttggtgttgtcgcccggcttctgccagcagtcgttcgcatcgtagatgaggttccagttgcagttgcccatcgaggtttgcaggccgcgcgtatacatgtagttgtagaccgagtgccccagcgcatagtcgacgtagaccgacagcgagaggttcctgtacttgaaggtattgttcataccgccggtggagtggggcgtcacgtaccccagcaggaacatgtcctcgtcgttgatctgctcgctgccgtccgccgtacgcgccgacccggcgcggttgagccattcgtagtcgccgatgtccttgcggccggcgatagaacggccgtccgaacggcggatgccgtgtgaattgacgtcgtacagcgccgcgtcggcctgcgcctcggtttcgatgatgtaggcggtcttgtagccgtagatgcgccccatgcgttcgccgacggccgtgccgccgaaacggaatcccgtctccgacatcgtgtacccgccgatacgccatgcatccttgccgtcgacgtccttgtacctgtactcgtcggggagcgacaacaccttgttcatgttgaacgagtaggtgaagtcggtcgtccaggtgaagttcttgctctggatgttcaccgtcgagagttccacctcggcgccgtagaagcgtaccgaaccgacgttctgccgggccgagccgtaacccgacgtatcgggcagcgtgacgctgaagagcaggtcggtggtcttcttgttgtaatagtcggccatcaggcggatgcggtcgttgaagaatcccatgtcgacgccgatgtccagctggtgggtggtctcccatttgagcctcatgttgggcagcgccgtgggcaggatggcgctcgcaccgttgtagatcgacgttgcgccgaaccctccgtaggcatcgtaaaggccgatgtagttgttacccgtcaggccgtacgaggcgcgtatcttgaagctgttgaaattgcgcacgttccagaatttctcctccgagaccacccaaccggccgacgccgcagggaaatatccccagcggtttccctcggcgaatttcgacgagccgtcggcgcggaacgtgaacatgaagaggtacttcttcttgtagtcgtagttcaggcgcccgaaataggaggagagcgcctcgttggtgttggtgtccgcccagcccgtggcgtccgtccctgcggccagcgtcggcaccttgtccgaatcggcgcccgtgaccgtcagcgaaaggccgttgaccgtgtttttcatgtagtcaaacccgaccgtgccctcgatcgtatgatcctgcgcgaaggtcttgcggtagttcaggtagccctgcgtgctgaagcggttggtctgcccccacttctcgtaggtgcggcgctggttggagattgcgttgcccgccaggcgctggttatcgatcctgtaatagttgtggttggcaacctgcatcacggcgcgcagcccgtcgacgatttcccattcgaggttgaaattggccgtcatgcggcgtgccgtgtagttgctcgtatagtaacggtcgaaccatgcggccgagatggtcgtgttgttggttccctgggcgggcgtgccgtcgtccaggtagtcgcggtgcgtggcgggcatgaacatgccgcggcccacggttgtccagtaggtggcgatacccgacgaggggagcgtgttgcccttcgtttccgagtagtcgaacacggtcgtcgccttcaggttcctgagtatcttgaacgaggtgttgccgtggaaggtgaaacgcgaaaaatcggtgttgattccgatgccgccgtccttcgtatagccggccgacgcggcatactgcaccttgtcgttgccgccgttcacgccgacgtagtagttcatccagtacgagtcgtcgaaccattgcttctgctggtcgttgtcctggtaggcgatcagtttcgagtggtcgatggggtcgaccatcaccttccagcctgcggggacatcggccggcgtatccacgaatttgggcgtccacaccgaattgtcgccgttgccgatgccggcggagttggagcccgtcaggatgcccgagccgtaggcgtaggtcgaagggtattcgttcagcatcgtgcgcatcgtgcgcaggtagtcgccgccgttcatcaggtcgaacctcacggcaggcgaagtccatgcggcctgcgcctcgaatgtcacctgcgggccccgtgccatgctgcccttcttggtcgtgatgaggattacgccgttcgaggcgcgggcgccgtagatacccgccgaagcggcgtccttcagcacctcgatcgactcgatgtcattggggttcaggccggtcatttcacggttcacgccatcgatgataatgatcggggcgttcgactggttgatcgacgaaccgccgcgaatcaggaacacggggtcggaacccggctggttgtcggccgacgatacgcgcacgccgccgacacgtcccttcagggcatcgccgatggagttgaccggggcgccggcgagtttctcgccgtccaccttcgaaactgcggccgtgatcgtgcggcgcgactgcgtgccgtaaccgatcaccaccacgtcgtccaccatcagcgcatcctcttcgagcctaacgtcgatcaccgagcgggtgcctacgggcacctcctgtttcttgtagcctatgaagctgaattcgagcgtcgcatcggggcccgcctggatcgaatagcggccgtcggccccggatgtcgcgccggttgcggttcccttcacgatgacggtggcgccgatcaccggttcgccctttgcatccctgaccgcacccgttacgaggttgccctgcgcctgcgcgtccatcccgcccaacaccagagcaattatacatacacttttcaaaagtgtcgtaaggactcttttcataataggtttctttcagttaagtaattaatgatttgccgggctatttctccccgaaggtgatgcccgacgacgagcccccgtcctggaagccgaccgccagttccgcatagttcgtcccggtgagtgccgtgccgttcaccgaaccgcctgcggcgctgtcctccacgcttttcttgttccagcccacgagcgcccccgcatgcagcgcacatgccaccgcgccgaaattcctgcatccggacacggcgcccacgtcgttgcgcccgatgatgcccccggccgccagcagcgccgaagtgccctcgacggtggcctgtaccgcaccgttgttgacattgcccgtgacggccgacttgtccttggtattgtagtcgtagccgacgatgccgcccgcataggagctcttgcccgcctgggcattgtgcatccagaccgcaccgtcgttggtgttgttggtcgcattgcccgacttgatgatgcccgcgatgcctccggcgccgatattggcgttgctggaatttaccgtcgcccagaccttgccgctgttcgtgcagccgttggtcaccgccgtgccgtccgtgccgtcgtagaaacccacgatgccgcctgcggcctcccagttgttggccgtcgccgtataggccagggtgatgtcgccgctgttcgaacagtcgtctatcgtgctggcgttgtgcgtaccgacgataccgccgatgcgggtcacctgcagtttgtcggagcttacggccgccctgttggcacaccccgtgaccttcgccccgctgtacgtctgccccgcgatgccgccgatgcagaggtaacccgcgcctgcggcattggcctgcacgaatttcacctcggcttcgttcgtgcaatcccggatcgccgccgcatagttcacgcccgcgatcccgccgatgaagcagttgccgttcatgttcgagacgacggtgcctttgttggtgcagttgtcgatcaccagcgtcgggcagctgtccacgatgtaggcgacgatgccgccgatgcggtgggctgccgacgcgcccgcgttgtcgaaccggatctcgcccgcattggtgcagttgctgatggtcgtattgaccgcggtcttcatcaccgaggccgtaattcccgccacggcgttgcctagcccgagcgaagtcatcaccgggccgtggttgtggcatccgtccagcgtgatcgccccggccgcgtcgcccgagccgtcgacgatgcccgcgataccggccacatagctcgccacgcccgccgtcgccacgttgctcaccgcgccgtagttcctgcagccgctcatcttcccgttatacaggctgccgacgatgccgcccgtgcgcgacttgcatcgggaatccgccgtgacggtcacgggtacgaagctggtcacgccggtgagcgtattgttcgattgtgcgacgatgcccgcataacaccacgtatcggtgtcggcgctgtatttgagctcgatgcggctcgtcccgtcataggacgtgccgtccttcgacccgaaaaccacatccgagatcgcccccttggcataggcgaagaacccggcataacgcccgtcggccgatacgttgatattgtagatacggtggccgttgccgttgaacgtccccgtgaaattctcgatcggcgtccacgggacattccgcatgtcgatgtcggcctggaggtcgacgatggcaccgccgttgtcgtcggcgcactcctgcgcgaagttcaccatgtcttcataggtggcgatcctcagccggaagaaaagctcggtcacggctccgacgcagttccccgcaaaggccacttcctgcccttcgaacaggtttttgacgaagacgctcccgtccgtacaggagatcgtcgccttcagcccgccgtccaccttcgtaccgctggcgatcaggaaattcaccgtctgggcctgcacaagcgacatttcgccgatctccatcgtgaggatgtccgacaccgcggcatcctcgccgacggtcaccgcacccgtccggggatcgaccacggcctccgatacggccaggtgcccctccacaccgtcggggtcgaccggttcgagcgtgattttcgaaatggtcttcgaagcctcctcgccgatcgtgagcgacagcaccgaagccagcggcttgaagtgcaggccgaggctgccctgggcgggtgcggcatcggccgcataggcatacatcggcagggtagcgcccgtttggtcggcaccgaccgcaaatacgccgttgacggccttgaaataggccgtcacttcgccgcgagcgtccgcgggcagcgagagggccaccggatggaactcgacaccgttgccggcatcgtaggtttcgtacacataagagatccccttgtagccgacgacgatctggtcgccttcctgccataggggagcatacgcctcgccgtccccggtagcggacgggatcgcatcgatcgtcgcgaggatcgtcacggcatccgccgaaggttcgtccacgggggataccttcggatgcgtgttgtcctccgaacagcctgcgatcgccagcattgctgctgtgaaaagaaaaatttttcgcatggttttgttttgttggttaagaaatatttggttggtggaaatacgggttgcagggtttgcccggcgcgggcaaacctttcgtacggctgtcgcgcaccggctctgacggcagaaaaacatacttaaagccatcatgcaggtaaatcatacgatatacttttatatcaaatttatggcacctctgcaaatgagggtgtggtcggcggctgaaggcgccttcggaaatgtcgtttccatcggtcgagtagtttaggcggtgttcatagatacatacagccgacccgctcaaaccacttaccggaaattgaaaaaatcgggagcaggatcaaacgaaaaagcgccgggatactatgtatcccgacgccttggggtctgtgccgctccggcctatacgccccgcatgaagagcagcgaaagcagcagcaacagttgttccttggagagtttccggcgcagttgcttgagcgccgcatacatgtggttttccaccgtgcgcggcgaaatgcccagctgctctccgatctcgcggttcgaaaggtcttcgatgtagctcagacggaacacttcgcggcatttgggcggcagcgactcgatggccgcatcgaggctggcgcgcaggtcgtcgttgtagagtttctgcacgacggggctgttgtcgggtgcatagtacgaactgcccagcgcggcgatgcgctcccggtagtaggcgccgtattcgccggcgcgcctgttcttgtccaggtagttgagcgagcggttgtagaccgaacgcagcaggtacttgtacagcgagttcgaatcgtcgagcgtctcccgccgctgccatacgttgtagaacacgtcctgcaccacatcctcggcccagtcgtctctgaggaacaggcgggcgtaggaaaccagcatggcataatatttccggcacagttcgtcgaacgccttgcggtcacccgcgcgaacccgtgatattagcgagattttctccatcggataatcagattcggtacaaaaataaacattctcgccgaacgaaacaatgtccggtaccttttttaatttttttgtaatccggttaggtggtttcccgcgatcggttgtatttaatatgacacgaccaaactacacgaccgatgagaaaaaaccttaccctcgcattttttgcccttttctgtgccctgaccgccgccgcacaactgcataacgacgatgtccacgtccatcaggccgtcagccgccagaactaccgccaatacctccgcatacccgacatcggcggctatatcacgctcaaatgcgatttccacgtccattccgacatctccgacggacaggtgtggcccgtcggccgggtcaacgaagcgtggaacgacggactggacgcgatcgccatgaccgaccacatcgaggtgcacaagaacgccgacatcatccgttgcggcctcaataaaccctacgaacttgccaaggcacgcggcgacatgatcgggatgatcgtgatccccggtgcggaaatcacccgcaagaagccgttggggcacatctgcacgctctttatccgggatgccgacaaactcgacgtcgaggacgagatgcaggccgtcgaggaggcctgccgccagggcgccttcctgctgtggaaccatcccggctaccccgaccggaaaagcgacatctatcccgtccacgaacacctgatcgcccagggcaaactccgcggcgtcgaggtgttcaacaagaccgaatcctatccccgcgcattcgactacgcggttcagtacggcctcgtgccgttcgccaacagcgacatacattatatgagcgggagcatctatcccgtgcgcggcagccgtccgatgaccctggtcttcgccaccgcccgcacggccggggcgatccacgaagcactcctcgccgggcgggccctggcctgcttcgacggcaacctgatggggcgcggggagtacatcggccagatgatagacgctgcgctcgaaatccgcgagatccgccaggtcaacaagaccaaacgcacgttcgagatcgccaacaagtccgacctgcgtttcgccgtccgtccggcctcctacgactatcccatgcccgtctatgcggggcaggtgctgcgcatcgacatcaggcagggcgagcaggtcgaattcacgaactgcatcctcggcaagggcaggtattacacccgcatattctgggaatagggcgcagggcatacgccgccggggctcagcgctgcgacgggccgcggcaaccgatacggtattttgttacagaagctatatttaaaccacgaatgcaatgaagaaagctattcaattcggagccgggaacatcggccgcggatttatcggcgccgtgctggaacaggcgggctaccatgtggtattcgccgatgtgaacgaacaggtcgtcgcgaggatcaactcggacagggcctatacggttcagatcatggacacggtctgcgagcagatgcgcattaccgacatttcggcaatggactcccggagcccggaacttgccgcccagatcgccggggcggaactcgtcaccacggcggtggggctgaccgtgctgccccgcatcgccggggccatcgcggcgggtatcgccgcacgcagggatgcaggcgtcaccgagccgctcaatgtcatcgcctgtgaaaacggcgtccgcgccaccacgcagctccgggaggctgtcctcaagcacctcgacggggcccagcgtgactggtgcgagcagcatgtcggtttccccgactgctcggtcgaccgcatcgtgccgccggtcaagagcgagaacccgatcgacgtggtcgtcgaacgcttcttcgagtggaacgtcgagcgcgccgcattcaagggcgccgtgctcgaaatccccggcatgaatccggccgacaacctgatcgcctatatcgagcgcaagctcttcacgctcaataccggccacgccatcacggcttacctgggacggatgaaaggctacatgaccatctgccagagcatctccgacgaacatatccataccatcgtgaaagccgccatgcgcgaaagcggacgggggctggtggcgctctacggcttcgaccgcgacgcccacttcgcctatatcgacaagatcatcgggcgcttccgcaacccctacctctgcgacgacgtgacccgcgtgggacgcgagccgctgcgcaagctttcggcaggcgaccgcctcgtcaagcccatcctcacggcccgccgctacggcatcgccacgcccgacctgctgctgggcgtcggcgccgcgctgcattacgacaaccccgaggacgtgcagagcgtggaaatgcgccgtctggtcgaaaaagagggtgtcaaggccgccctggcccgcatcgcctcccttcccgacaccgacccgctgctgccgctcgccgcacaggcctacgacgaagtggaacgtatcatcgccaaaatccccgaagcacaatgaaaagaccgagcccccttctcctgctcctggccgtatgctgcgccgccgtgctgcccgcgtgcgcccaggccccgataccgcacgccgtgcggatcgggtcgatcgaagaactgcaagcctatttcacctatgaccccggccgtgacatcatcgtcagcggacaccgcgggggcatgatgcccggctatcccgaaaactgcatcgaatcgtgcgaaaagacgctgtcgatgatgccgaccttcttcgaggtcgacttcagcttcacccgcgacagcgtcatggtactgatgcacgacctgacgatcgaccgcacgaccaccggcaaggggcgcgtggccgactatacctacgaagagctgcaacagttctgcctcgtagaccgcgaccgcaacgtcaccccctacaagatcccgcgcctgaaagacctgctggaatggggcaaggacaaggtcgtcttcaatttcgacaacaagtacatcaacaccaagggcgtgagcgacgaggtgcgccgcgccagcctcgactactatatcgagcagttgcagccgggcggcgactggtcgatgtaccacaacatcatgctgagcgtccgctccgtcgaagaggcgctctactactgggagcacggcatccgcaacgtcatgttctgcgtcgagatcagctcgatggaacatttcagggcttacgacgcatcgcccatcccctggaaatacatcatggcctatatccgcctggccgtaaaccccgacctgcaaccggtctacgacctgctgcacgccgagggcgtcatgacgatgacctcgatcaccggctcgtccgacaaggtgaaaaacccctacgaccgccgtgtggcctacctgcgcgagctggtcgccgaacccgacatcatcgagaccgactacccgtcggaattcatcggcctgccgtggtcgcgcgatgcgatccacgccctgcaggaagctgcgatgcgcagccaccgcaccaacctgaagtaaaacccgaaccaacctgaataaatgtctgcaaaacaactcaatccggcctatgacggcatgaccgaccaacaggtcaagcgttttaaatactgggaattccgcaccatggcgatgtgcatcttcggctatgcgctcttctatttcgtgcgcaagaacctgagcatcgccatgccttatctcaacgaggagatgggcatctcgaaatccgacctcggcctgttcctcacgctccacggactgatctacgggctctccaaattctttaacggcatctggggcgaccgcagcaacgcacgctatttcctggtgacggggctcgtcttctgcggcatctgcaacctgcttttcgggttcagttcgtcggtgctggcgctgggtatcttctgggtactcaacggctggttccagggcatgggcgtcccgccctgcacgcggctgatgacccactggatcgtccccgagcggctcgccaccaagatgtcggtctggaacacctcccactcgatcggcgccggcctggccatcatcttctgcggctatgtcgtcagcctgaactggggcgcatggttcgacgcctcgtcgatcctctcgcagcactggcgctggtgtttcctgcttccggcgacgatcgccatcctgggcgccgccgtcgtgtgggccttcgtccgcgataccccctcgtcggtgggacttcccgagttgaaaaccggtaaaacggaggcgaagccgcagaccaaggccgaagagaaagccgagtacaaggccttcctgcgccgcaaggtctttatgaacccgacaatctggatcatcgccgtaggcaacttcttcgtctacatcgtgcgcttcgccgtgctggactggggacccacgatgctcaaggagcacctccacatggacatcagccacgccggatggacggtcgcggcattcgaaatcgccggcatcgcgggtatgctcgccgcaggctgggccaccgaccgtttcttcggcggccgcgcgccccgcacctgcgtgatctgcatgctgatgaccgcgctctgcctcgtggggctctataccctcaatgaacatacgccgctggccgttgccatcgccatcctgatgtcggccggattcttcatctacggcccgcaggcactcgtcggcatcgccgcggcgaacatcgccaccaagcgcgccgccgccacggcaggcggtttctgcggcctgttcggctacggcagtacgatcgtctcgggctgggggatgggtatactggtgcagtacaccgactggagcgtagcgctctacacgctggtcggcatggcgcttgtcggcacggcggtcttcgccgccgcatggaaagccaagccgaacggctacgacgactgacgcagttttaggttaatgataattgtgtgtagagaaacccccgcagacttccttgactgcgggggtttcgtttgcagccgctttccgggcggatcgcacggccggctgcggcactctttccgtcgggaggttattccaccgtcaccgacttggccaggttgcgcggctggtcgacgttgcggcccttgttgacggcgatgtaatatgccagcagctgcaacggcaccgacacgacgatcggcatcaggcagtcggtgaccaccggcacctcgatcgtatagtcggcactgcggcgcacatgcgtgtcgtcgcgggcgatcacggcgatgatcttgccgccccgggcgcggatctcctcgatgttgctggccgttttctcgtaggtgttgtccggcgtggcgatcgccacggtcggcatctcgttgtcgataagcgcgatggcgccgtgtttcatctcggcggcggggtagccctcggcgtggatataggagatctccttcaatttgagcgccccctcgagcgccgtggggtagttgtagccgcgccccaggtagatgaagttgtgcgcataggtaaatatcttcgagaggtcggcgatctggtcgcccagcccgagcacgtcctccagcacggcgggcagttccagcagtcccttcgccacttcgcggtaatactcttccgtcacggtacccttttcgcggcctacggccagcgccagcatcgccatgacggtcacctgccccgtgaaggccttggtcgaagccacgccgatctcgggccccacatggatgtatgcccccgagtcggtcgcccgggcgatggacgatcccacgacgttgcagatgccgaagacgaatgccccggccttgcgggccagctccacggcggccagcgtgtcggccgtctcgcccgactgcgacacggcgatcacgatgtcgtcggcattgatgatcgggttgcggtagcggaattccgaagcatactccacctccacggggatccggcatatattctcgatcaggtgctcgccgatcagcgccgcatgccacgatgtcccgcacgccacgaatacgatgcggcgggcgtggaggaatttttcgcggttgtcgatcacgcccgacagcttcacctcgtacgtgtcggggcttatgcgcccgcggatacagtctacgatggtcttgggctgctcgtatatctccttgagcatgaaatgcgggtagccgcccttttccagctgcgagatgctcatctgcaacttcttgatatcgacccggccctcgtggttgtcgagcgtgacgatcttgaggggcttatggcggttgataacggcaatctcgccgtcgttcacatagacgaaatcctgcgtgtattcgatgaccgaagcggcgtccgagctaaggaaaaattccccctcgccgatgccgatggccatcgggctgctctgacgcgcggcgatgatctcgtcgcggttgcccttctcgatcacggcgatggcataggcgcccacgacctgccgcagggcctgctgcacggcttcgagcagcgtgcagccgcccgtgatgcggatgtactcgatcaggttcacgagcacctcggaatcggtgctgctgcggaacgtgtagccgttctcctcgagcgcatccttgagcacccggtaattctcgatgatgccgttgtgtatcagtgcgatgttctccgattcggagtagtgcggatgggcattcacgtcgttcggcacgccgtgcgtcgcccagcgcgtatgcgcgatgccgatgctaccgcccagctccttgccctcgaggaaatgctccaggtcggagaccttgcccttacacttgtatacgttgagcgcaccgtccttgccgaccatggcgacccccgcgctgtcgtatccgcggtattcgagccggtgcaaacccttcaacagaaccgggcaggcctcgcgccccccgacatatcctacaatcccacacattcgttctcaaaatttttatcctgccaaaaataagaaaaaattttaaaaacatattccctgcgggaataaaaaaggacattcaggcataactttgcgtcatttgccgcaaacgggcaactgcctccggagcgcaaaaaacgggatgcggatcgaatgtccgcaccccgtaataccggttgcctgccgtcgcagcgccgtgccgcccggcctatcggatatatttgagcatctccccgacgagcacctcgttgcccgcggcctgcgagacgccgcggttgcgcctgaaatcgcagacgacgcccccggcttcccgcacgatcaggttcgcggcacagacgtcccactcgtgcaaatccagctcccaatacccgtccagcagtcccgccgcgatgcagctcaggtcataggccgccgatcccagccgccgtatgtcgcgcacatagggtacgatccgcgcgacgttgtcgctgttgttgtccggatcgacatccttgtcgtaagggaaacccgtggcgagcaccgacgtggcgagggtctgcttggcggagacttgcagccgcttcacctcgcctgagcggctcttcatgtaagccccgccgcctttcgacgcccagaacagctccccgagatagggtgcatagaccaccccggcgacagtttcccccttgtgctggagtgcgatcgacaccgagaagatcggcagcccctggctgtaattggtcgtgccgtcgagcgggtcgatcacccagcggtaatcgctccccgccgtgcccattacgccgccctcttcgcccagtatcccgtgaccgggatagcggccgaggatcgcctgcacgatgtaggcttcgctctccttgtcggcccgcgtcaccacgtcgtacgcgttcgatttggtctctatccccaggtcgttgccccggaagtaggcgagttggatctccccggccccctttgcgagcgggaagatgaaattcaggaattcgtcgtacatggcgctatttctccgctgcgaaatacctgtagaacagcgggatggtctccacgccccggtcgaactgctccagcccgtagctctcgttgggcgagtggatcgcgtcctccgcgagcccgaagcccatgagcagcgacttgatgcccaggatcgactcgaacccgctgatgatcgggatcgaaccgcccgaatagaagggcaggggtttcttgccgaaggtctcggcgatggccttctgggcagccttgtaggccggcatgtcggtcggtgccacgtagggcatgccgccgtgcagcgatttcactttgaccttcacgctcttgggcgctatcgacctgaaatatttttcgaacagcctgctgatcttgcggtagtcctggttcggcaccaggcgcatcgagatcttggccgaggctttcgacgggatcaccgtcttggttccctcctcggtgtagccgccccagatgccgttgacgtcgagcgacgggcgtacgccggtgcgttccagcgtcgtatagcccgcttcaccctccacgtcgccgatcgacaacgatttcttatagcccgcgaggctgaacggggccttgttgaacgccttgcgctcggcgggcgtcagctcgcgcacatcgtcgtagaacccggggatcgtcacgcggccgtccttgtccacgagctgcgccacgaggcgcgtcaatacgttggccgggttggccacggcgccgccgaacagccccgagtggaggtctttgtcggggcccgtcacctcgacctccatataggccagcccgcgcaggccgcaggtgatcgacggggtctgcatcgagatcatcgaggtgtccgacaccaatattatatccgccttgagcatcttcttgttctgttcgcagaacttgtagaggctcggcgagccgatctcctcctcgccttcgagcatgaatttcacgttgcagggcaggctctccgtggcgcacatcgcctcgaatgccttggcgtgcatccacagctgccccttatcgtcgtcggcaccgcgcccccagatacggccgtccttgatgaccggctcgaaaggctccgtgcgccactccccgcgcgggtctacgggcatcacgtcgtagtggccgtaaaccaatacggtcttggccttgggatcgacaatcttctcggcgtaaacgaccgggttgccctccgtcgggaagacctcggtgcggtcggcgcccgcctttgcgagcgccgcggccagccattcggcgcaccgcgtcatgtcgggcttatgctcgctctgggcgctgatcgaaggaatgcggagcaagtcgaacaactcgctgataaatcgttctttattggcttctatataactttttactttatccatccggcaagggttttattcggttttcttcaatacgtaattttcggccagcgcccccgtgacgggttgtttgtcggcatcgagcttgcgcacctggttctcctccaccttgtagtaggcagtctgcccgtccatgggggtcagcgtcagcaggttccccttgaccttgtaggcgcccttctcgtcgaattccgagtcgcggtccaggtatttcatgtgcaggctgtacgtgccgtccttcttcagcgtgaggcgcatgtcgatccccgggcagtccgccgccgggaaaaccccggtgtatgtcccctggtagtcgagcgagctctccgcatcgtgcatgtcgaccttcacggcatccgctttgaccttttcagataccgcctttttctgttggttgcccccgcaggcgacaagcgttatcgcagccgcgaggatcatgactttattcttcatagtcgtttcgtttaaactgtttatattttacagatttccttaatttccccgatgaaccgctgcgccagcgcctcggccgcagccatcgacttcgcctcggtatagacccggataatgggttcggtattcgacttgcgcaggtgcacccagttctccgggaagtcgattttcaccccgtccgtatcgttcacgttctcatcggcataacgttcctttatctcacgcagtactttatccacgtcaatcgccggtgtcagctcgattttattcttcgatgcatagtatgccggataggtcgcacgcaactgcgtcatggtcatccccgtctgtgcgagccatgtcaaaaagagtgccgttcccaccagcgcatcgcgcccgtagtgcagccccggatagatcacgcccccgttgccttctccgccgatcacggcgcctacctccttcatcctggccacgacgttcacctcgccgacggccgaagcataatatttgccgccgtgccgctccgtcacgtcgcgcagcgcccgcgacgaactcaggttggaaaccgtattcccgcccgggtgcttcgtgaggatatagtcggccacggccaccagcgtgtactcctcgacgaacatcgagccgtcctcgctgaccagtgccagccggtcgacgtcgggatccacgacgatccccaggtcggccttctcgcggcggatcaccccggctatttcggtcaggttctccggcagcggctcggggttgtgggcgaattcgcccgtcgggtcgcagttcagctccacgacctcgcaccccagccgccgcagcaattcgggcatcacgatgccgcccaccgaattcacggcgtccacgacgaccttgtagcggcgcgcacggatggcctgggcatcgaccagcgggagtgccagcacctgcgctatgtgccgttcgttgaacggctcgcgcgaaaggacgcgcccgatgccgtcgacggtggggtattcgtaatcctcctcttccgccatcgccagcacctgtttcccctcggcgtcgctgaggaattccccgtcggcgttgagcagcttcagggcgttccactggcgggggttgtgcgaggcggtgatgatgatgccgccgtcggccttgtgcgtgatgacggccatctcgacccccggcgtggtgcacaggccgacgtttatcacatccgcaccgcacgccagcagggtgccttcgaccaggtcggcgaccatctcgcccgaaatccgggcgtcgcggccgacgactatggtaagttttttgccggggttgcggcgggcggtcaggcgggcgtaggccgtggtgaacttcaccacgtcgggcggcgtcaggttcccggcctgggctcctcccacggtgccccggatgccggaaatggatttaatcaatgtcatatttcaaggctttgatgcggagtttccgccatacatatatttatgaaaaattcccttcgaagttttgatattcgaggtaaatatattacttttatgccaattatgaaaatttaaaaacgactattatgagaacgattccagcttccgaattgattatcaacgacgacggttccattttccatctgcacctgcttcccgagcagttggccgatacggtgatcctcgtcggggatccgggccgcgtggccctcgtggcggaacatttcgatacaaaagagtgcgaagtcgccaaccgtgagttcaaaacggtgaccggcacctacaaaggcaagcgcatgacggtgctctcgacgggcatcggcatcggcaacatcgacatctcggtcacggagctcgatgcgctggccaacgtcgatttcgccacccggcaggagaaggcccacaaaaggcagctcacgctggtcaggctcggcacgtcgggggccatccagcccgatatcaaggtgggggagttcgtcttctcgcgcacgtcgggaggcttcgacggcctgctcaactactacaagggccgcaacgaggtctgcgacctggagatcgaaaaggctttcatggagcatgtcggctggaacgagctgctgcccaaaccctatttcatcgacgccgacaagacgctcttcgagcatttcagcgatgtgacgcgcgagggcatcaccatcgccgccccgggcttctatgcgccgcagggccgctgggttcgcctcgaaccgcaggacgccgagctcaacgcgaagatcgaatcgttcggctaccacggccgccgcatcaccaatttcgagatggagggctcggcgctggccggcctggcagccctgatgggacaccgcgccgcgaccatctgcacgatcatcgcacagcgtatcgcccagagtgtcgacaccgattacaagcccttcgtgcgcaagatgatctcgacggcactcgacaaactggcagtattgaaataagcaatccatataacagaaaataaaagaaaggaaacaacgtatgaaattttcagtatcaagctcggccctgctttcgcttctggctaccaccggcaaggttatcagcaataaaaacacgctgcccatcctggactacttcctcatggagctcaatggcaacgaactgaaggtcaccacttccgacctcgaaacgacgctcataggctctatcacggtcgacagtgtggaaagcgagggcaccatcgcggctcccgccaaactgatgctcgactcgctgaaggagttttccgagctgccgctgaccatcgacgtcaacgacaagaactgggagataacgatcaactggaagagcggttcgctctcgatccccggcgccagcgccgtgagctatcccgccgtgccgcagctgagcgccgagaagaaggagctccggctggatgtggacatgctcgtgaacggcatcaacaagaccatcttcgccacggccgacgacgagttgcgcccggtgatgaacggcatctacatcaacctcgcgcccggggcgctgacgttcgtgggaaccgatgcgcacaaactcgtgaaatacgagtccgaagccgaaaacgaggtcagcgcatcgttcatcctgcccaagaaaccggccaacctgctcaaatcggtgctcctgaaggaggacgacgccatcgaggtcagcttcgactcgaagaacgccatgttcaagctcaagagccacacgctcgtatgccgcctgatcgagggcaactacccgaactacaacgccgtgatcccggccaacaaccccaacaaggtgctcgtcgaccgcatcgagctggtgaacggcatcaagcgcgtggccgtctgctcgaacccgaccaccaacctgatccgcatggacatcggcgacaaccggatcaacctcacggcgcaggacatcgacttctcggtttcggccaacgagaccatcacgtgcagctacgacggcgagccgatctcgatcggtttcaaatcgacgttcctggtcgagatactttcgaacatggacaccccgaccgtgatggtagaactggccgactcgacccgcgcgggcgtattcaaacccgtctacgacgacaagcagaccagcgcgacgctcatgctgctcatgccgatgatgatcaacgcataacgcccgacagatgaagttaaacctcaaacgcccgatcgtcttcttcgacctcgaaaccaccggcgtggacacggccaaagaccgcatcgtcgagatctcgatggtcaaagtgatgcccgacggcgagcagatcgtcaagacccgcaagctcaaccccgggatgcatatcccggcggaagccacggccatccacggcatcacggacgaagacgtgaaagacgagccgaccttcgcgcaggtcgccaaatcgctcgaacagttcattcgcggctgcgacttcggcggcttcaactccaaccgcttcgacctgccggtgctggtcgaggagttcctgcgggcgggcgtcgacgtggatttcaaacgccgccgtttcgtcgacgtgcagaacatcttccacaagaaggaacagcgcacgctggtcgcggcctataaattctattgcgacaaaaacctggaggacgcccattcggccgaggccgatacgctggcgacctacgaagtgctcatggcgcaattggaacgctaccccgacctggagaacgatatcgacaaactggccgagttctcgacccgcggcgaggcggctgactacgccgggcgcatccttttcaacgaaaagggcgaggaggtcttcgggttcggcaagtacaaggggcgccccgtcgccgaggtattccgcgcggagccaagctactacgcatggatgatgaacggggacttcccgctctacaccaagaaggtcatcacggagatccgtatgcgcgaaaaaacgaaatgacgatgaagcgattctgtgcgacagccctgttgctcctgtggagcctgtgcgcccttgcggtgcagaaatccgggacgatcgtgtatatcaacggctcgaaattctacgttcacacggtgcagcccggcgaaacgctctacgggctttcgaaggcctacgaggtgggggagaaggtcatcctgcaacataaccccgcggcagcgcaggggttgcgcgcaggggagagcatcaagatccccttcgtatcggacgtcccccagcccaagtcggagcgcaaactgcgcaagaccttcgacatccataccgtgacgcagggcgaaacgctctacggcatctcgcgcaaatacgagatcccgatccagaccgtcatcgaggacaaccccaacctcgacccggtgcacctgcgcctcggggagcgcatcctgatccgcaagaaggagatcggctccgaagacgaggccggcacgagggagcagtgggaggcctaccgcaattcgctcaacagcgtagccgaggagggtttcgcctaccacatcgtgaaaccgggcgaaaccttctattcgctttcgcgccgcttcggcatcaccgaggatcggctcgggacgctcaacggagggctgaaacccgccgacctgaaagccggggcgatcatcaaggtgccgggctctgcggaacagctcgcagccgccgaaaacggcccgcaggccgacagcctgcaagtgcaggactcactcccggggatctttgccggcagcaggccgaagcaggtcgaattccgcgccctgcgccgcagcgcaccgctcaaggtggcgctgatgctgccgatggccgtcggcaacgagcccaacggcaactacctcgaattctaccagggcttcctgctggggctggacagcgtgcggacgaaatacggccactcgatagacctcacgctttacaacacggcccgcaatgtggatgcgatccgcgaattcgtcaaaagcgacgccttcgccggcaccgggctgatcgtcggccccgtatacgaggaggggctccatcccgtcatcctctatgccgaggagcacgacgtccccgtcgtctcgccgctggccagcatcacggggatgaacagcgacgccctgttccaaatggcacccgacccgtcgcacaaatgggacaaggtcgccgacttggtgaacggggacaaacaggtgacgctgatttacagcgacagcacggacaaggacttcgaatccgagatcctcgccctgctgggcgattccgactaccggaagtacacctatacatatgtgcacccgtcgaaccgttcctccaacaatccgggcgacctgacgccgctgctggataacggccaggacaatgttttcgtcgtcatgaccgacgatgaggtcgaggtcgagcgcatcctcgcggccatcgcctcggccgatacgagcatcacgggccgcgggcgcacggctccgcgcttcgtcgtgctgggcaacacccgctggaaccgctacggcaacctcgaccgcacggtattcttcaaagaccgcgtggtgttcatctccacctaccacgccaagcgcgactcgcaggcgatcctcgatttcgaccgtgcctatatccgcgccttcggcgcattgccttcgctctactcctaccgcggttacgacgccgcgctgatcttctgccccgcgatgtacaacgacatcgaatacgacctggaagggcgcagctatacgccgctgcaaactacctatctcttcggccagggcgagcagcgcgacaaccacgtcaaccgcaactggacgcgggtgaactacaacagcgactttacgataaccatcgaataaagcgacctctatggcagcattgaccaattcgatccccgaaaaaaccatcgagcggctgagcgaatatcgccgtacgctcctggccagccacaagcagggcattacgcatattttctcgcacgtattggcgggcatccacggcatcacggccgtgcaggtgcgccgcgacctgatgctcatcggcttttcgagcgatacgaaaaagggatacgacgtacaggtgctcatcgagtacatcagcaagatactcgacagcccctcgcagatgaacatcgccgtgctgggcatgggacacctgggacaggccatcaccaaatacttcaacggcaaggggctcaagctgagaatcacggccgccttcgacgtcgaccccgagaaggtcggcaagaccatcgacggcatcccgtgctaccacatggacaccttcgaagacatggtcgaaaaccaggacatcagcatcgtcatcgtctcttcgccgacgaaggtcgccccggggctcgtggtgccgatcatcaacgccggtatcaagggcgtgctcaatttcacttccacgccgctgaatttcccgcagggcatcgtcgtcgagaactacgacatcaccacgctgctcgaaaaggtggcctatttcgtcaaggagaacgaagaaagcaacagcagcaacgcatgatgcgactcgaaggaaaaaacgcagcggagggcggagaaacaggcaacctcgacatacacggcgaccttacggaacaccggccggctgccgggcaagcggacatgcgagttttttacgggttcgatgcactcccgcatttcgtccgtccgacggtcaccgtcggatcgtacgacggcgtgcacagcggacacctggccctgttgcgcaccgttgccaggagggcccgcgcacagggcggcgagagcgtcgtactcacgttcgaaccccatccccgcgtgacgctcggccgggccgacggcctgcggctgctgacctcgctcgaagagaagatttacctgctcggacagcagggcatcgacaacctgatcgtcatcccgttcgacaagacattcagcgcccttgcgcccgacacgttcatccgcgactacctcgtggggcgcatcggcgccgaaacgctggtcgtgggcttcaaccaccgcttcgggcgcgacaagcagggcagttacgactatctgggcagccacggcttcggactggaggtcgtggaagtcggcgaatgcgacgtggacgccgaaaaggtcagctccaccgtcatccgccgcctggtggcacagggcgacatggcccgtgcagcccgcctgttgtcgcatccctacctcgtcatcgggacggcggcggccggccgcatccgcaccgacgaccccctcaagctcctaccgcccgcagggtcgtaccaagtccgcatcggcggccggccggcaaggctgacggtcgacgcatcgcaaaacctgataatccgcgacggctgccccgacgggcgtgccgtcctaaccttttaagcaccatgctgagttacgattgccaaatccgcgtgtggtacaaacacaccgaccagatggccatctgccaccattcgaactacatctgttactacgaagccgcgcgcagcgaactgctccgctatctgggcatgtcctttgccgaagtcgagaagcggggcatcatgatgcccatcctcgaggtgcagtccaaataccaccgcccggcctactacgacgagctgctcaccgtgcgcatcatgctccgcgaactgcccacggcgcgcatcaactttttctacgaaatctacaacgagaagggcgagctgctcaacacgggcatgacgcaactgggcttcatccacagcgacacacgccgcccgtgccgcgtccccgactggttcctgaaactggtcgccgacaaatggacggaagagtagaggccaccgcggcactccgatgcttctcacaacggaaaggctccggatcgttccgctgacaccccggcagctggggctctggctgcatgacattccggcactggaaaaggagttggattgccgctgcacagccggaagcccgcgcggcgacttccgccggatcgtcgcgtgcagcgtgcagcatgcacttgccgccgccgaccccgacaatcacctcttccacaccttctggttcctgatcttacgggatggcggtgccgttgcgggatcagcctgcttcaaaggggcggcggatgccgacggaagggtagagatcggctacggactggaaaagcctttgaaaaacagggttacatgaccgaaaccgtccggcattgtgcgcctgggcgaagcaacagcccggtgtccggcacatcactgccgagaccgaaccggataccgcgcctcgcatcgcgtcctgcaaagggccgggttccatcccgccgaagcggacgcagcccgatggcggagcctgtgaaaccaggctgccacccggaaaatacagaaggccgttcctgcgaacggccttctgcattttcgtcgatccggaaccgtggatccggaattccggctttccggggagcggggccgactcgtggcaggaaaaactgttcccgacggccggcaggctcccgcaaagtcattcgagcatccccttgagcgtctttttcatcaggtcgtggtcgcggaagtcgttacgcagctcatagctgccgtcgcggtcgaccagcacataggacggaatgccgtcgatccggaatttctcgcaaaggtatttccactgcgcgtcgtcgagccggtaatgcttgcccgcgatcttggcgatgctggtcttgtaggcgaccagcggcgaggtctcgttggcgatgtatatccacaccaggtcgtcgctcttcagttccccgctcttgagcggctcgttcgctttgatcgaagcccggcaggggccgcaccacgtgttccagaaatcgacgaacaccaccttgcccttgtagggcgctacaatcgcatcgaacagcttgtcgacggcaacctcgggcgtcgtttcgatacggacgtccttcaccgactccagctccttgcgcacacgcgcctgcatcgcctcgcaggcctcggcgtagaacggctccttgagcgaatgcaacaggtcgaggtcttcctgcgtaagggcgttgttttcggccttggacggaagctgatataccttgggaaggtcggccaggatgccctcggtagcgtgtgcgatattcgcccagccgatatgcggggcgatgatggagtagcaatagtccgaggaggacatgcccatcagcagtttcgggttattcaggtcgaaaagcccggccagcaccgcataatgctccggtgcgaaaacggcgaattcgtagtcggccttcttgccgtaatcccaatcctcgtgccggctccggtaattgtgttccaacagtccgggcccgttggacatggccccgagcgcctcctgctgcaacgtgagcagggacaattccttcatcatcccggacaccgggctgcgcgcgatgctgtccgccaggctttcgtatttcgacacgaccatctgcgtatactcgtcggcactcatgcggtaatccgcgaaatcgcccgaatagaggttcatgcggatactgctgccgccgctcgcatccaccagcgcattgagatccgcatacgccccggtcgtatagagcctgcgcccgggcgcaggctcgcattccttgtcgcggcgctgcacgacggcccggccgcctgcctccatagcgatatacatgtccagcgtttcaccgggggcaatccagcacatcccgaataccgggccgcacgaaacataggccatggccgtaccgtactgttcgaatcgcagggttgccgtgccgctttcggggtcgatggccgccgtatgctcttcctgaccgttcagcagcgaattgacatacatggcgacctccttcaccattcccctgcggtaccccagcaggcggacgttcacggtggtcgtccccaccgcgagtatcggttcgggaacggggccgtcttcgggggccttctgcagtgcgcggggtaacccctcgggataacgcggatactcctttttacccgtcaggtcgaccccgtagagtttgaagcagtcgtcgcagtccgattcgatgaaatcgaacgatttggttccccgcggcagcggcccgaatttcagcacgaacgacgcttcgcccgagtcgggcatccaaaagagcgaatcggggaggataccttcgctgccctgcaacatgtatttctgcccgtcggccagcaagtaagtgcccgcgtcgatgcggatccagttgtgcggccggaaataggcatcgacatgcaacacggtcgccgtgtcgctcagttctattttcggaaagtcgagcgtcatggtgttggcagccccgatcagggggttctcgacgacacggttcgccggggtgcatgacgcaaggagcatcccgaccgccaccgcaccggaggttagcagttttctcataattcggggttttaggttatgacaaatataaccttttattcctttgcgcaactatttccgcacaagtattttacggcccgccggcaaataaaagggggctgcaccctgcggcgcagcccctcctcattaacccttgcccgttacttttcgatcagcgaaatcgagcgctggatgaaatccgtcaggctcttgcccttgagcatgccgttcgtgagcaacgccaggtcgatgatctgcttcacgagcctgttttcgccgccgatctcgcgcagccgctcgttgcgctcatcgcgcagcgtgacgaccttcttcgacaactcctcgcgcatggatttctcttcgggggtaagctcctcctctttcttgcccttggtaacctcctcgaagcggttttcctcggccacggccgcgtcgatcttcttggtgatggacttcagcttgtcgccgtaagccttctcggcatcggagaggatgtccgcgacgatggggtggttgccgttcaccgcgatggtgaagttgtcgggcatctgcccgtagaactggctcatgcccccgccgcccgctgcggccatctccttcatacggcgcatgaattcgttctgcgtaatcaccacgggcgcctcgtcgggcgacatcgcctcgaacgaaatgttgtagtgtatcttgtcgtccttgggcatctggctttcgaagaccgggcgcaacaactcctgctgcgcttcggtgagcgacatcctgatgttgtcctccttctggatgagcttgtcgatcacgtcgctgtccacacgcacgaaacgcgtctccttgtttttcgactcgtaccagttgacgtagtggttgtccagctgaccgtccatcagcagcacgtcgtagcccttgcccctggcggcttcgaggaacgtgtgtttttccacggggtcgtccacatagagcagcacgacggtcttgttcttgtcggtctggttctcctttaccttttcgaggtactccttggacgtgaaatacttgccctcgacgttcttccagagcatgaaatcctgcgccttctcggcgaatttctcgtcggtgaggatgccgtactggataaaaatcttcaggtcgtcccatttcgactcgtaatccgggcgcatcgtgttgaacaactcctgcagccggtctgcgaccttgcgggtgatgtaattcgaaatcttcttcacgttggcgtcgctctgcaggtagctccgcgacacgttcagcggaatgtccggcgagtcgatcacgccgtgcagcagcgtcaggtattcgggcacgatgccttcgacctggtcggtgacgtagacctggttcgaatagagctgtatcttgttcttctggatctcgaagttgttgtgtatcttcgggaaatagaggatgcccgtcaggtggaacgggtagtcgatgttcaggtggatcgagaacagcggctcgtcgctcatggggtagagctcgtggtagaactccttgtattgctcctcggtaatgtcggccggcttgcgcgtccacagcgggtctacattgttgatgatgttgtctttgtccgtgtcgacgtacttgccgtccttccactccttgaccttgccgaacgcaatcgggatcggcaggaaacggcagtacttgcgcagcagcccttcgaccttcgaatcctcggcatattcgagcgcatcctccgacaggtgcaggacgatggtcgtaccgcggtcatgcgcctcgtcggtctcctccatttcgaattcgggcgtcccggtgcagctccagcgcacggtcttggcaccctccttccaggatttcgtaatgatctccaccttatcggccaccatgaacgacgagtagaaccctagtccgaaatgcccgatgatcgcctggttcttgtacttctccatgaactcctcggcccccgagaaagcgatctggttgatgtatttgtcgacctcttcggccgtcatgccgataccgcggtcggttacggtcagcattttggcatccttgtccaccgagacgcggatcgtcaggtcgcccaggtcgcccttcatttcgccgatcgacgagagggtcttcagtttctgggttgcgtcgacagcattggagatcagctcgcgcaggaaaatctcatgatccgaataaaggaactttttgattacggggaatatattctccgtcgttactccgatttttccgtttttcatagttttatcgttgtattttgattcgattcgtctctgtcttgtttcaacaaaccgtgtgccagcccccgattcctgccaaactgtcagttgcgcatgacagcatatgccgaaaaaaagttgccgcagcgagagttttgctttatatttgtatggcgaattcaaacacacgaccaactatggatttcctctcgttagccaagaaacggtatgcctgccgtaaatatacggcccaaaaggtcgaacaggcaaaactcgacacgatcctcgaagccgggcgcgtggctcccacgggcgccaaccgccagcctcagcggctcatcgtcgtgcgttccgaagaaggcatggcacgcctggcacgctgcacgcgcgatttcggggcgccctgtgccatcatcgtatgcgccgataccggccaggcctgggagcggaaatacgacggcaaggtgatcggcgacatcgacgcttcgatcgttaccgaccacatgatgctttgcgccgcgtcgctggggctcgacacgctgtggatctgcatgttcaaacccgaagccgtacgcgcggaattcaacctgccggagcatgtcgaaccggtgaatatcctgctcgtgggctacggcgccggcatcccggccgaccccggccgccatgagctgctgcgcaagccgctgtcggagacggtcgtcgaagaacgattctgagaccttgccccgctaaaaacaatccgggagaacgcagccggggtgctgcggcaatgcccggcggccgtccgctcgtccgtcgagccggaggctgcccgcgtcccgcccccatgaaccggatcggctccgaattcatccatgtcggcatccgacaccccgataatccccgaaaaacgggcgccgcaaggttcataccgacctgcggcgccctttttcatcggacacggttccggattccggaacaacaactatttcgcgtacaaccggaatttcatgctccacgtcccgcccggggcgatcgaccggaaaccttcggcttcggggtcgggcatgttcggggcgttcgtcgtccacgactgcggctcggggcagcagtagggaaccttgccgccgttgttccagatcgtccagcaggtcgtctgcccgtccacctcgtagcaggtacggacgcccgtgcgcaggttctcgaccaacgcgccgcggaacggcttgccgtccacctcgatctcgcgcaccgtgaaagccgcctcgatcgggtcacagtccgtcacctgcaaccccgcgccgcgcagccgggcaaatttctccgacaacggcaacttgcggcccgtcgggatgttacgtccgctcagctcaacctgttctccaaccgccgcacgcatcacgtaatcgcctgccgcacctccggcgaagggaatccgcatcggcgtatggaaccccacgccgacgggcatcggctccttgctgcggttggcgaacatcacctcctgttccagcccgccggccatgaggcggtatacgatcttgcacttgaactcgtgcgggaaatcgcggaatatcgcatcgttccccgcattcgaatagtagcggcactcgaccagcacctcgtccgcggtttcccacgccttcgacacggcgaaaggctggctcttgagaataccgtggtgatagtggcctcctttcgcgtcggtgatcgggaagcggtaggtgcgcccgtcgaacgtgtattgcccgtctgcaatgcggttgggcgggaagaggatcggcagtccgaacacatgcgggcgccgccggaactcttcgacctcatccccggcgggtgcacgcaggatttcgataccgcgccgcgtgtcggccagccgcacgaggttggcgcccatgtccggaaccagcagggccgcgtagtcccctttcgaaaactccacggcccgcattccatgccacgctatgctgcgcagcatcttagagcagcttttcgatcttggcgaccagcgcatccttcgatgcggcgccgacctgcttgtccaccagttccccgcccttgaggaagataatggtggggatgttgcgcacgccgtatttcgccgtgatctcatcgttctcctccacgtcgcacttggcgatcagaacgcggccctcatactcggtggcgagctcgtccacaatgggggctaccatgcggcagggaccgcaccattcggcccagaagtcgatgacgacgggcagctctgacgaaagtacttcctgaaaattctcctttgtgattgctaaagccataattacaaggtttttaattgtttgtatagtttatgcgatcgaatactttatgtcgttgtcctccaaatagcctaccagcgactgcgtgaggctgaccttgtagctcttcgagaaaaggctcagcgagacatgcgcgtcgcggtcgtagacattgacccggaacagggtttcgccccgagcttcgcggacacgttccgacaggtcgcggatcagctcctgcgtcacctcctgcacgggcagctgcacgtgcatctccttgatcatcgtgtcgcgcatctccgagagctgcaccatcgagatgatcttgaattccagctccttgtcgttatagggcttgggctgcacgcggccgcggataaagaggaaatagtccgagaagaggtatttgcggaaattctcgtagtccttgccgaacagcgcgaactcgtgcgtgccgttgtaatcctccagcacgaatttgccccacggcttgccggttttggtcatcaggttctgcacgctcacgaccatgcccgccacggcgatctcctgccccttgaaaggttcgaggttctccagctccgtgagctgggtcttgcacatgtggttgatgatgaccttatagtcgtccagcgggtgtgctgacaggtaaaggccgatcatctcgcgctccttggcaagggtctccagctgcgtccagtcggcgcacgccggcaacacggggcgctggatgtccacctgcccgccgcctccgaaaaggctctgctgggcgttgttcttctcggcctggaaacgctgtccgtaacgcatcagctgttcgatgaaggtaatgccggtattgtcacgtgcatccgctccgaagaacttgccccggtggaagcccgatatcgaatcgaacccgccggcataggccaggttctcgaagcatttgcggttcacggccgtgaaattcacccgttccatcaggtcgtatatatccttgaagcggccgttggcattgcgttcggcgatgatgctctccacggcggcttcgccgacgcccttcacggcccccagcccgaaacgcacgtcgcccgacttgttcgacgaaaaggtgcgcatcgactcgttgatgtcgggccccagcacccggatgcccatgcgcttgcactcgttcatgtagagcgtcagctgcttgatgtccgccaggtttcggctcagcagcgccgccatgaactccgaagggtagtgcgccttcaggtaaccggtctggtaggccacgtaggcgtagcaggtcgagtgcgacttgttgaaggcataggatgcgaacgcctcccagtcgccccagatcttgtcgcagatcttctcgtcgtgcccgcgctccttacagccgttgatgaacttgggcttcatcttgtccagcacgtcgcgcttcttcttacccatggccttacgcagcgtgtcggcctcgccacccgtgaacccggcgagcttctgcgacagcaacatgacctgctcctggtagaccgtgatgccgtaggtgtcgctcaggtactcctccatgtcggcgatctcgtaggtcaccggctcctgcccgtgcttgcgggcgatgaagttggggatgtactccatcgggcccggacggtaaagggcgttcatggcgatcaggtcttcgaaacggttgggcttgaggttgcgcaggtgcttcttcatgcccggggactcgaactggaacaggccggtggtatcgccgcgggcaaagacctcgtatgtcggggcgtcgtccagcgggatgtcgtcgatggccacgtccacgccgtgcaccgccttgacattctccacggcgtccttgatgatcgacagcgtacgcagccccaggaagtccatcttgatcaggccgacgctctcgacctccttgccctcgaattcaaccacgttcagctcggcatccttggcaatggccatcggcgcgaacttctcgaggtcgtcctggccgatgatcacgccgcaggcgtgcacgcccgtctggcggatcgagccttcgagtttctcggcgtacttgagcgtattgcgtatcagctggttgggcgactcgcgctcggctgccaactcgggggactccttgtatacgaaatcgaacggcgtctctccgtgtttcttgtcgggggtgatcttgtcgggcaccagtttcgacaggcggtcgctctccgagagggcgagcttctgcacacgggcaacgtccttgatggccatcttgggcgccatggtgccgaacgtcacgatctgggcaacgcgcttctggccgtatttctgcacgcagtagcgcaatacgtcggcgcggccgtcctcatcgaagtcgacgtcgacatcgggcagcgagatacgctcggggttgagaaaacgctcgaacagcaggtcgtatttcagcgggtcgatattggtgatcttcaggcagtaggcgaccaccgaacccgcggccgaaccacggccggggcccaccgagacccccatttcgcgggcggcgcggatgtagtcccacacgatcaggaagtagcccgggaaacccatccactcgatcgttttgagttcgtatttgagtcgttcctcgaccttctcgtccaacacctcgccgtaacgacggtgcgcgcccttgtaggtgaggtctacgaggtagcaatattgcttggcgaccatcagcctgtccgacagctccttgtcatgggcgacgagccgctccagctcttcgaccgacgcacaggcgccgatcctggccagcaactccgcgtcctcgatcttcttgacgaaggattcgcggagctccgcgaggtcgatcttgaaatcctccggcggcgggaagttcggcatcagaggggcgtgcgtgagcttgtaatcctcgcatttggcagcgatctcgagcgtcgtggccagtgcctcggggtggtcggggaacagcgcggccatctcctcgggtgatttgaggtactcctggaacgtgtaacgcatacggttcgggtcgtccaggtcgcgccccgtattgaggcatatcaggtggtcgtgcgccacggcatcctccgcgaggatgaagtgcacgtcgttggaacagatgtacttcacgccgaacttggcggccagctccagcagcgccttgttcacccgcagctggttctcgtagacatccgcatccttctgcgggtcgcccgagggatgcagctgcaattcgaggtaatagtcgtcgccgaagacccccttgaaccactgcaccacgcgctcggcctcctccatgtcgttgtgcatgatggcctggggcacctcgccgcccagacatgccgagcagcagatcagcccttcgtggtactgttcgagcagttgcttgtcgatgcgcggcttgtaatagaacccctcggtaaacgagtaggagaccatcttgcagaggttgtggtagccttcgaggttcttggccagcaggatcaggtggtcgccggccttctcgtccttgtccttctcgaaacggtttttcaccacgtagacctcacagccgaggatcggcttcaccccggcgtccgtagcggtgtcgtggaaattcttgacaccgtacatgttgccgtgatcggtgatggcgatggcattcatccccaatgctttggcgcgtttgatgagcggcttgatggccgcggcgccgtcgaggatcgaatattgggtatgtacgtgcagatggacgaattcaggcatggtcgtaactcttcaaatttatcgcacaacaaagataggcatatttccgcagaattcgtggcagagctcttgcattttatcaacaaaattcctaactttagatatccaacaaaaaccgagagattatgcaagacgaaaccatggttgtattggcggaatacaactccatcacagaagccgagatcgcgaaatccatgctcgacagcgcagggatctggtcgatgatccgcaacgaatatatgtcggccatttaccccataggcaccatgcccgcacaggtcgtcgtgcgtcccgaggacgtcgagaaggccagggcgatgctgcaacacagataaaaacggcgccgcccgtcctgcgctaggcaggctgccggcggcagcggagggctgttcggaacggcgcgtaccggcatcgcgtccgggaaggccatgcatcgaaaagggtgtacgtgcaggttgcacgtacacccttttcgattttacgcggcacgcagtccggcgccgcacgggtcaggtgaagttgatccggtattcgtaggccgtccgctgcggcacgccgcgcacgcggcggggcacccaatggcctttgctggcccggatgacgcggataacctccctggcgagtttttcgtcgggcgacgagagcacctcgccgatcgtgaccttcccgtccggttcgatgtagaaacgcacatgcaccagcccggccatgccgcgcgcggcgaaccgctcgtcgtaacgcagccgcacccgcgcccacgcatggaaggtctcgtcggggtcgccgcccatgaacagcaacgggtcggcctcctgccgcttggcgatcttctccacaggaaggcgcatcgtcagccgccaggtataacttacgggcagcccgtctttccgggccggcgtccacgcttcgaggtgccccagcgcttcggtcacgagctgcttcgtacgctccgtcgcgggctcggcatcgcatttgtcgcgcccctgacaggtattgtccaggaaacgccacccgtccacccgtcccgccgtgtccaccgtaaaggcgaccacgacctgcggcgaaagctccgacgccgggatttgcttctctatcgccaatttctccgcttcgcccatcagccttgccatgaagcgtttggcatcggcgccctggaaacggggcggctgggtctgctgcgccgcggcaccgcaccacagggccagtgccgccaataagatcgctgtacgtttcatatgcccttcgttttaaggtttattcgttccatatccgccacgaagcctcggcctgctggcggaacatcacctcgccgttgagtatgcgcgccccgcgctggcgccccaggtcgaggaaccgggtcaggggcgggttgtataccaggtcgagcaggtagtgcccgggcgtaagatagccgtaggggattcgcggcgcggcatcgacggcggggtaggttcccacgggcgatgcgttgactatgaggcggctctgctccacggcctcgcacggcaggttgtcgtaggtgtagttgccctttgcggcgtcgcgcgacacgaggtcgaacgggatgccccgctcggcgagcacatattgcacagcctgcgatgccccgcccgtacccagtacgagggcatgcgagggctgttcgcccccgagcaggcagtcgaaggcggcccgcaggccgatgacatcggtattgtgtcccacgaggcgtccgcccgccgtacggcgcacgcagttcacggcgccgaccagccgcgcatcgtacgacaggtcgtcgagcagcgccatgacctcgcgtttgtaggggatcgtgacgttgaagccgcacaggtcgggagtctccgccagcaggcgctccagcaccccgatttcgggcagttcgtagagggaataggtgcagtcggcaatcccctcgcgttcgaatttcgccgcgaaataggctgccgaggcggagtgccccagcggccggccgataagtccgaaacgccgcatggctattcctcctgttttttgacgacgatgcgcgccgcgagttcgatgcagtaaatcgccaggaatcccacgatgcagagtacgatggcctccgcgagcagtgcatcctgctgtgtgagggcctcgaaacggccgggcgcgacgttgctctcgacgagcggcatgatcttgccgtggctgtcggtgtaggtttcgacgacctctttccacggccataccttgttgagcgagccgaccatgaaacccatcagcaccgccaccgtcacgtcatgccagtgcttgagcagccacgacagcaggtgcgaaaagctgatgatgcccgccacggcgcccacgacgaagatcacgatgaccgggatattcaggtcgcccacggcctgcatgatgaactggtacttgcccagcaggagcaggatgaaggcgcccgaaatgccgggcaggatcatggcgcagatagcgatggcgcccgacagcatgatgaaccaccacgtgtcgggggtctcggtcggcgtggcgatggtgatccaccatgcggcggccgcgccgaccaggcatgcggcgacagtccggacgttccagtgcccgatctgcctggccacgagcagcgccgaggcgacgatcagcccgaagaagaacgaccagatggcgatcggatggtgcgtgagcaggtaggtcatcagccgcgccagcgagaagatggcgatcccgatcccgatcagcacgggcaacagaaaacggccgttgacgtggcgccagaactccttcagacgcaatgtgccgagcagccgcacggcggtgccgttcacgctcttgatcgactcgatcagctcctcgtagatacccgaaataaaggcgatcgttcctcccgagaccccgggaaccacatcggccatgcccatggcgcagcccttcgctgcaagcagcaggtattgtgtaaatttcatagcatcggtatttagcccacaaatatagcgaaattgcgggaatctgctaaacgaaggtgcacgattaggggaaattccataatcgtgcacctgttttctgccgggggattccgccgtcggccgtcatccttccgcgggttcgggcttgcgctcgaaaaattcgggcttgctgcggcggatgaaatcgacggcctcggacagcccttcggagaatttggcgaaatcctccttgtagaggaagatcttgtgccggtcgtacgagaaactcccgtcggggttctgcatcttgcggctctcggtgatcgtcaggaaatagtcgttgccgcgcgtggcacgcacatcgaagaaataagtgcggcggccggctttcacggctttggaaagaatctggtctccatattcttccgcatcccggcgggatggttggtgaggggtcatggggcagtaggtttgggttattttcggttgaacgaatataagcaaaataaacgtgcaatccaaaaaaatcccctcctaatcttccggcgccagcagggattcccccttgtgctcccaatcggcgagtatctccacggcgcggcggtaggcctcgttctgcgccgggttcatcacccggtagaatgctgccgtatcgaaaagccgctgcgccacgagcgccttgagctgtatgcgcatcagcggcgccgaggctgcgaagcccccttcgtcgaacgccacgccgcgctgtccgcccagcccggtaagcccttcgagcatcgcgtcgccggcctcgaaccccttgtcgaacgcctcgaacgcggggtaggccttctccagtgcggcacgctcccgatccatataggaaatgacgtattcgttgaccacgccgcggcggatcaggttggcatagtaggccgagaacccggccgtatcggctccgaccaggacgtcggggcggatgccgcccccgccgtagaccgtgcgccccgtacgcagggtgcggtactccggcgccccggcatcgagcgaatcgcgcatcgggtcgtcatagcggcgcaggtggtcgaggtagtattcgcggcgcttgcccttctcgtagggccgctggatgacgcgccccgaaggggtgtggtagcgggccacggtgatgcgcacggccgagccgtcccccagtccgatctggcgctgtaccagccccttgccgaaactcgggcggccgacgacgatgccccggtcccagtcctgcacggcaccggcgacgatctcgctcgccgaagccgaattttcgtcgatcagcaccaccagccttccctcgaggtcgtcgccgtttaccggcgcgctgaacgacatgggcggcacagcacgcccctcggtcgagacgatcagggcaccgcgcggcaggaagaaaccggccatctcgaccgcctggtcgagcagcccgccgccgttcccgcgcaggtcgaggatcagcgccccgggtttcccgagcttgcggtacgcctcgcggaactcgggcatcgtcgtgcggccgaagcggttgaccttgatgtatcccacgccgtcggcggccatgtaggcggcatccacggtgttgagcggaatcttgtcccgcacgatcacgaagtggagcggttccggttcgccctggcgcacgacgtcgatctcgaccttcgcgccggtctttccgcgcaggtacttggggacgtccgtctgcttgaaacccacggcatccagcgtgtctatgcgcacgatacggtcgttgggctgcaccccgacgcgctcggccgggcccccgacgatcgtattgaccacgatgaccgtgtcgcgcaggatgttgaattcgacgccgatgccgctgaactccccttcgaagctctcctgcacgcctttcatctcgtcggccccgatataggccgaatgggggtcgagctcttcgagcatcccgctaatggcactctcgaccagcggctgcatgtccacctcgtcgacgtacaacccgtccaggtaacggtaaacctgcgtcagcttctgcaactgccgcacagccccggcatcctgcgccgcaagaggcaggacgaagagagccgatataaatgcaaaaagctttcgcatagtttgttctgtcgtttatttaaatccttatttaaaatacgccgtcagctcgccgaacggcacctgccgctgctcgcccgagcgcatgtccttcaccgtggcggccttcgcctccagctcctgcgagccgacgatcaccacgtaggggataccccggcggttggcatactccatctgcttcttcatcttgccgcagtcggggtaaatctcggcggcgacgcccgcatcgcgcagctcacggagcaacccgagcgccgcggcctgctcctcctgcccgaggttggtgaagaatacccgcgtcgagaagttgacctcctcggggaagagccccagccccgtcattacgtcgtagatccggtctgcgccgaacgaaatgcccacacccgacatgtcgggcatgccgaagatgccggtcaggtcgtcatagcgtccgccgccgcagatcgagccgatggcgaagtcgagcgccttgacctcgaagatcgcccccgtatagtagttcaatccgcgtgccagcgagaggtcgagctccacgtcgagcccgatccccagacgctccacatagcccaacacggtttccatctcctcgatgcctttcagcccggtttcggaaacagccagcacctcacgcaatttcatgagtttttgcgcattgtcgccgctcagttcgagtatcggttgtagtttgtcgaccgcctcctgcctcagcccgcgctccagcagctcggccttcacgttgtccagcccgatcttttcgagcttgtcgatggcgatggtgatatccatcatcatgtcggcatggccgatcgcctcggcgatgccgaacaggattttgcggttgttcatcttcagcgccacgcggatgcccagcgcccggaacacgcgctcgacgatctcgaccagttcgacctcgcacagcagcgagcgggtgccgatcacgtcgacgtcgcactggtagaattcgcggtaacggcctttctgcggccggtcggcgcgccatacgggctggatctggtagcgcttgaagggaaacgtcagttcgccctggtgctgtacgacatagcgcgcgaacggcaccgtgaggtcgtaacggagccccttctcgcagattttcgacgcctgccgcacctcatcgccggacaggccggcggcgtagtcgcccgaattgagtatcttgaagaggagcttgtcgccctcgtcgccgtatttgcccagcagggtcgaaaggttctccatcgagggggtttcgagcggcgcgaagccgtaggtgcggaacacgccccggatcgtatcgaaaatatactggcggcgcatcatctccgccggggagaagtcgcgcgtacccttgggtatggacggtttttgttgagccatattacataaatttttgttttatttccaagtatttcttccaccccgcgttatcccgcgcatccatgtatttccgctgtttcccgagcagacggttcaatgcgccctcgtcccggcggaagaaaaggacaaccatctcacgaagcgcctccatttggtcgacctcatacatattcacatagcgcggggcgcgcactccctcctctccgggatagatatatccgatgaaatagcccaattcgtccttttcgtccacagcggacgaaataaaaaaagaacggtcggttttcaaatccgtcacggagagcgtcggagagtttttcttgtatctcaaagcttcacgcgcttgctcatgccaggggaaacggtctatctcggacaggaacccgtcaagatcgcacgtcccggccggttctactttgtccgggtcttcgtgcgcccggagttcgtcccaaataaatacatcgaccggacggttcgcctgcataccgcaggagaaaagccccagcaagagcgaaaaaaaggtcacaacacgcatctttgtcaagccatcagttttttgtacctcacgcgatggggctgggtgtcgccgccctgcgccttcttccactcctcgtattcgctgtacgaaccctcgtagaagaccaccttcgagtcaccctcgaacgagaggatgtgcgtggcgatgcggtcaaggaaccagcggtcgtgcgagatcaccacggcacagcccgcgaagttctcgaggccctcctccaacgcacgcagcgtattgacgtcgatgtcgttggtcggctcgtccagcagcagcacgttgccctcctccttgagcgccagcgccaggtgcaggcggttgcgttcaccgcccgagagcatgccgcacttcttctcctgatcggcgcccgagaagttgaagcgcgccacgtaggcccgggcgttcacctgccggttgccgagcatgatgaggtcggcgccgcccgagatcacctcgtagacggtcttttcggggtcgatcgacttgtgctgctgatccacataggccagcttgacggtcgggcccacgcggaacgacccgcccgtaggctcttccagccccatgatcatgcggaagagggtggtcttacccgtgccgttgggcccgatgacgcccacgatgccggccggcggcagcgagaattcgaggtgctcgtacagcacgcggtcaccataagccttcgacacgtcgtgcgcctcgatcaccacgtcgcccaggcgcgggccgttggggatgaatatttcgagcttctcctccttctgcttcgtgtcctcgttcatcatcttgtcgtaggccgacagacgcgccttggacttggcatgacggcccgagggggacatgcgcacccactccagctcgcgctcgagggtcttgcggcgcttcgactcctgtttctcctccatggccatgcgggtggtcttctggtcgagccagcccgagtagttgcccttccaggggatgccctcgccgcgatccagctccaggatccagcccgccacgttgtcgaggaaatagcggtcgtgggtgacggcgatcaccgtgcccttgtactgctgcagatgttgttcgagccagtcgatcgactcggcgtcgaggtggttcgtgggctcgtcgagcagcagcacgtcgggctgctgcaacagcaggcggcacagcgccacgcggcggcgctcaccgcccgagagcaccttcaccgactggtcggggtcggggcagcgcagggcgtccatggcgcgttccagcacgctgtccagctcccagccgttgacctggtcgatctgttcgtacaactcgccctggcgctcgattaaccgggccatctgctcgtcgtccatcggctcgcatagcttcatgttgatctcttcgtactccttgagcagcgccacggtcgcggcgcagccctcttcgaccacctcgcggacggtcttcgagtcgtcgagccggggttcctgttcgaggtaacccaccgtgtaaccgggcgagaaaaccacttcgccctggaaattcttgtccagcccggcgatgatcttcatgagcgtcgacttacccgagccgttcaggccgatgatgccgatcttggcaccgtagaagaatgagaggtagatgttgttgagaacctttttctggttggtaaacgtcttcgaaacgcccaccatcgaaaagatgattttttcgtctgccatatcgtattcgttattcggattttcctatccggcaaagatagtaaagattccgcaatctaccgccatacgcgaagatttttgggcaggcgcccgtaaataaaaaaacgcagggacacggcctgagccgcgtccctgcgccgtgtttgtcccggcagaaattaatagttctccttcttgggttcgaagtaagcctgcggatgcttgcaggcggggcagagcttgggagcctcctcggcctcgatgacgaaaccgcagttgcggcactgccaccagatcttgccgtcgcgcttgaagaaattaccgtccgtgaggcggctcagcagcttcaggtaacggcgctcgtgctcggcctcgacggtggagatcatcttgaaggccgtggcgatctcgacgaagccctcctcctcggcgactttggcgaattcgcggtagaggacgtcccactcctccttctcgcccttggctgcggccagcaggttctcggccgtggtgccgatcgggccggtggggtagctcgccgtgatctccacgtcaccgccctcgaggaacttgaagaaacgctcggcgtgctccttctcctgctcggcagtctcggcgaagacacccgcgatctgctcgtaaccctccttcttcgccttgctcgagaagaagacgtaacggctgcgcgcctggctctcaccggcaaacgccttcagcagattctgttcagtccgtgttcctttaatgctcttttccataatcctgtatgtttaatgtgtgtgtttattttccgatagcaaagataataaaatcccggacataaagccaaaaatcggcattgtttgtttttatagggctattcggattacttataggccccgccgagcacctccgccacgtcttcccggaacagcgcataggcttccggaagcgccatcgtgtccccgacttcggacgggacgacgcggtagcccggcatcgccacccagacgggcaccgcctcaagcgaataggacatgcgcccgtcgggatgccgcacggcctcgatttcggccaccaacccgccgtcgcagtagcgccgccgctggttggacacgaagttccccagcgaatagagcaccacgtgcgacgaatcggcgtcgaagggctgcaccacgtgcgggtggctgcccacgacaaggtcggcgccgtgccggcgcaggaattgtgccaggtgccgctgcacggcattctccctccgctcgtattcgttgccccagtggatgcagaccgccacgcagtcgggcgccccgcgccgtgccgcagccaggtcggccgccatgcgcgccgtgtcgatcaggttgacctccactccggcgggaaccggaatgccgttggtgccgtaggtgtagttgagcagcgcgaaccgcacgccgtagcgctccacccacagcgggttgttggccgcgcggtcgaggctgtcggtaaagacgccggtatgcaggatgccgcagcgccccagttccgcgacggtcgtatgcaccccggcggcaccgccgtcgcagcagtggttgttggccagcacggccacgtcgacccccgcatcgcgcagggcgtcggccagcgccacgggcgagcggaaacaggggtatcccgtatagcgatccgtgcgggtgagcgtcgtttcgaggttcacgaccaccaggtcggcggcatgaaaccggcggcgcaggtaagcgaataccccgcggtaatcgaacccgtccccgcaccgcgccgccgtgacctgcggaaggtgctgcatgacatcgcccgcgaacagcagccggacacgcaccggggcgggttcggacacggggcgctccacgccggcgcgttgggccgggacgcagcacgccgccgccagcaccagccacgggaggatatgtctcaggcccggcttcatcgtgcgggttatttcccctgccgcttggggttggctgggaaccagcctttggccacgcgctgacgctgttcgaacagttcgccgatcgaccagagcgacgaggcgccccacacggccagcagggtggaccacaggatatggcgcacggcgaccgacgcggcgatcgccacgatccccatcacgaggaaaacccaccagcaacgtacgcccaggtagtattcgcccttgaccacgagcgggtggaacagtccgatgataaggaacgtcgcaatgccgatcaccagccccgtgaggttgtattccgtaagaaattccatagttcacgattttaacagtgaggcaaatatacgaaaaatgggcggttcccgacacgggccgcccataataaataccgataccgggatcatcagaaattatactgtaccatcacgttcacgcggttggcatggttcttcatgctgttcatgtccttgcgcgaaccgtaaaggtactcggcggccaccttgcagcgcggggtgagcgagtagaagatgttgccgaagatatactgcccctgtttgtactggtcggctgtatagtagccctcgctgcgctgcacgcgcaccgtcgagtagccgcccgacacgaacaggcgcggcgtgaagttgatctgcccggcggcctgcacgccccacatgggcatcatgcgcacgagcgtgggatccgcggggttgggcgtgaagtcgagtcccgaaccggtcagatcctggatatagggggtgatgcccttaccgtagacgccgttcatgaacatgcggaaccagtcgcagcacttgatcgtgccgctcaactgcacgccccacccgaagagcgacgtggtggcatccttcgatactttatacatgtaagggttgcggagcacggccgaagcgcggaggtggctgctgcggtcggcgccccaggcatattgcaggtacatcgggaagtcgggtacgcgctggtggatcggcttgaagttctcaccgtaggtggcgctcacgctcggcagctcggcggcgacgccgaaggtcatgtgcctacgggcgaacgacacctcgtagcggatcagtgtcgcgaagttgaaattataggcgttcggcccctggaagtcgatggtcgtgggggcggcggacaggtcgcagaaggtcgtcacgtcgcgtccgagggtcagccccttgaacgacacgtaggccgaacgcaggcggggcgtatagcttccctcggcaccgccgcggaagtcggcgtccatgtagatcaccacgcgccccagcgcccgggtgttggtaatggccttcaggaagaggcgcgaggtcgaggcgtccatcatcagcttctgcttcgaattgtaattgcccggaaccgggatgtcgtagggcacgaagtcgatgttgtcgacgatgccgtcgaaatcatagcccgcgcgcaggctcacgaagccgcctatcgagaacgagaaacggttgttcttcgaggcgaacacgaactggggcttctcggtctgctggaagccggggcggtgcgtgtcgatgtagtcctgcgtggcgttgccgacggccatgcggttgagtgccgcagcctgctgcgcggcacagccgccgcagttgtagatggtatccacctcgtgtacggagatgaggtagaccgtcggcgaatagtcgccgccacggcgttcgccccggtggtgctgggcggaagcggaagtcgcaaggagcagggagacaatcagaagtcgaaatgttttcataagccgaataaaatttggttttttggttaaacttgcttggttcggtatgttttgtttttgggacacaggcagttaatattcaccccgggaattagcaagatatatgccaaaaaaacctgcacggaatttgattccgcccgccagcacccgattcccgtgacctccgcggaggagaaggcgcatccctgaaaatcggggaagggcacggtttacgtacggatcccgctatctttccggcaaataggatgcccccgggaagttgaaaaataaattttagaatcccctcggctttcactatctttgcccgagccggataaacggcgcccggcaggacacggggacgtgcacaacctgcccgctccccatacattacataaaaaaagaagtatatgctgctctggataatctccctgctgacgcttgcggccgcggccgccgacgtcattcattaccgccgcatgcggcggcgtgccccgggcgtacgccaccgggtattcatcgtcgcggcggccgcaaccgatgccctgccggcggtgatcgccgtcgccggggttgttgcacgcgacaacaccacggcgttcatgacattcgccatgtgggcgttctgggcctggatggtgaccgtcctgccacgcatggcctgctattttttccgctggatcggcctgccgcgggtcggtatcgcagcaggggcaggtgtggcggcacttttcgtctggggcgctacggccgggcgtactacgatccgcgtaaaccgcacggaggtttgctccgaacgcctcccggccgggctggacgggttccgcatcgcccagatcaccgacacgcacctaggcactgtcgtgcgtcccgaagcggaactgcggcgcctggtggacagcgtcaacagccttcgccccgacctgatcgtcttctgcggcgacctggtgaatatccgcagctcggagctcgacgcccgcgcccggcaactgctgggaggactgcgtgccccgtacggcgtcgtttcggtcacgggcaaccacgatgccgggctctatatcaaggacaccgttgcgcaaagcccggcagcaagccttgcggaagtgatcgcccgccagcgtgcaatggggtggaacgtactggaggacactacggtttacctgcgccggggcggcgacagcatctcgctcacggggctttcgttcgaccccgcgctgcggcacaagcgccacgcccccgacctgccgcccgccgacctgagcggggcctaccgcggcgtccccgattcgctctacaacatcaccgcggtgcatatcccgcagctttgggggcagatcgccgacgcgggctacggcgacctgacgctcgccgggcacgtacacagcatgcagatgaaactgcgcctcttcggccgggccttttccccggcgcaactgctctacacgcgctggagcggacgctacgacgaaggcgggcgtacgctctatatcaacgacggcacgggatacgtggttttcccgatgcgcctgggagcctatcccgaaatcaccctgataaccctgcgaagatgcgagtaaccctctccgccgcggtcacggccgacggctacatggacgacgacagcccccggcggctgattatctcgaccccgggcgactgggaggaggtgtaccgcctgcgggcggcccacgatgcgatcctcgccggcgccgagaccctgcggcgcgacgacccgtcgctgctcgtccgcgaccaggcggcacgcgcacggcgcgtgcaggccgggctgaagcccgacatcgccaaggtcacgctcacccgctcgggcggcctttcgccccgcctgcggttcttcaccgctggcgatgccgaccgctacgtgttttcgcagggagaaataactgggctgcaaaatattgcgacagtcatctcaaccagcgaagcaattaccgccaaatacatcgtcaccgaactcgaaaagcgcggcatcgaacgcctgatggtcgagggcggggcgggggtgttacgcatgttcctcgacgaagggatggccgacacgctgcggctggccgtcaacccgcggctgcggctcggcagccggggcggggcaaggttcgacgcagcgccgccccagagcgtcccgcacacctgcgaggaggtcgacggcatggaggtgacgacctacacgctgcatcccgacacgacggaagaagacctgcaacacctgcggatggcggtcgacgaaggccgcaaatgcacccccagcccgacgtcctactgcgtcggtgcggtcgtagccgcagccgacggccggatatttgcaggttacacgcacgagacttcggcaacgcaccacgccgagcaggaggccatcgccaaggcgctggcggcaggtgccgagctccgcggcgccgcgatgtactcctcgatggagccgtgctcacggcgggcgagcgaacccgaaagctgcacacaactgattatcaggcatggtttcgcccgggcggccttcgcactctacgaacccgactgtttcgtctgctgccgcggggcgctgaccctgcgcgaagcgggcctcgacgtcagggcatacccggcgctggccaacggcgtatgggaagccaacgcgcacctgaagcgatgaatcgggcgcgatttgtgtccataagggcctaaaattggcctctttttccggaaaatcgcgcaacatatcgggataacttatatatttgccccataaacgcattgattaatatgaaaatagcagtcagaaccctccttgcggcggcggcacttgcgaccatcgtccggctgcctgcgcaggaggccaagcgtacgctctcgctcgacgaggcgatcgccgtggcgctcacggaaaaccccgcgatgaaagcagccgagttcgaggagaaggccgccacccaggaacgccgtgcggccatcggcctgcgtatgcccaagatcagcgtcatgggcgcctacgcctacatgtccaaagatataggattcgatttcaacgagatgaaaggcccggccaaagagctcgccgggcagatactcggtagcgggctcataccgcccgaaatgatcccctcgatcaacgggctgctcaatccgctgatgaacgccgactggttcctcaaggtgcaggatcagagcctggggttcgtgggcgggcaggtttcggtgcccatctggctgggcggcaagatcaacgccgccaaccgcgctgccaagatcaacgaacgcacggcggcggagcagggcaaccagacccgcaacgcgctgatttcggagctcgtggagcgctacttcgggctggcactcgccatgcaggtcgtcgaggtgcgccggcaggtggtcgacggcgtacgccgccacctcgaagatgccgtcgcgctcgaaaagaacggcatgatcgcccagagcgaacgcctctacgtcgaattcaagatggcggaggccgagcgcgagctggccaatgccgaattgcaggctcaaaccatcgccagcgctctgaacagcacgctggggcaggacaacgcgtggcaacccgtgacgtcgatgttcatcgtcgaccgggtcgaggacgtggcctattaccaggatctggcgcaagaccgcaacccgctgctcaaccaggtctcgctcaagcgccagctggccgaagagggcgtgcgcgcccagcgcgccgacttcctgccgcaggtggctgccatcggcggcggttcgttctacaactaccaggtcgcagggctcgtgccccgctgggcggtgggcgtgggggtcaacatcaagatcttcgacggcctgaaccgcgagtataaatattcggcggccaagcagaccgtacgccgggtcggcgccttgcagaacaaggccggcaaggacatctcggttctggtggagaaactctacaaccagatgatgaactaccgcaaccagatgacctcgatcgacgcctcgctcgccttcgccgaggagtacctccgcatgaagaacgccgccttcctcgaaggcatgagctcgtcgaccgacctgatcgacgccgagctgaacctcgcgggcgtacgcaccgaacgcctccaggcggcctacaacttcgacctgctgctggcgcaactgctcgaagccgcgggaatcagcgacgaattttcggcttacgcccgccgcgccgacgcccggccgatcctgttcgataaaaagtaaaaaaatatagaatcctatgaagcgaagcaacattatcggaatcatcgcggccgctgtggtcatcatcgtctcggtcgtcctgatcagttggtacctccggaaaacgaccccgatgctgatacagggcacggtggagtgcacgacctacaaagcctcgtcgaaagtcccggggcgcatcgacgacatgaaggtcagtcagggcgaccgcgtggagaaggggcagctgctctacacgctctcgacccccgagctggaggccaaactccagcaggccgaggccgtgaagagcgccgcctcggcactcgaccaggcagccttggcaggcgcccgcatccagcagatcgaagccgccctgaacatgtgggagaaggcgcaggccgggctggaactggcgcgcaagacctacgaccgcgtgaagaacctctacgaccagggggtagtccccgaacagaagctggacgaggcgtcggccaactacaaggcgatggaagccacggcgctggccgccaaggcgcagtacgacctggcatcggacggagcccgcaaggaggacaaggaggccgctgcggcacgtgtccgccaggccgagggagctgtgagcgaggtcgaatcctacatcggcgacgcgatggtctatgcgcccgtgacgggcgaggtttcgaccatcatcgccgaacagggcgaactggtgggcagcggctatcccgtggtggccatcctcgacctgaccgacctgtgggtgaccttcaacatcaaggagaccctgcttccggggatcggcgtcggcacccgcatgagcggctatgtcccggcactggactacgacgtcgagttcgaggtgacctacatctccgcacaggccgacttcgcgacatgggcggcgacgcgcacgcagggagggttcgacatccgcaccttcgccatcaaggcccggccggtgtcgcatgtcgagaacatgcgcccaggcatgagcgtaatcgtggactgggacgaaatccggaaataggaggggacgatgccgggattcctgcataatacctacgccgtcctgcggcgcgagcttgtgcggctgacgcaccagccgatgtatttcgtgctgatgctcgtgctgcccgtggtgtcgttcgcattcttcgcgctgctgttcaacaagggcgtggcccgcgacatcccgatcgccgtgctggacgatgaccacacgtcgctctcgcgcaaggtcacgcagatgatcgacgcgaccccgacggccctggtcgcctacgaaatccaggacatggacgaaggcgagcggctgatgcgcgaagggaaggtcatggccatcgtgcagatcccgtcgttcttcgagaagaatatcctgagcaacagccagacgcacatcgagaattacgtttcggggacgaacatcacggtcaacggactgctgtcgaaagacatccagaccgccgtgacgaccttcacggccggcatccagctacaactgctcaccaaacaggggctcagcgagaaacaggccatggcgcaactgatgcccgtgcggttcagccggcacgtattgttcaatccctatatcaattacggctattacctctcgccgagcttcatgcccatgatgctgctcatcttcgtggtcatggtgaccgtcttcgccatcggcaccgaactcaagcacgccaccgcgcgcgagtggctcggcacggccaacggctcggtcggcgcggcgctcaccggcaagatactgcccgtgacggtcatcatgttcctcatgtcgctggtgatgttcctgattatcttcaaggtcgtgggcgtgccgctcaacggcagcctgacggtcatcctcgtgagtacgctgctctttattttgagctaccaggccatcgcggtattcatcgtatcgctgctctcgaacctgcgcctgtcgctctcgatcggcggcgggtactcggtgttggccttcaccttctcgggcctcacgttcccgatcatggccatgtggcccgccatgcggtacctgagcaggttgttcccgttcacttactacaccgacatattcgtcgaccagatgctgcggggcgccccggtagcctgttcgctgcccgacatgggctacatgtcgttattcatcgtcttaccgctcctgtgcctgccgcgcctgcggacgatctgcacggaggaaaaatactgggggaggttataacatgggtaggttcacacatcagatggcatcctaccggcagcaaatgctgtcggtcatgcgcaacgaattccgctcgatattcaccgacgcaggcgtcgtcctcatcctggttctcgcgctgatcatctacgccacggtctactcgatggcctacggcgcacaggtgctgcgcaacgtgccgatcggcgtggtggacgagtgccgcacaccgaccagccgcagcctcgcagcgacgttcaacgccgggccaaatacgtacgtggcctacaacccaacgaacatggaggaggccaaggagctcttcttcaaccgcaaaatatacggcgtggtctatataccgtcggactacgaggaaaaactgctcgggggctcgcaggccaacgtggcgatctacgtcgacgccagctacttcctgatgtaccgccaggctttccaggaactggtgacctcgatcggcagcacgggcgcaatggtggaattccagcgcctgatcgccaagggggcggacatcccgcaggcaaaggccacgacgcaacccgtaatctaccagtcgcacaacctgttcaacccctacctgggatacggcaccttcgtcatgccggcgatcatcatggtcatcatccagcagacgctactcatcggcatcggcatgatcggaggcacgtggcgcgaattcgggctctaccgcaaactctgcccgcccgaccgcaaacgcatgtccacgctgcccatcgttctgggcaaggcggcggtctacgggctgatctacggcgtgacgaccttctatatcctgggcttgcactaccggctgttccattacccgatgaacggcgccacgggcaccgtcgtggtcttcatgctggcatacctggccgcctgcatcttcctcggcatcgccatctcgacgctgttccgctaccgcgaaaattcgctactgctgttgttgtggacgtcgataccgctgctgatgctcagcggcgtgtcgtacccccgcgagggcattcccgactggctgttcaacttcgggcagctgttccccagcagccacggtgtcgacggcttcatccgcatccagagcatgggcgcatcgctcggcgaggtactgcccgaaatccggatgctctgcatccttacactcatctacggcgggctggcctgcatcggcattcaccaggtgatcgcccgcgcagccaaggatacgcccgtcaaaaaccagaacagataatgtatgtcaaatatcagatgccgctgatcgccgtcagcgatgtcggccgctcgaaacggttctactgcgggctgttcgaccagcgggtcgtattggatttcggggagaacgtcacgttcagcggcggcttcgccatacaggagaaattcgcgtggcttacgggcctcgcggaagattccgtgcgcagccgcccgaacaacatggagctctatttcgaaacggacgacctcgacgcattcatgcagcggctcggggagtggcccgaccccgtcgaactgctccacccgccccacaaatacggctggcagcagtgcaccgtacgtttctacgatcccgacggccatatcgtcgaagtaggcgaggcgatggaggtcgtcataaggcgctgccttgccgagggacacacggcagaggagaccgccgcgctcacccagcatcccctcgaattcgtgctccgcgtccgggacgaagcggggaaatagccccgcacaccccggcaaacagccccgcactttccggccggcgccggcagcaacggcggtatgctggcgcagcacagaaacggcactccggccgacgctccggactgtcacaaaaaagacaccgggcaaatgcctggtgtcttattcatgtccggagccgaacccggccgccgcgctacctcggcccgtggaacattcccggaggagggccgcccgggccgccgggccccatgcggcgcgatcccgaaggttgtgccatgccgtcgtaatccttgatgtttttcgaccccttcttgccgaaccggcgcaggttataggtgaactgcaccatatagtagcggccgatcacactgttggtcgaattctgcgtccaccccgagcccgtcgaacgggcgaaggccttgttctggttgaagatgtcgttcacgccgaccatgatctcgccgcgcttgttcttgaagacctttttgccgatccaggcgttgcacagcaggtaggaatcgtcgtaatcgttcgtaaaaccgatgtactgcgtataggctacgctgcccgtgaaggtaaagcccagcgggaagacgaacttcatgttgccctgcgccgtatggttgaaataacggttcttggagcccgattcgcccagcgagttggtcgcctcgttataggtgccggcccacgaaagggtaaagtccacgttctccgaaatgttgctgcccagtaccgtgcggaagtcgtagccgatattcttggtgtcgttgcgctcgccgcccgtgatgaacccgtcgctgtcgactgtgccgcccagcatgctcggggtcttggtgaaattgacgcccgccatcacgttgaagttgctcttcaggaacccgatggggaacccgtagctcaggtgcgtgcgcaggttccagtaaccgtcgaggttgacgggagtggagtagtagttgggggtgtactgctcgccgccgagggtgatcgtaccggggttcgacaccaggtggttggcgttgtaatccgacgtattctgcatcgagaacatccacatgaacgtccgtcccttctccacgttggagttcgtatagtggaaattgacccggtggctgtacgacgggttcaggttggggttacccttggtgatgttctgcgcgtccgacacgtcggccacgttctggaggtcggtgatcgaggggttgtcggtataggacgagacgaacaggcgcagcgaattctcgcggttgatgttcagctgccccatcatgaaataggtcacgtcgttatacgaatgcttgatcttgtcggcggcatcgcgtacgatctgcccgtcgagcgtggcatgctggtaatagacgttcgccacgaacgtgttgcgctccttcgaataacggaagccggggccggcgctctgcgtcaggtaaccgctcttgtaagagttggaaagcgccccgtcggggagaagccctgcgaccgaatagtccggcccggttatgaacgacctcttgtcgcgctcctgataatcgtagcggatgcggtactgcacgctcacctgggcatatttggccacgggctccgtataggtgaactgcccgcgcaggccgtagctgttcgagggggcgaggttgcgcaggtagcgcagccgggtatagcccgtcgtgtcccagccccacgggccgtcggcaccgtcgggacgtacggacgaaatcggcagcacgttcgaataggaattcgagttgttggtgttgtccgaataacttacattgccgtcgagggtgatcgtacggccgtccttgccgagtttggcacggtagacggcgctcgtgcgcaggttgtaaccgtggcgcaggccgtcgttgaaattctcggtacggctgtaaccgctctgaccgaactgccagccctgcgtcgtgctcaggggatcgttggactggtagctgaaactggggcgcaccatcaggttctggttgtcggagatcttccactccaggcgggcgttgaaacggtggttgtaggcctccgtattcgaatagccgcgcgtcgcgagggtgtccaccggcatgggggattcataccacttgtccaccgtggactggttcttcgtatcggtattgttgaagaaatagctgccctggaacgacacctggtcgcgtttgccccatgtgtcggagtagttgacgccgatggcgttcaccgacgccacgccgctctgcggacgcaccatgtactgtccgacaccgccgcggcggccgccgccggaacccgatacgccgaggatgtcctcgaacgagaaattctgctggttgatattattgaacaggccgatgaccgacacgcggctgtcgccgctgaagatattggcattaccgcctatgacatatttgtttttggcctcggtcttggtatcggcatcgtaaccgtaaccggcatacagtttaccgaactgtccctgccgcatgttggcatgggtgacgatgttgagtgccttgtaaccctcgccgtcgtccatgcccgagaattcggcggcatcgctcagtttgttgtagacctcgatgcggtcgacggcctgtgccggcagcgacttgatggccgtcgtcacgtcctcgccgaagaattccttgccgtcgacgaagatctttttgaccgactcgccctgtgcctcgaccgtaccgtcgctcacggtgatgcccggcatcttcttgagcaggccttcgacgtcggcatcgtcggtgaccttgaacgccccggcgttatagcttaccgtatcgcccttctgggaggtgcggagcgccttggcctccttgacgacggtttcgatctgcacgcccggacggagttcgatcttgccgatgtcctgtttggcggccgagaccttaaaggtcgtttccgcgttgttgtagcccaggaaagagactacgagtttatattcgccgtatgcgagcgaaggaatcgacacggcgcccttgaagcccgaagtggagtactgtttcttgtcgggggcagcggccggggcgaattccagcacggcacccgcgaccgtttcgccggtctcggcgtcgaccaccgtacccgtgaccgtccccttctgggcaaaggcggcgacggcgaaaagcgtaaataaggttgagagtagcagtcgtttcatcttcagattatatagatacgtttattttttgcgcttgcgaagataacttttttatggcagacttcccctctgccgcgggtgaatcgacaaaaaaggggtgccagtcgaccaaccgacaccccggctgtgacaagccgttcgatgacctaacctcacttcctgccctttgcgggacggggcttgtcacatttcctgccttccttgcaggcgcatccctttccatccttcatctgcgggccgggcctcataccgggcttcgggccctgcatctgcttccactgctcaaactgctcgggcgtaaggatcttttgcatcttctcggcctgggccttgcgggcggcgcgcatccgttcgtgctgcgcctgcatatcctttacttcctgcaggttgagttcgtagagctgcttagactgatcctcgttgaggttcagcttttcgaccatgcggtcggtcttgcgctgggccatctgctcggccgtggggcgttcctttgtcctcggagcacgccgatcctgcgcaaaagcgctcgttcctgccagcaggcaaagggtcattgcaaccgcaaaaattctctttttcatagcattaagatttttgttatccgttcgccgaaacgtcttcggctccaggtgctgatgcaaaggtaaagccaaatcggcacgacgatgccgacccgggggccaaacgactgaaaggcagggtgaaccgactattcggcgggttgaacggaggtgagccaggccttgaattcggggacgcgggccttggaaatgacgatgcgttcgggggttccgaccgtcaggtggagcgccaggcggctgccgaaccacacggcgatctccttcacggcgcggcgcgccacgatgaactggcggttggcgcggaagaaatccgcttcgggcaggatggcctgcagggtttcgagcgtcttgtcgagggggtaggaaacgccctcgtaggtacaggcggtgactttctcgttgctggtatagcaataggcgatctgctcgcgccggagcgggatgatccggtcgcggacatgcaccaggaaagcctgctcgtgccgtgccgcggccatcgtccgcacccggaagccgtaatcgcggcgttcgcccttggacaggcgttccagcttgcccagcgcacgctgcacgtcggcgttgttgattggtttgagcaggtagtcgatgctgttgaccctgaaggcttcgagcgcatactggtcataggccgtcgtgaagacgacgggtgcggtaacctccacggcgtcgaagatgcggaacgaatcgccgtcggccaggtggatgtccatgaacaacaggtcgggctggggattcgcacgcagccattcgacgctctcctcgacgctttcgagcgtcccgatgatctccacgccgggagccacctgtttcaggatggcctccaggttcagcgcggcggcggtttcgtcctcgataatcagggccttcatccgatggcgggtttttgcagcggcatgcgcacgacgaactccttgtcggtgtcgatgatctcgatgtcgcggcccgtaatcaggtgccagcggttgcgcaggttttccaggccgatgcccgtcgacggttcgggttcgatcttcggcaccttgggattggcgaccaccagccacccctgctcggtgcggatcgagatatggaacggcttgctgcgggttatggtattgtgtttgacggcgttgccgatcagcggctgcaacgacagcgccgggagtgtccaggagcggtacttgtcgtcgacgtcgatgtcgaagaacagtttgtcggcatagcgtatttcgaagaggtagctgtatgcttcgatgaatttcagttcctcgtcgagcgtcatcagcgtgctttggccgttctggatgatgtagcggaacgtatacgacagctggtcgatgtaggtcagcgccttgtcgtcgtgcttctcgcgcacgagcatcgccagcgaattgagcgaattgaagaagaaatgggggttgatctgcccgacgagcatgttgtagcgggtcgtgaggttctcgttcttgagccgttcgttctccatgacgaccgcctgctgcttcgagttgagcacgtagacccagccgtagagcatcgacacggccacggcgaacgaacacttgagcagcagcatgtagtcgaagatatgcccgctcatgaaattcaggacgatctgccccgaatgccattcgcggacaggggcgaagatataaagcgccgcggccgccacgaggcaccccatgcagtggagggcgaaacgccccgccttgtaattgcggcgtgcggaggtcaggatcgagagcatgatgaacgatacgaccaggtagtagatcaactgcaacgtcagctccgaagtcctcgacggccggttgtagagcgtgctgtaatcgaactcctcgccgttgcgcatacgcagttcgttcatcaccggatgggcgccgtaacggcgcggggcgaccacgtcgaccaccagccggtcgccgtccgaaagatccatccggcggatgcgctgcatcggcacgtagacgctgtcgcggttcccgtagacgatgtacccgtggccgtcggggctgacgtgcagcaccccttcctcgctgcgtgtgacgacgctcgcccgcgccggccgcggctgtccttcgcccttttgctcgacgatcagcaacagcacataggaaaagttgaccaccaggctgatggccagcgcaaccagcaggttgagcatcaggtcggaatatttcgattgcaggttcatcgcatctccttacgccccggcagggtcattcatcctccttgaaccacgaggcatagagcatgtaatcgtgcgccgtgcggcggatgatctcctcgcgctgctcgggcgtcacctccttgaccttcttggccgggacacccgcatagaccgaattgggttccagcttggcgttcgacagcaccagcgcattggccgcgatgatgcagcccgaggggacgacggcattgtccagcagggtagcgcccataccgatcaggcagttgtcgccgatgacagcgccgtggacgatggcgttgtggcccaccgacacgtcgttgccgatgatggtctgcgacgggtgtttggccttgtcgtaaatcgtatgcagcacgacgccgtcctggatgttcgtacggtcgccgatgacgattttgttcacgtcgccgcgcagcacagcattgtaccagaccgagcagtcgcggccgatggtcacgtcgcccaggatgacggccgtctcggccaggaacgtattttctccgatcacgggggtgtgtccccgcacttctttaatcaaagccataattccgtaataaaatttctttgtttcacatgtatatttccctgcatgacccgccaccgtacggtggtgccccggacatggaaagcgctgccggaaggcaatcttttattcgccttttttggcttcctgccacagggcctccatctggccgagcgaaaggtcgtgcagcgaattcccttgtgcggcagcctgttcctccatgtaattgaagcggcggatgaacttcttgttcgtacgctccaacgcagattcgggatcgacgccgtagagccgcgcagcgttgaccagcgcaaagaacaggtcgccgaactcggcttcgaggttcgctttgtcgcccgagcgcatctcggcctcgacctcggcggtctcctccttcaccttgtcccacacatcctcgcgcttctgccagtcgaagcccgtcgccgcggccttctcgcctacgcggaatgccttgaccagcgccggcagcgagcggggaacgccgcccagcgtaccgctcttgcgattctttttgcggagcttgagcgcttcccaattctccttcacctggtcgggcgtattggcatggatgtcgccgtaaacgtgcggatggcggtataccagtttgtcgcacaaggcgttggccacatccgcatagtcgaacgccccggcttcctcacccagcttggagtagaacaccacatgcagcagcaggtcgcccagctcctccttgatgccctccatattgtggtcggtgatggcatcggccagttcatacgtctcctcgatcgtattgctccgcaacgagtcgaacgtctgctcgcgatcccacgggcactcgcggcgcagcgtggtcatcacgtcgagcaggcgggccgtagcctccaatcgtttatcttccattatccggtttgttttttccgccgtcatgcagggcgcaaactgcccgaggcgccgggtcgcccggccgcagcagcatgcagcctgcacggccgcaatttatcccctgcaaagttagcacattcggcggaaaatagtaactttgcatcgaacaaaattccgcaacctcatgaaactacgctacctcgcgtccatcctgggcgccctttgtagtctcctccacgcccatgcgcagccgcttccggcgcgccagacgacccttcccggcacataccgcatctcggccggcacgcagctcagctacgagacgccgctcgcgccgttggccggctacctgcgcgaatatatcaacgtcggaaaggccagcgacagtatgtcggccgacgacgcgatcgtgctcacgacagacccgacgctcggccgcgaggcctacacgctggccgtgaagccgcagcggatcgagatcacgggaggcgactacggcggcgtcttcaacggcatccaggcgctgctgcggctgttgccgcccgaggtctacgccaaggcgtgcccgctgcccgtcgaagtcgcctgcacgcggatcgacgacgccccgcgcttcgcgtaccggggcatgatgctggacgtggcccgcacttggatcggagtggatggagtaaagcgttacatagacctactttcctaccacgggatcaacaaattacacctccacctgtcggacgacgaagggtggcggatcgagatcaggtcgcaccccgagctgaccgaaatcggcggcttccgcggcggcgactcgcccgtacgccccgtctacgggaaatgggacgagaaatacggcggcttctacacacaggacgaaatgcgcgggctgatccgctatgccgccgtacgcaacatcgagatcatccccgagatcgacctgcccgggcacagccgcaacatcgcctcggtacaccccgaaatccgctgcaattacccgcccgacacgctgtcgaccaacggctacgactaccgttcggcatggtgcgtggcacgcgaggagaactacgcgctgctcgcggacatcctgggcgaactctgcacgctgttcccctcggaatacatccacgtgggcggcgacgaggtcgacatgacccaatggaagcgctgccccgactgccaggcgctgatgcggcagcggggcatggcagacccgcaccaactggaagacctcttcatgcaacgcatggcggcgatccttagcgccaacggcaaacgccccgccgtgtggaacgaagcggtggcgacgggcgacctggcgcacgacagccgcgtctacggctggcagagcgtcaaggcatgcctcgacgccacggccaagggatacgagaccgtagtgatgccgggcgaatatttctatttcgacatgcgccagaccccgcacgaggacgggcacgactgggcggcgatcttcgacgcgaaaaaggtcttcgggttcgacttcacggacaaggggttcggcccggagcagatgcgcaacgtcgtcgggttgcaggcggcgttcttcagcgaagcctacgtctcgcacgagcccgagaagcccgactacctcgactacatgtgtttcccgcgtatctgcgcactcgcccgcatcgcttggcgcggcaacggcgaaggctgggacgcctattacaaagggctcgtggagaagcattacgaccgcatggcagccatgggcatccgtttccggctcttcccgccgaaggtgagctataaggagggcgcattcaccgtgacggccgacgacgggtcggagatatactacacggaaggcgacgcgcccgaagaacaccgttattcccgccccctaaagaccggaaaaccgcacctgtaccgcttcttcacccgctacaaaacggggcgcagcccctatgtcgccgacaaatcctactaccgcacgctcgcacccgccgtggccatcaccacctcgatgggcgagagcaggcagttcccccttgccaatgccgcgggttacaagggactttcgcggacagcgcgcgcctgccggcagcaggactgggtgctctacaccttcgagcagccggtgaaatgccgcgaaatgtacctccagaccgggaaccgccagctgccgaagaccatcataaccacaggttatgccgaggtgtcgtacgacggcgcgacgtatgagcgggcgggcgacctcgaaaagggaagcatcaccctgaagccggggcgcgcggtgaaagccgtgcggatcgtctcgacctgcgacgacaacggcacgccctatgtgacgatccagccgccgcagatcaagccggtgctgtgacggtggtctgtttcggccagcagcggcagggcgcgccgcgcggcaaggcggcagggcggcggcacatggatgaaaaggttgcgagcaggatgccttcgggccatcggcggacggacggcacgggcggaagcaatcttcacacggatcggccctcagacgggagggcgggaagcgattttacggcaaagcagaagaacaggcactgcgccaggtagtagggaaccatcacgacgtaggtgcgcccgggaacggccccgatgaaacggctccaggctatcacgccgtcggaaaaaacgaacagcagggccgcgaagcggaaccatgcggcatacgccccgcgataccggagcacgctgtaaagcatcccggcgatgaccgcaccgtaaacggcgaccccgatccgttcggccggatccaagacccggggcacgacaccggcgaagagcaacgcgagcaacgccgcgggaagcagccatgcggcaggacgggcaggaagtcccccggcgcagaggaaatagcggatataggcaccgtgggccagcgcgaaaaacagcatctgcggaatgaacagtcccttcgcacccgccgcatcgcccagggcagacaagaggagtgcagccccgaccggcaacaacgctttccgccggaggcagaaaaccgccacagccagcaaaagcaccggataggccaccttgtacggaagagccgccgccttggtgaagaacagggcggcgcctgcggcaaaaagcagggtagtcagggccaatatgcgggaagtccgatgcatcgtttcaggaaaaatcatttcaggaaaaaagccgcccgtcagaaaactggcaggcggcttcggttcttatccgtcacgacgggtcatgcacggacatgggcgccgcactggcgctcgaactgcgccgtgaggttctgcatggcccgttcgatggccttttcgtccagcgtgcaggtcttgtcctcgaggataaagctcagggcataggatttcttgccttcgggcagcttgtcgccctcgtagacgtcgaacagcgaaacgctcttgagcaacctgcgctccgtagcgaacgccacgtcgcgcagcgccgagaaggtcacctgcttgtccacgagcagcgccaggtcgcgcttcacctcggggaacttcgacagctcctcggccacgatccggtgctttttggtcgatttgacaagcgcctcgaagttcatctccaggtagaagacatcctgtttgacgtcgagtttgcggcggatattccggctgaccgtaccgatctgcaacagctccttgccgttgagcgccatcgtgagcgcctcgccgaagaggtcgctttgcagcgtttcggtcttgagcgcatagatgtcgatgccgaagcggcgcagcagtttttcggccacggcgcgcagcatgaagaacgatgcggcctgcggctgcacgttccacgaagcgggcacggcgatgcccgtcacggcgatggccaggcggtactcttcggagtaggccgccagggggttttcgtccgaacgtttggcctcgtcgtagaaatagcagttgccgaactcgtagagtttcaggtcgccgttgcggcggttggcgttgagctgcacggcctccagcatgttgaacagcagcgtctggcgcatgacgctgaggtcggcgctcagcgggttgaggatgcgcacgcagtgctcgggcttatagctctccagcccttcgtaataggccgccctggtcagcgagttggacatgatctccgtaaagccgttggccgataggtagtcggcggcgaggttcatcaggcggttgcggtcgggtttgggcgcataggaaagcgtcgaacggacgcgcgaggggatctcgacgttgttgtagccgtagatgcgcagaatgtcctcgatcaggtcggcctcgcgctgcacgtcgacccggtagggcggcacggccacgctcagcacgccgtccttctcgtccagcaccttcacttcgagcgccgcgaggatcgcacggacggtttcttcggggatatgcttgccgatcagcgcgtcgatgcgggcgaacgagacgtcgaagcggaaatcttcgatcggcgcggggtagatgtcggtgatgtcgctcgaaatctcgcccccggccagctccttcatcagcaaggcggcacgcttggcggcatagacctgcaggttgggatcgacaccgcgctcgaaacggaacgacgaatcggtgttcaggccgaagcgcttggcggttttgcgcacccacacggggttgaaataggcgctctcgatgaacacgtcggtcgtggtgtcgctgatgcccgaatccaggccgccgaagacgccggcgatgcacatcggacgctcggccgagcagatcatcaggtcgtccgccgtgagcttgcgctccacgccgtccaaagtcacgaagggcgtaccttcggcgcaggtgcgtacgacgacctcgcggccctcgatcttcgccgcgtcgaacgcgtgcaggggttgtcccagttcgaaaagcacgaaattggtgatgtccaccaggttgttcttggggttgatgcccgcggcacgcaggcagttctgcatccactcgggcgagggggctatcttgcagtttttcacggtcacgcccgcatagcggggcgccgcctcgtggttctcgacgcggattttcacgccgaggtcgtggttgtccggggcgaaagccgacacatcgggcatcttcaccgaaacatcttccccccggctgcgcagataggccgctaggtcgcgcgccacgccgatgtgcgacgcggcatccacacggttgggcgtgagccccacctcgatcaggtagtcgtcctcgatgcggaggtagtccctgaccgtcgtacctgccacggcatcggcgggaagctccatgatcccgtcgtgcgaggctccgatgcccagttcgtcctcggcacagagcatgccgagcgactccacgccacggatcttgctgcgtttgatcttgaattcctcgtcgccgccgccggggtagagcaccgtgcccaccgtggcgcagagcactttcagccccgcgcggcagttgggggcgccgcagacgatctgcagcggctcgcccgtgccgacgtcgaccgtggtgacatgcaggtggtcggaatcgggatgatcctcacaggtgagcacctcgcccaccaccacgcccgcaaggccgcccttgatggtctcgatcttctcgaagccctcgacctcgagtccgatatcggtcagtatccgggcgacctcttcggccccgagatcggtgtcgatgtagcgtttgagccagttatacgaaatattcatatcgttgaatttgagaattagctaaaatcgaacaaagatagtgaaaaattgttaattccgaccggataaacgcatgaaacccacagccggtaaaaaattatccgccgccgaggccggcaccatgcacttcgcggcatacggcccggaggactgcatccggcgctcggccgcggggcttccctgagcgtcgccgggcaagggcacggaagccgcagcagcggggcagggcaggggactgcagggaggactgccccgccccggtttcccgcaggacacgcccggatgcggaataactcatatatttaggtgtcgaaaatttatggcgaaaaatttggttttacggttgcgacccgttatatttgccaaaatgaaacaggaatttatgatccggaactttaacatacaggcatggtggtggcgctcgttgactctcgtggacaatgagtgcggctcagtgcgtgtatagttgaaagcataacgaacacacaagcccgttgtttacgagagagtaaacaacgggctttttcttttgcatcacattttaccgaacacagaaatagacaaaaaaaccatggaaacaaagaaattctgcctgaccgagcgtcagatgcccacacaatggtacaacatcgtggccgacatgcccaacaaaccgctgccgccgctgcatcccgcgaccaagcagcccgtgacgaaggagcagatgagcgccatcttcgccgaagaactgatcgaccaggagatgtcgacggagcgtttcatcgacatccccgaagaggtgcaggagatctacaagatatggcggcctacgccgctggtgcgcgccacgggactggaaaaagccctcggcaccccggcgaagatctatttcaagaacgaaagcgtatcgcccgccggatcgcacaagcccaacaccgccgtgccgcaggcctactacaactacaagcagggcatacgccacctgacgaccgaaacgggcgccgggcagtggggcgcggccatcgccttcgcagccaagcacttcgggctcgacgtgcaggttttcatggtgaaggtcagctacgaacagaaaccctaccggcggctgatgatgaacacgtggggcgccgagtgcatcgcgtcgcccagcacaatcaccgcctcgggccgcgcggcgctcgaacgtgaccccgactgctcgggaagcctcgggctggcgatctcggaggccgtggagatggctctgcaacacccggaggacacccgctactgcctgggcagcgtgctgaaccacgtgatcctgcaccagaccgtcatcgggcaggaggcggtcgcacagatggagatggccggcgccgagccggacgtggtgatcggctgcttcggcggcggcagcaatttcgcaggcatcggattcccgttcctgcgcaggaacctcgtcgaaggcaggaatatccgcatcgtggccgtcgagccgtcgagctgcccgaaactcacgcgcggcacgttccagtacgatttcggggatgtggccgggttcacgccgctgctgccgatgtatacgctcgggcatgatttccaaccgtcggacatccatgcgggcgggctgcgctaccacggggcgggatcgatcgtgagccagctgttgaaggacgggctggtcgaggcccggtcgctgccgcagaccgagaccctcgcggccggcatcctcttcgccaagaccgaggggatcatcccggcgcccgagtcgacccacgccatcgcggcggcaatccgcgaggcattgcaggccaaggaggagggaacaccgcggacgatcctgttcaacctctcgggcaacggcgtgatcgacctctacgcctacgagcagtacctggccggggcgctgcgggactacgtgccgggcgacgacgagatcgcaaagacggtcaaccagttaagcaagatcatctgacgggcggaaccatccgcgaccgaaaaggatgccggccttcgggcgggcatccttttccatttcccgagccgtccgtgccggaatgtattgcggacgggagaggcggaaaacgacgcaacgcacatcgtcagcagcactcgggatgcgggctaccgtgacccgagccacaagaagaccatgccgaccaggatgaggatgaggtcgacggccttggcacgcaggttccgttcgcggaagagcagggcaccgcaggcgaacgaaaccacgaccgagccgcggcgcaccatcgacacgacggagatcatggcgtcgggatcgcgcagggccatgaggtaggcgaagtcggccagcgacagaaataccgagatcagcgggatggcccagctccagtggaaaggcgcggaggcgtgccgcttcggccaccataccacggcggtcaggacggccatcatgaagaactggtaaaggttgtaccagctttgcacgaagaccgggtcgaggcgcgccatgatatatttgtcgtacagcccgctgacggcacccatgacggcggccagggcgatgcagagtatccagacgttgtgcgcgaaatcgaccccttcgcggcggctcgaacggctcagcatgaagagcgacacgagtgccagtaagacgccggcccactggcaggcattcagccgctcgccgaagacgagcatggccccgacgagcaccatgacggggcgcgtggcattgatcggccccacgatggtgatgggaaggtgcttcatgccgaaatagccgaagatccaggacgtaaggacgatgacggatttgagcaccaccagcccatgggcatggagcgtaccgggcgacgcctccagcaccgtaccttcgaaccacccgagtccgcattcggccgagaggagcgccggaaggaagacgagtgacgaaaagagggtgttgagcaggagcacgggcagtacggcattgccggtgagcgactttttcttggccacgtcgtagaaacccagcagcgcggcggatgtgaatgcaagggtcagccacataatgtaagttcggcgggaatgagggtcatgggattaggggtcggcaaggtcggcaacccgcagggtttgcattacggcgtctgcgatgttgtccgaacggagaattcccctgaaccaccaccgttttcaaatggcgattcgggggaatgtctttccaacggttctggtatcgggaaaaaccgattattgaatctcgtcgctgtaaacggcgccgggcaggtcgtggaggttgtaacgcgaagccatcgacatgccgtaggcaccggccgacttgatcgtaagcaggtcgccgcggcgggtcttgcgcagggtgacgttctcgtcaaacacgtcggtcgattcgcaggccgtacccacgatggtatatttgtcgcgcgcctcgtcttcggaggtgatgttctcgatgttgtggtacgaaccgtagagcgccggacggatcagctcggtcatcgaggcatcgacgatcaccagcttgcggcccgtggcggtggtcttgttgaagagcaccttcgtaatcagctcgccgcattcggcgacgatcgagcggccgaattcgaaatgcacttctcggtcgccgaccgagaggtgattgtgcacgatcgagaacagcgaggcgaaattggggatcggttcgttctcgggcacgtcgtagttgacgcccaggccgccgcccacgtcgacgaaacggaacgaacagcccagcttttcgaggttctcgacgatgacgttgactttgttgcacatgttctcgaagacgtgcagctcgcggatctgcgacccgatatgcagatgcaggccgattatattgatatacttgagcgcgcggatctccttggcgtgctcgagtacctcttcatatgaaatgccgaacttactgtcagcctgccccgtatcgatgcagtggttggtcttggggtcaatgtcggggttgatgcgcagcgccacgtcggctacgcgcccggcctccccggccagggcatcgaccagctccagctcctcgatcgactcgcagttgatggccaggatatcctgctcgatggcgtagcgcagctccttgtcgcgcttgcccacacccgcatagacgatacccttggggtcgaagcccgcctcgatggccttgcggagctcgttgccgctggcacagtcgatacccagcccgtattcgcggatgatcgccaacaggtggtcgtcgtagttggccttgatggcgtagtgcaccttgtaaccgtattttttcgactcgtagacgacgctttcgagggtctggcgcagcaacgccgtatcataaagatagaagggggtttcgtagccccggagcttttgtgcaatttgtctgcttagcattttacctaacttttaacctgttgaagttgcaaatataagcgatttggtttatttgagcaaatccacgatcacgcccgcagcgagcgagaggctcgccaggccgttgagcgtcccgaaggcgatgccgatattgcgctgccgcgcgggcgtgacgagcaggtgttcgagcaccagcagccccgtgaaaacacccgccccgagccaaagccacaccgaaccggggcagtaggtcatgaaccagccgagggcggcaatgctcaccgcatgcaggccgcagctgacgcccagcgccgaacgcgccgaaaaacgcgcggggatggaatgcagaccgtgccgacggtcgaattcggcgtcctgcaacgcgtagatgatgtcgaagcccccgcaccaggtcgtcaccagcagggcgaggatgaacggttcgacgacgacgtgcccgtcgaagacgacgtgcccggccgcggcgataaaagccccgacgggggcgatgccgagcgaaagtcccagcacgaggtgcgccagcggcgtgaagcgcttgcaatagctgtaaacgaggatgacagacaacgccacgggcgacaggatggccgcgaggcggttgatcgtcgcggcggtgaggatgaagagcagggcattgacggtcacgaaccacagcgcatgccgcgccgggattttgcctgcgggtatttcgcgcccggccgtacgcgggttctcggcgtcgatgcggcggtctgcccagcggttgaaacccatggcggcattgcgggcgaagaccatgcacaggatcacctgcacgaggacgatgtacggccagcgggggttatacagcggggcgtaacggagcccgtagacgaagcccaccatggcaaagggcatggcgaagaccgtatgggcgaacttgacgagcgaagcgtatttcaaaacggcattcatgtgcggaaacggtatttgagaccgcaaagataggaaaaattccgctccggcgcatttgcggcccgggggcggccgcaccttccgtaaatccaaaatatttcgtatatttgcacacatttttatgcgatttatgaaaaacatccgcaacttctgcatcatagcccacatcgaccacggcaagagcacgctggcagaccgcctgctcgaaaaaaccaacaccctgaaccagcgcgaaatgcaggcgcaggtgctcgacgacatggatctcgaacgcgaaaagggcatcacgatcaaaagccacgcgatacagatggaatacaccgcccgcgacgggcagcaatatacgctcaacctgatcgacaccccgggacacgtcgacttctcgtacgaagtatcgcgcgccattgcctcgtgcgaaggcgcgttgctggtcgtcgacgccacgcagggcattcaggcacagaccatatcgaacctctacctggccgtggggcacgacctggagatcatccccgtgctgaacaagatcgacatggattcggccatgatcgacgaggtgaaagaccaggtgatcgacctgatcggctgcaaggacgaggatatcctgctggcctcgggcaagacggggctcggcgtggaagaggtactggaggccatcgtggggcggataccggcgccgcagggcgacgagaacgccccgttgcaggcgctgatcttcgactcggtgttcaaccccttccgcggcatcatcgcctattaccgcgtattcaacggcacgctccgcaagggcgaccacgtgaagttcttcaacacgggcagccagtacgacgccgacgaggtgggcgtgctgaaactcaagatgcagccccgcacggaaatcagggcgggcgacgtggggtatatctgctcgggcatcaagacctcgtcggacgtcaaggtgggcgacacgatcacctcggtgaccgccccggcgaaggaagccatcgcgggtttcgaggacgtgaagccgatggtcttcgcgggcgtctaccccgtggaggccgaccagtacgaagacctgcgcgcctcgctcgaaaaactgcagcttaacgatgcctcgctgacgttcgagcccgaaagctcgttggcgctcggcttcgggttccgctgcgggttcctcgggctgctgcacatggagatcatccaggagcggctctaccgcgagttcgacatggacgtgatcaccaccgtgcccaacgtctcgtaccgcatcaccacgacgcagggcgacgtggtggaggtgcacaacccctcggggctgcccgaggtgacgaagatcgccaaaatcgaggagccctatatcctggcgcagatcatcaccaaggcggaattcctgggcaacgtcatcaagctatgcatcgacaagcgcggcgtgatgaagaaccagaccttcatcacgcaggatcgcgtagaggtgaatttcgacatgcccctttcggagattgttttcgacttctacgacaagctcaagagcatttcgaaaggctatgcctcgttcgactaccaccgcacgggctaccagccttcgaagcttgtcaagctggacatcctgctcaacggcgagccggtcgacgcgctctcgtcgctgacctataccgaccatgcctatgatttcggacgcaaaatgtgcgagaaactcaaggagctgatcccgcgccagcagttcgacatcgccatacaggccgcgatcggcgccaagatcatcgcccgcgaaacggtgaaggccgtgcgcaaggacgtgacggccaagtgttacggcggcgacatatcacgcaagcgcaagctgctcgaaaaacagaagaaaggcaagaaacgcatgcgccagataggcaacgtggaggtgccgcagtcggcattcctcgccgtattgaaaatggattaaccgggaacagaccatgaagaagaccatcatcgaccttttcgaggactccgtcgtaaagtacggggcaaagacattcctgctggagaaaaaacaccgggcattcgaacccacgacctacgccgagaccagggagcaggcgctcgagatcggcgcggggctggccgcggcgggcatacgtcccggggacaaagtggcgatactctcggaggggtgcaatgcatggatcacttcggaactgggcgtcttctatgccggggcggtcagcgtgccgctgtcggtgaaactcgaagagtcgaacgacctgctgttccgtatgcgccatgccgaagtcagggcgctgttcgtatcgaaataccagctctccaagatccggcgcatacgcgcggagctgccgcaggtggagcatatcatcgtcatcggccacatgccgctcgaagcgggcgagacggcgctcggaacgctccggcgcatgggacgcgactacctggcggcaaacagggaggagttcctcgcaatcggccgttcgatccgcaacgacgactacgcgacgatcacctacacgtcgggcaccacggccgacccgaaaggcgtcgtgctgacgcaccgcaactatacggccaacgtcgaacagtcgctctcgcgcatcgacatcccgccatactaccggacgctcatcatcctgccgctggaccactgcttcgcgcatgtcgtggggttttatatcatgatcgcatgcggggcgacggtcgcaaccgtgcaggtgggagccacgccgatggaaacgctgaagaacatcccgcagaacatccgcgaggtgcggccgcatttcctgctgtcggtgccggcgctggccaagaatttccgcaagaacatagagtcttcgatccgcgccaaggggcgtttcacggaacggctcttcaatttcgcgctccgcacggcctatgtctacaacagggacgggtacagcaagggacacggctggcgcatagtgctctggccgctggtaaaactcttcgacgcggcgctgttccgcaaggtgcgggaagcgttcggcgggagcctcaggttcttcgtgggcggcggcgcgctgctcgacgcggagctgcagcggttcttctacgccatcggcatcccgatgtttcagggttacggcctctcggaagcgacgcccgtcatatcgaccaactcgcccaagtaccactggcaccggttcgggtcgtcgggcaagatactgatcccgctcgacctgaagatcgtcgacgaaacgggacgggagcttccccgcggacagaaaggcgagatcgtgatccgcggcgagaacgtcatggccggatactggaaaaaccccgaggcgacggccgacaccctgcgcgacggatggctgcacacgggcgatatggggtatgtctcggaagacgatttcctctatgtgctggggcgtttcaagagcctgctgatcgccagcgacggcgaaaaatacagtcccgaaggcatggaagaggcgatcgtggacaagtcgccctatatcgaccagatcatcgtgcacaacaaccaaagcccgtttacgggcgccatcgtcgtaccgcaccgcgaggccttgcggtgcgaactggacagccgcggggtagcggccgaaaaacgggcggagaccgcggcggcgatcctcggcggcgaaatagaccgttaccgtgcgggcggcatcttcagcggggagttccccgaacggtggctgccggcggggctggcgatcgtagacgagcctttcaccgaacagaacggattggtaaacagtacgatgaaggtcgtacgcaacaaggtcgaagaacacttccgcgacaggctggaatacctctatacacccgaggggcgcgacctgaaaaatccgaaaaacctggcatcgctgaaaaaaattgtcgattgatgtgaatttgatacccggaaaacttgaaaaataaaaaaaagcggagtatatttgtactccgaaatgcgggagtagctcagtggtagagcatcagcttcccaagctgagggtcgcgggttcgacccccgtttcccgctcagaagaggcctttgaaaggcctctttttttgcgcacggcgccacggcacagcatgaggctgtcccgcgagtagcccaaaacaaaaatcacccccatccgcagcatgttcggacgggggtgaagctgtaaatcggggacttgttacgcagtcccggtcaatggcaaggcaatgtcggcctgtcagaaagtgcggccctggaaaatattaccctcggagagcggcaggagttcgccccgcagcgtgatgcgccgcgagttgaaattaggcgagatgtccacgctggcctggttgctcccgttgggaaggttgatatagacctgtgcggaaatccccgtaccgatcacattcatcgacacccggatgttccccttcttgtccacgctctgcctgtaatccgaggtgctgcccgagaccgttacgccgccaaggccgttggggccgctcacggggatgtcgaaagccacctgcacgacggccttgtcgccctgcacggcgacgaaattggtattggacgaaacctgcgccgtcgaacccgacttgaagctcacctggtcggcttcgagtacgaactccttggcctcgatagccttcctggcctcctcgaaagcgagccggtcgcgtgcgtcctgttcggccttcatctgcttgcgggccattttcctggaattcgcgtcctgcgactgggcatagcccgtaccggcaccggcaagcaggattgcaacggttaaaatcatcagccttttcatatccgttctgttttaatctattctatctcatatacaatagcgttgccggagtcggatttattatataaaaagtcgattttattgccgggacaacgggcgggagtgccgccgggagctgaaaccacatgccgcaaaacctcgctgccacccgtccgatggcggcggcaaggacaacagaggcggcagcaggggcggcaagggcgacaagggcggcaagggcggcaagggcggcgacagggacagcggattatgcccgaagcgattatttgattatctttgcccggtctgccgggagtttcggcaggcgcgaactactaaacacaaaccgatgtcaacgatttcggcggcggcctttgcagacacgaagccgcattacgacatactcgacggattgcgcggaattgcagcgatgaccgtcgtgtggttccatattttcgaagcctttgcgaccagccacctggatcagaggatcaatcacggctatctggccgtcgatttcttcttcatactctcggggttcgtaatcgggtacgcctatgacgaccgctggaaaaagatgacggtcacggagttcctcaagcgcaggctcatccgcctgcatcccatggtcgtgatcggtgccctgatcggtgccgtcatgttctatttccagggctgctccgtctgggacgtgaccaaagtcacggtgccgatgctgctggcggcgacgctgatgaacgcctgcctgattccagcaagccccggcacggaaatccgggggctgggcgagatgtacccgctcaacggcccgagctggtcgctgtttttcgagtacgccggaaatatcctgtacgccttcttcatccgcaaactttcgaccggggcactttccgtcgtggttttcctggccgggtgcgggctggcggcattcgccgtctgggggccgctgggcgacatctgcgtcgggttcgccatgaccgaagaaaatatgatcggcggttcgttgcgcctgatgttcgcgttctcggccggcctgctgctctcgcgcgtattcaaacccgtgcatatccggggcgccttctggatatgcggcctgtgcgtcgtcgccctgctgtcggttccgcgcatcggcggcagtgagaatttgtggatgaacggactgtacgatacgttctgcgccgtcgtcgccttccccctgctggtttttctcggggcgtcgggcaagaccaccgacaaagtcaccgcccgggtgtgcaaattcctgggggacatatcctatcccctctacatggtgcactatcccttcatatacctctactacgcctgggtcaaaaacggcgacctcacgttccgggagtcgctgcccgatgccctggcgcttttcttcggttcggtaatcctggcatggctgtgcctgaggctgtacgacgaaccggtgcgcaaatttctgtcgaagcatctgctgcggaagggatagccccgcaagcgccccggccgggagccctcccgcaacgccgcggaattccccgcaaagccaccgggttttgcggggattatatatgatataggtacacggcggacgggagagggcggcaaggcgacacgagaaagcgtacgggaaaaggcgacagaagaaggcggattggagaggaggataaggaacgccccacgaaaggtttcgaaaaaaaacttatcgctttcgtttcgaatcccggatattttttatagatttgtaaaggccgccgcagggtagtccccggcacgggaacggaatgtggacaaaagcggcaacgacgcatctataacaactcgaatatatggaacagtacattttgtcattggatcaggggacgagcagttcccgtgcgatcgtattcgaccggaaagggcagatatgctcgatggcacagcgggaattcacgcagatattccccaagccgggatgggtggaacacaacccgcacgagatatggtcgtcgcaggcttcggtgatcgccgaggcgatcgcggccatcgacatcaacggcctaaacatcgcgggcatcggcatcaccaaccagcgggagaccacgatcgtgtgggattcggagaccgaagagccggtctacaacgccatcgtctggcaggatcgccgcacctcggagtactgcgaccggctgaaggccgaggggcagaccgaattcatccgggaaaggacggggttgatcgtcgacgcctatttcagcgccacgaagatcaaatggattctggacaacgtggcgggggcgagagagcgggccgagaagggcaaactgatgttcggcaccgtcgacacgtggctcatctggcgcctcacgcgcggcgaggtgcacgtgacggacgtgagcaacgcctcgcgcacgatgctcttcaacatccatacgctgcaatgggacgaggagctgctgaggctgttcggcattcccgcctcgatgatgccccaggtgaagtcgtcgagcgaggtatacggcgcgacgaagaccacgatcttcgcccacaaggtacccatcgcgggcatcgcgggcgaccagcaggcagcgctgttcgggcagatgtgcgtcgagcccgggtcggtgaagaacacctacggcacggggtgcttcctgctgatgaacagcggggaaaagcccatcacatcgtcgaacaacctgctgacgaccatcgcatggaagatcggcgacaaggtcgactacgcgctcgaagggagcatcttcgtcggcgggtcggtcgtgcagtggctgcgcgacgggctggggatcatccgttcgtcgtcggaggtcgaagccctggccgcttcggtacccgacaccaacggcgtctatttcgtgccggcgctcacggggctggcagccccgtactgggatcagtatgcccggggagccatcagcggcatcagccgcggcacgacggccgcgcatatcgcccgcgcggcgctggaggggatcgcctaccagacgctggacatcgtgggcgccatgcagcgcgactcgggcatcacgctccgggagctgaaggtcgacggcggcgcggcgcgcaacaacctgctgatgcagtttcagtccgacctgctggacacgcgcgtcatacgcccgggcgtgacggaaaccacggcgctgggtgcggcttacctggccgggctggccgtaggctactggggaagcatcgacgaaatccgccagcaatggcaggcggagcacgtattcgaacccacggccgaccgctcgcagatcgggaaggccgtcgcagggtgggaagacgccgtacgcagggtactgcgcaacagcaaagactaaaataccgggattatggaaatcacactgtttaccaagtgcctgttcgaattcatcgggacactggtgctcgtactgctgggcgacggggtcgtcgcatcgacggtactgaaacaatcgaaaggttttaacggcggatgggccgtaatcacaatcgcgtggggcctggccgtgatgtgcggcgtgctgatcgcgggcccctattcaggggcgcacctcaaccccgcggtctcgatcgggctggccgtggcggggtcgttcccgtgggcgttcgtgcccgggtacatcgcagcacagttgctgggcggtttctgcggggccgtactggtctatgtctattacaaagaccacttcgacgccacggacgacccggcgaccaagctcggcgtattctgcaccatgcctgcgatcatggacaagccgcgcaacctcttctgcgaattcctcggcacgttcctgctggtgttcgtaatcctggccatcggcaacgaacagaacacccccgaaatcgggatgggaagcctcggaagcctgcccgtgacgatgctcatcatggccatcggcatgtcgctgggcggcacgacgggctatgccatcaacccggcgcgcgacctgcctccgcgtgtggcccacagcatcctgcccatcagggggaagggcacgagcgggtggggttacagctgggtacccgtaacggggcccgtactgggcgcactcgccgcagggctgatttacggatgcgtctatatgtgcggctgacggcagcagcccccatacctcctccatggccgctcctgacaggggagcggctttttcgtatccggcaggaagcggggaggggaggccgaaagcgaataatcatcataaaccgttaccgtgccggacatgaccgcgacggaaaccggtttccggggtgaatatttcatttagtccgctaaatttcagataaataaaacaggaagtggatccggaggcaaatccgggcattaaatattgcattatcagtatattatatataaatgacagtccctgcaaatacgcttcaaaggccactaaagcacacaatatcatcgacataaatgcggataattggctataattttgtatctttgcacccagtgaccaactcttcttattaaatttacttgattatgtattcgccagattccgcctttacggggcggcatccggttgtcgggccatacccggccaggatgacacgcacccgtaattatgaattcgacttcatgtcgtgtttctcgaaacacatctccgactacgagaaagccgggcgcaaaggctcggctgcgaactaccggtcgtcatacaggctgctgctgagtttcctcgacggccagcacctgacgtcgcaacacctctcggcccgctgggcagagcgttacgaacgctggctcagggcacggggcgtgacaaccaacacggtgacgttccacctgcgcaacctgagggcagtctacaaccgatccgtaaaaaaacggctcataccggcctcgttcccaaatcccttcacccatctgaccgtcaggcagaccgtaacgcgcaaacgggcgctctcacgcgaaaccatcaaacggatatgcacggccgacctctcggcgctgcatcccaagtactccctcgcacgcgacatcttcatgttcagtttcttcacccgcggcatgtcgttcgtagatatggtttacctgcgcagcagcgacatccatgacggcgtattgacctatgcacgccataaaacggggcagacgctctcgatgcgcatcgagccgcaactgcaacacatcatcgaccgctactgcaatgcttcgccctatatactccccgtactggcaaaagacgacagctacggaaattaccgccagcagcagcgcgagctgaataaatttatccgaaaaatcggagtcctgctcaatatcccggaaccgctgacattctatgtcgcacgacactcatgggcaactctggcccgagattgcggcacaccgctcacggtgatcagcgccgggatgggacacacgtccgaaaggacgacgcgcatctatctcgcacaactcgaccacaacatcatcgacaaagccaatcgaaaaatcatcgacctgcagtaaaaggcggtttcgtataatatccggatttttcggttagaaggaatagaaacaggcaacaaaaaaatcaagacccattattaccaataatgtatcttgaaatcgtaataagttgtattatagacgtttcaattcatccgcaaaaatagaattaattatattcataaccaaatttttcagaaggaaaaaacgcatatctcagcgtaataaactgaaaataagaatattgtatcgttttatttatctttttcatccggacagactgaaaatgtcctgacagcccccgccatgccttcgggaaagtgtccaaacagcgtatttaccgactggtaaccaagcacatacgccaaaagagacccattattggtaataatgggtcacgaacaatgcacacaagccactggttactaaaaatttacattcgatgttttccgcaagaatcctgtgggcggtaaaaatactgctcgtactgcacaaggcgtcggaagcagggactcccctgatgaaaggacgcgagttgcaggctgcatgtgtaggccccgatacggacacctatatgtaccgccgtactttacgggaacttgcggccaagacggactacctgatttgcgtattccagtcgggaagaaccttctaccaatggaacccgaaccaccgcccgacgctgcacgacctgatccgcaggctggacggtggcatgcatgaagtctcgcacacgttctggacatacgaaaatacacgcacgatgcagcccctccagaaagtgtgcaaggagtacgacaacctcattcaaacctatctatcaaagatatacatagaagaattggaatcaccagccctgttcaggcaaagccggttccggttgccgcaggcaacgccccaggtcacaggggagacaggaacaggctcgctttagccccctcacgtcagcgaacaaaaacacattcatggaaaaacaaacaaccaccgaccattttcatcctgtcgctaccggcaatcgccgccccggcattggcggtagccgtagcctgccacatgtaccggacacggcagataacacgaataacggactcgcaacgagaccatagataccgggaaatttctaatcactaaaacattcaaacatgaaacgcctctatcttattgccctctttatcatcgtcagccttacagccacggcacaggaaaacggcaatcgcgatgcgcagaaccgcatcgtgcgcggcccctatgaaacgaaccgctttttcgacaacatcttcgtcggcgtcgccggcggtgtaaatatctatttcggcgaacacgattcctacggcaaattcggcaaacgcatggccccggcactggacatccatgtcggaaaatggttcacgccctcggtcggcgcacgcgtcggatactccggcctgcaggccaaggggtggacgaccgcaggcaccaaatacgcaaagggtgccaacggcagcatgttcaaggagaaattcggcgtgtcgtacctgcatgccgatgcaatgtggaacttctcgaacgccgtgagcggctacaagcagacccgcacctggaatttcgtacccttcgtcggagtgggttgggcgcgttcctacggcaacgacacccacgacaacgaaatcggcttcgacgcaggtctgctgaatgtagtgcgcctctgcgatctgctcgacctgacgctcgaagctcgctgcctgctggtcaaccagcgtttcgacggcgtgggcggcggccgcatcggcgaaggtatgctctcggtaacggcagggctgtcgttcaacctgaaccgccgcggcttcaagcgagcctcgcaggctcagcccgtggactacacgtcgtacctggatcgtatcaagcggctcgaaaacaccaacaacgaactcgcatcgcagaattcggaactgagcgacgagaacgagaaattgcgcaacatgccgcccagggtggttgccgcgcagaaggtatccgcatcgcccgtggcgctcttcttcaagatcggcaaggccacgctcgacaagaaagaactgaccaacctcgaattctacgtaaggaacgccatgaaggccgacaaggacaagaccttcacgctgatcggctcggcagacaaggataccggcacgaaggagatcaaccagcggctgagcgaacagcgcatggagtacgtctacaacctcttgaaggacaagtacggcatcgccccgtcccgtctggtcaagaaggccgaaggcgacaccaacaaccggttcgcagagccggaactgaaccgcgtcgtgatcgtggaataagtaaaacaatcggaattgacaacccctaacggactctaccgcatgccccagaccgcaataccgaccgcagcgggcgaaaccgccggatccggccgggcgccgcactacctgctcgcatatctggaagaaggacgggttcgcgtatacgcccccgacaaatccgacatatggatcggggtgcagcttcccgaagcggaagagacgcgcgtcgaagcggaactgcagcggatccaccgaacgggacaaaggacaggcatcgtcgaaatatgcctgtccgcggcgggggtgcagcgcggcatgcgcgtgctctgcgtaagggcgtagcgccaacccgaaacggacatggaataaaagcaactacacataataaaaaagaccatgaaaaaacaaactatgacttacgaagcaccggagctgcacctgatctccgtatgcgtggaaaaaggattcgcggcaagcagcggcatcgaaccgggaaccgacggcggtgagctgggcggaaccaggtcgctctcttacgatgactacgaatagcgacgcatccattgggaattaacgacaaaaacagaaaacgcaccatgaaaaaattattcgttatagcaatgctcgcaacggtcggcatggccgcgtgcagcaaggacgacacggctccggccggcggcccgaaaaagtatgtccaggtaaccatccccgaggagatggtttccggggagacccgtacttccatcgacggcaccacgaccaactgggtggccggcgacaaagtcgccgtgctcctctacgacggagccgcgacgatgacatgcgagttcacggccgacaagtcgggcccgaccacgacgttctcgggcgacgtgcccatcggctcctactcgctggcggcggcttactacccgtacgactgcaacgccacgttcgacgccgtgaacaagaccttcaagcacacctggggatcggaatactgcacggacaacctggctgcctatgacttcatgtatacgaacatctgggaggagccgttcgaaatcaacgaggcgacgacccaactgcccgtacacttcacgttcaaaccgctgatggcccgcatcaagatctcgctcggactgggtgcgaacgaaacgcccaagaaagtcatcctggagaccgacagcaacgtattgccgacctccggtacgatcgacgccctggagaacttcacggcatcgtccgtaaccaattcgatcgctgttcccacgaacaaaaaagagttcgtactgggcctgctccccgtgggcatccactcgaccatgaccgtgaaggtgatgaccaccgacgggctgacctactcggacaagtcgttcacgctggccggcctgaagcgcaaccaccactacacgatgagcgtaccctgcaacaagaaaacggtgacgatcaccgtacccgatgccatcgaccagaagtacggtacgcatacctaccaggacaacggattctacacggtcgattcccaatacgacccggaaggaattttcaatgactggtatttttaccaggcagagatcaagagcaacaagaacggcgacgacaaactcaagaagaaccgcatccagctacaggttcctgcgggcttcaacaacgcaaacaacggcgctttcgtgacggccccgatccagtgcgagggttcgaaaaccgtgaaggtatccttcgaggtagcgaccaaccgtataggcaatattgagtacaggatcggcgtaacgggcaacggcccgatcaccgaatcgtggctccgcgacaggaacaacatcctgaacggcaacgaccaaaagtgcaaatccggtacacagacccatacgtttacggtcaccaacggacagcgtctcatgatcaagatactatctaccgcaggatcttaccacgtagagttcgcggatttcacctatacggtcgaataatttcgataaaataatttttcagatcgggacggagcaggataccgtcccgatttatctataaaccgaatctgatgaaagcagcatacacaaagccggaattggagatactcgtaattgcggccgaagcaggattcgcgatttcacagccgcacggcagcgaactcgggccgggcccggtggattatgcggacgacgagtattgaattacaaacagccaattcgaacctgacgttatgaaacacaaacctattttccgactcgcgctgctcgcgctcctgctggccggttgcggaaaggatacgacagaactgcccgaagggcccgaaacacccgcgacagggggcgatgccatcgtctgccggttgtcgatcggcaacgaagcgcccgaccccacggacgaaacccgtacggcttacggcccgctacaggacggttattacccgatctattggcgcaatgccgaccgcgtgggaatcatctgtccgcagacgaccccgcaatgggcggaggtcgaagtcagcgtctccggggcgaccgaaagcgaagccgacctgagcgacacgggaatgcagtgggggagcagtcccagctacgatttttacgccttctatccggcagacgccgtccaggccaacagcggctcgatcgtcgcgacggcaatcccggccgtacagacctaccacaacggcgaatgcaacatgcagtacgcctatatggcggcatgcacccaaggggtggaacgcggaggggaggtgcccttcaggttccgcccgctgatgaccacggttacggtccaggtgggattctcggaggccgcggaggtacagaagctcgtgctgtcgagcgagaacggccccatagcgggcggcttcacgttcgacatcgaaaccgaccggtgcacggtcatcccgggcaaaggatcgaacgtgctggccctgcacctggtgtcgggggacgtcccctacattcagctcagcgcagggtcgaaggtcgcggtcacggcgttcatgctgccgcaggacatcgaggggctcacgctctccgccgtcaccacgcagggcagaacatacagctacacaaccccggcaacgctcagggccgggcaccgttattcgttcacgatcggcgacatgcaggcgcaggcgcaacagacctcggaaggttattccgactggatggcctacctgcccgacaacacctacctgtcgcaggtttccatccccggatcgcacgacgcctgcacgatctacggttcgcactacgagtacaaaggcgggatgcccggcgaaagataccacttcaaatggttgcagaacgtcgtattcggctatatgaacacgaccaagatcatcaaggcacaggagctctccatcgaagagcagcttgcggccggggttcgcatgttcgacctgcgcccctcctcgtcgagctcctcggtgcgcgacctcccgatccatcacggcatagccccgctgggcgacccgacgctgggcggctacgccccgggcagctccggtcgccaggaactttcgcccttcatgctttcgcacctgctcgaccgtttcgtgcggttcctcgacgaacatccgggcgagacggtgctcgtgcatatgaaatacgagaacacgagcaccagcgccaataaaacgggatgggacaaaagcgtggccagcctgatcaaatcgcattgcagcggctatgtggccgacttccaccccctgatgacgctggccgacgcccgcggcaagatactcttcatgatccgcgaggattacaaatcgtcgaacaacggccggtatttcggcgcctacctgaactggacggacgacaaggtggttttcgacacgacgctcagcggcaacggcgtggggcaggccccgatccgcgtgaacgacctctacaacatcaagaacggggcatcggactgcaagaccaagtatgcggccatcgacgagtgcatcgcctatacctataatacggacgacccgacgcggtggtgcatgaattatgtcagctgctacgacacggcccattgcagcgtgtcggggatcagcctgttcggcgccgtgggcgactacgactactgcgcgaacaagtacaacaggtatacggccgacaagatcgacagctacgattttcgcgggaacgtcggcatcgtgctgatggacttcgcagcggcatcgcacgccacgatgacctacgggcagacctactcgaacatgcaggtctacggcgacgacctggtcagggccgtgatctgcaacaacaacaagtggaacctgcggcgcaacgaataacccccggaggctcccgccgccggcaggacgccggaacgacaccgaagaaaaacctcccgggcttcccgggaggtttttgcacacacaaacattaacaatacaaacaacgcaatggctgaatagatctgttgtcctggatgcaaaggtgggggtaatttccgggttgcacaatcgccataaatgagtattttacgtccgggcactcccaatttatggtgaaagccccggcggaagggcgtgatctgcaattttttattttgaatttcgaaataatgcactatctttgcagacaaattccaacgtcccggcgcccgccggggttctgaaaatcattttgaaatagaaatatatgcaggatttgaaagcgctcgaagggaaaagtctcgtcgaactgcgtgaaatagcaaaagctatcggtatcggggacaccacattgaagaagcgcgaactgattgagaaaatcgccgggagctccgcttccgaaggcgtccccgcagaaaataaagagaagagaggacggggcagaaaaaaggaagctcccgcaacggaaatgcaacagacggcacccgcagccgaacctgccgccgcaaaggcggaaaccgctcccgaaaccgttccccaggccccgcgcagccgccggccacgcatcaccaatacgaagaccgaaaacaccgctccggcacagcgtccgcccgtaacggtcgccgccccccccgccgagccggagctcccgatggaaagcgccccggcacctgcaccagcggcagcggcagaagccgtacaggcaccccgcgaggagaaggcggagcccaagcgccgcggccgcaagcccaaggcacaggcacaggaagaggcagcagaacccgccgccgcgacacccccggctgcccaggcagcccaggctaccccggcagcagcagccgatgcgcaatccttcgacggcgaggtgatcaccaaggacgatttcgccggggagatcgaaggcgaaggcgtgctggagatcatgcccgacggatacgggttcctgcgttcggccgactacaactacctgaactcgcccgacgacatttacgtttcgccgtcgcagatcaaactcttcgggctgaagcccggcgacacggtgaacggcgccatacgtccgccgaaggagggggagaaatattttccgctggtacgcgtgaacgagatcaacggcctggcgccggagttcatccgcgaccgcgtacagttcgaattcatgacgccgctcttcccgagcgagaaattctgccttacgggcaacggacacaacaacatgtcgacgcgcgtggtcgacctcttttcgcccatcggcaaggggcagcgcgcactgatcgtagcacagcccaagacgggtaagacggtgctcatgcagtcgatcatcaacgccatcgccgacaaccatcccgaagtatacatcatcgtgctgctgatcgacgagcgcccggaggaggtgaccgagatggcccgcaactccaaggccgaggtcgtggcatcgaccttcgacgaacaggcgtcgcgccatgtgaaagtcgcggaaatggtactcgacaaggccaagcgcatggtcgaatgcggacacgacgtggtgatcttcctcgactcgatcacccgcctggcacgcgcctacaactccgtccagccggcatcgggcaaggtgctctcgggcggtgtggatgccaacgcgctccacaaacccaagcgtttcttcggtgcagcccgcaacacagaggagaaagggtcgctgacgatcatcgccacggcgctgatcgacaccggttcgaagatggacgaggtgattttcgaagagttcaagggcacgggcaacatggagctccagctcgaccgcaagctcgccaacaaacgtgtctacccggcggtcgacgtcatcgcatcgggtacgcgccgcgaagacctgctcctgccgcgcgacgtgatgaaccgcacgtgggtgctgcgcaaatacctttcggacatgacgcccgtcgaggccatggagttcctccagaagcagatgggaatgaccaacaccaacgaggagttcctcgccacgatgaaccattaaacaaccacaaaacccactgatagaatgaaaaacctgattatcctgctgtcatgcctgctgttcgccggcagcgtatacggatggggacaaaaggggcacgacgtcacggcctacatcgcagagtgccacctcacgcccgaagccgcccaaaagatcgacaaggtgctcaacggccattcgcccgtgtactactgcaactggatggacattgccagccacacccccgaatacaattacaccaagacgtggcactacctgaacatcgacgagggccaaaccctcgaaacgatgccccggaaccccaaaggcgacgtgctgacggccgtcacggcgctcgtcgccgagctcaaggccggcgggctggcacccgaggcggagaccgagaagctcaagatgctgatccacctggtcggcgacatgcactgcccgatgcacacggggcgcctgtcggatatcggtggcaatcagcgcccggtgctgatgttcggacgcagaacgaacctccactcggcctgggactcggcgatcctcgaagccgggcacaagtggagctacactgagtggcaggaacagatcgaccgcttgacggacgacgaggcggcactggtacaggccggggagccgcaggactggctgaaggagacccatgcgatctgcgtcggcatctacgaggacagccccgaagggacgaaaatatcctacgattacgtggacaaatacacgcccgtcatcgagcaacagctcgtccggggcggctaccggctggcacgcctgctgaacgagatttaccgctgaccgtaggtgcaaaataaaagggaacgggcttgcagtcgctgcaagcccgttttccgtcctgcggcagtgcggcaaagatgtatttcggccgtttcggccgcacaaaaatccgggctaagcgctaagggacaagaccggggcatgcaggggagcactgcgtgcggcgcagggccccggcaacggatcggggcggataattttatccggcaaaatacccgcggaaataaaagttatattaattttgcaggcatgagatacctaaccgccatactcttcggcctgcttgctgccggatgcggcgacaaggccgcggacaacctgatgacccaggcttcggtgctgatagaggagcatcccgacagcgccttgctggctctccggcagatagacccctcggccatttcaccggcggccgacgcccggcggcgcctgctgctcgcgcagacctactcccgcacaggtgccgaggctgacaacgattcgctgaccgcccccgcactggattattacgagcgccacggctccggggccgagcgtgcctatgcctggtatttcgacgcaaaggtacaccacaatgccggcgacctgggacaggcgatcaaaggctacacacaggcgatgctctacgccgaacgcaaccgcgacaaggcgggaaccacaaaactgctcatggctctgtaccacacgctggggctgctgtacctcgaacagggatacgacaccgaggccgaagaggcattctcgaaagccgtcgccgcggcgcaggagaccggcagtgcggaactggagggatacagccgctacatgctctcgtcggcacagtatgccaacggccgctatgccgcggccatcgaaacactctccccgctggtcggggcacgcgacacgatggcattccgtttcttcgcccagcagatcaccctgcaaaacctgatataccacaccttcgccgaagactggagcaccgggcagttgctcgaggagcgggcgcgcatcgacatgcacgaactatggacagccccgctgacgcacggccacgcatcggccgacgacgatgcccgcacactttacgacatcgcttcggccatcattttttaccgggcggagcagcccgattcggcacaatactacatagaccgctcgctggcgcacatcaaacgcttcaaccagaacaacatagggctctacacgatcgcctcggccatacaccaccgccgcggggaggacggcaaagcctatgcctgtgccatgcagtacatcggcaagcgcgattcgctcgacaaggcacggcagggggtatcggtggccgagctggaaaagagataccgcacggccaacgaaacggcgctccgcgaggcagggctgcgttaccgggcctggatcgccacgctggcatgcctcttgctggccgcggccgtcacgggggcggtggtgggctatcggcgcaaactccggcaccgggacgcgcagctgagcgaatacctcacgctgctggaatcctaccgggaatcgcacgacagcctcacctcgcggctcgatgcctcgaacgagcgcgaggccgccgtcaaggcttcgctcgaggggcgattcgccctgctgcgcgacatcgccgcaacctattacacctatggcgaaggggaacggctggcgaggaaggtgaaggagctggcactgagcccggcgatgctcgcagacatcgtccgcatggcagacctctacaacgaccgggcggtcacgcgcctgcgccgccaactgccggggtggacgccgcgcaactacgatttcgcagcgctggtcgtcgccgggttctcggcgcaggagatcagcgtgatgctcgacatgacgctgaacggggtctacacgctcaaatcgaaactcaaacgccggatcgccgaatcgggggctccggacagggagtttttcacccgttttttcgcatagcaagggcgcccggcgcgccggcaagaatccgcgggatcgcaccctctgtaaatcaacattttacacacaaacaagcaagaattattccgtaccggcaagccgcatcggggcttaactttgcagggaaactaaatgaaaaaaccaagcaaagttatgagacggacatttcttttactcgtatgcgccctggcgcttttttccgtgaaacagacctgcgggcaaattgtgcgggggagggtggtcgaccaagagcggcaacccgtggtcggggtcgcggtagtgatgctcgacaccgactcgacctacctcgcggccgcggcatcggatgccgacgggcgtttcgccatcgcatcggaggtacgcccctaccggctgctgttccagcacctcgcctatgagatgcaaacgcttacgtcggagcacgacgaagccggcgaggtcgtcctgcatgaatatacgaatgcgctcgacgccgtggtcgtagagggcgaaaaacccatcgtgcgggtcgaagaggggcggctggcctatgacctggaagccgtatcgaaaggcaaggcggtgaacaatgcctacgaagccctcacccagctgccgggcgtcagcgaacaggacggcgggctgacgcttgccggcgccgggggtgtcacagtgatcctgaacgggaagccctcgacgatgagcaccgagcagttggcatcgctgctgcgctcgacacccgtcgaacggatcgagaaggccgaagtgatgtacagcacgccgccgcagtaccatgtgcgcggcgcggcgatcaacctcgtcctgcggcgcagccacgactactcgttttcgggggaggtacacgccaactataccaaccggttttacagcaactgggatgccgggggcaacttcgccttctcctcgcccgagtggtcggccgaggtaacctattcggccgggcaggccaagaccaaacggatcatcgacctctactcgcggcatacgctcgcggacggggagcacgagatcgcccagaggcagaacatcaccagcaaaggaacatggcaccggctgagggccgccgcagaatacgccccgcagggcaaaggacgcctgagcattgcctatacgggcgcatacaccccgcatacgagcggcctcgtacgtgccgacggcaacctggtcaactcggtcagctcgcccgggggtgacaacacgatgcacaacgctgcgctgcgctacacgtcggcctccgggctcgacctctcggcggactacacgcattacagctcgtggcagctggccgccatgcggaacaggtacgccgacggcaaccggacagcgttcgacgtggtttcggggcagtccgtcgaccgggtaaatgtcagcgccgaccagtcgcacgacctgggcaatggctggggcatgacctacgggggcatcttcagctgggcgggcgaccacgactaccagcgttacaggctccatgagggcgacatcgccaccgtcgataccgattcgcacctcgacgaatacacgggcaacctctacgccggggtgagcaaacagttcgccaaggggagtttctcgctgtcgctggccggggaatactaccgcgcgggggactacgacaactggtcgctctacccgcaggcgaccctgctcctgacacccgcagagaaacatctcgtacagatttcgctctcgtcggacaagacctatccctcgtactgggagatgcagcagtcgacctcctacatcgacggctattcggagatccggggcacgcccggactgcggccgtcgaaaagctacaacggccaggcaatgtacatgtataagcagaagtatatcttcatgctgttctggaacgagatgcccgactacttcgaccaaaccgcatggcaggcccctgatcgcctggcattggtctaccagacgctcaactggaacaccaaccgccagtggggcgccaacgtcatcgtaccgctgcgcccgggcaaatggctcgattcccggctgacgctgaccgggatgcggatgacccagcgctgcgacgcctttcacgacctggcgttcgaccgctccaaatggctgggggtggtgcgcatggacaacacgatccgtctgagccgcaaacccgacctgacgctcgacctctcgggctactatcagagcgcggccatccaggggacttacgacgtcgacccttcgtggagcgtcaacgcgggtgccaagtggacgttcgacaagagccgggcgagcctctcggtgcgctgcaacgacattttcgaaagttcgttgccgttcgccaaagtccgttacaagggacagtacctcgacatggattccggcacgtacacccgttcggtgacggtgcatttctcctaccgtttcggcacatacaaggagaagcggcacaagacggtcgacacgtcgaggttcgggcattgaccggatcccgcagggcacgaaaaaaggccgtcgcaaagacggccctgtactcggagcgggaatcgaacccgcacgaccattgctggtcacaggattttaagtccggcgtgtctacctattccaccatccgagccattgcctttcggcgaaaggcgtcggcaaaagtacgaaaattttacgattcgccaaaatctatataatttataatcgcctccgtctggccggggccgaaccagcggatttccgcgtcgcggcggaaccaggtaagctgccgtttggcatatcggcgcgaattgcgcttgataagttccacggcccggtcataggagatgcgtccgtcgaaatagtcgaagaactcccggtagccgaccgtctgcagggcattcagaccgcggtagggatacaccgcacgcgcctcggcttcgaggccgtcggcaagcatctgcccgacacggtggtcgatgcgttcgtacaactcctcgcgcggcatgtcgatgccgaccttcacgatgtcgaaatcgcgcttgcgacgccgcccagtccgcaggcgggagtagggcagtccggtttgcaggcagacctccagtgcccgaacgacgcgcgccgggttgctgcggtcgaccaccgcataataatccggatcgagcgtccgcaactgcccggcgagggcttcgagcccctccgtgcggagtcgcgccgccaattcgcggcgcaggttttcatcggcctgcggcaggtcgtccatgccttcgcacaacgccttgacataaagccccgagcccccgacggcaacgacgcagtcatgcccggcgaacagtctttcgaggcaggcgagggcctgcgtttcgtactcgccgcaactcaggttatccgcgaggtcgtgcgatgctataaaatggtgttcgacggcttgcaattggtctgccgtaggctgagccgtaccgatcggcaagccgcggtacatctggcgggagtcggtggaaaggatgggtgcaccgtagtgcagggcgatgcggatgctcagatccgtcttgcccgaaccggtcgggccgacaatgacgacgagccgcttagtactcgtcgtcataattgtcgtcgccctcgaaatcgttgaattcccccatcacctcgtcgaaaatcgagccttcgcccgcggtggccgtcttcgacgggtcgtactggtcgggggcatcggcctgggcgtatatctcgcgcggataggagccgtctttgggcatttcgtacgtcccggtcagttcgaggaagtaggcccggtcgccgaacatgtcgaaaaggtagatcagccggtcgcggttgttgtggatgatctgccccagggtcacgctctccatcgccgcaggagccccttccgaaccgtcgtccatatccatgagggtgaactcgcgcagtttttcccagcgctcgtccgccgtgaagaacgacgccatgcactcctcgtattcgagcgaacggaggatgaaattatggaaatcgagcaacgtcatgtcgtacggcacttcgtaatcgcgcacgaagttgtcgttctcatcgctcagcatccggaatcggaaaaccattgacatagcttgtaatttttgcatttcctactacaaagatagtacaaaaagggaaaatgcaaaacaacaggctgcgtcacttccgaccgaggtaccgggtaacaatgtcgatcaggtagtggctgccctgcgggttctccgccccgggagccacgtagtcgtggtggaattcccaccagaaagcccccaggtagccgccggccttgatccattcgatcttgctgcggatcgaagaggggttgtcgatggtcacgaattccgttctgtccggcgaaaaatagtaggacacctcggctgccgggtcgtactcctccgtccagccgtttgcgagccggggcaggaactccttgtaggtgatatacgaaccgtagtcgcgcagcggcccgtcggctttctgcccgggcttcaaccctttgtaatagaacccgtagttggccagcccgaggcagagcttccgcttgtcgaagactttccagtgttccagcttcgaccgcatacgctccatcgaggtgttgtgcgaaggggtgctgccccatacgccgtcgcacatgtcataggacatgatatttatccagtcgaccgccccggccagcctgtcggccagcgcccgatcgtactcgtggtcgatgctgagggccgtggtcaggtagtaataacgcccggtgcgttccgagagttcgtcgaaccgttcgcgcagcagggccatcatgcgggcatgcaactccttgtccagcgtgatctcccagtccatgtcgatgccgtcgtaaccgttcttttcgaccaggcgcaccatatacccgacaaacttggcgatccgatccggattctccagcaggggaaggaactcctgctgcccgccgaagcacaacagtatcctggccccggcggcatgcgccttttcgatcatggacggcacgagcgccatcttgcctccctgcttcaggtagtcgaactgcgtggcataggcgtcgacggcatcctgcggccggtcgaaatccagcccggcccactcgggcgtagccatcaggtagatgaactggaaggcatcgtaccccgggttcgtgagttccgcttcgctcaggaggctctccaccgaataggccgcatgtatgaagtcggggattacgggggccggtttgcgggcatacgatgcagagctggcgacaaataacgaaacgactaataaggcgaactttttcatgataaaccatttgttttatattcagcctcaaatataatattatttattataaacacagccaaatataatattatttatcaataaaaagtacacaacatgacctaatttacaaacaagatgtcgtaaggaattcgatgacatccctgtcgtcggggtaatccgtcagcccaggggactgtgcatggccgaaatccacgcggcggcggcaggcaatgcactccgaaacgacgcattgcagtccggcatcgtgtgctgcgagccaggccccgacctcggcgggtgatttgtaaaacgaataattgatccggctcaacgccgcgggaaaggcccgctcttcgacggccacggcagctcccaggtcgcggaacggctgtccgcccatcgtcaggagggctttctgctggcggtaagagttcctgtatttcacgttcacctccggcatccgcagctgcaggtcatagccctcgggcaggaaaagcagcgacacgctgcggcagcccagtccggaataagcccagatgtcgtcggccaatgcagtgagctgcgcgggggtttcccggccgccgagtacggcgaccgactggcggttaccgcgcagcagggcgggaatgcccgcatactgcgcccggaaatagcggttggcattgtcgctgcccgtagcgatcacggcatcgggcgacgtgctgccgtcgtaaaattccaccggaacctgcgggtcgattccgcgcagcaacccgatgacatattccatcaggacggtatctttggccgatggttttacgaggcacctgtgccctgcggcgagcacgcacagcatatcgaaaaatccgaccagcgggatattcccggccatgacgaccagcacgcgccggggttcggcgacaggaacggggtagggcgccagccactccgccagcgcatcgcgccggagcatcccgtctgcgacggctgcaacggcgcggcaaatgtctgcgggcgtaaaccagccgttttcccggcacgcacgcccgattacctcccgcgtgcgggcgtcgtcgccgaaaccgcgcagacggcacccaagccgggaaaagagtccgatggcattttccatggtgcaaagatagcgtttcgcaatggaatatgcacattttatccgaagttgtgctatatttgcatagacggatcttaaaccggtaaagactatggaaagaacattcagagaggcactccgccaccgccgcagctactacgccttagctccggaatcgcccatcgacgacgcacggatcgaggaaatcgtgcgttttgccataaaacacgtaccctcggccttcaattcgcaatcgacacgtgccgtattgctgcttcacgagcatcacgacgaattatggaaaatcgtaaagcgcaccctgcgggcaatcgtccccgaaggggcattcgcacgcaccgaggagaagatcgagcacagcttcgcagccgggtacggcaccgtacttttcttcgaagacacggatgtcgtccgcggcctgcaacagcagtttccggcctatgcggggaatttcccggtatggtcggagcagacatcggccatgcaccagctggcagtctggacgatgctggaagacgcagggttgggggcatcgctccaacattacaacccgctcatcgacgatgaggtgcgcaaacactggagcctgcccggagagtggaaactcatcgcgcaaatgccgttcgggacacccgcaggcgaaccaggcgaaaagacgttcaaaccgctggacgaacgcatcagggtgttcagataaagggggcggagcccggcttcaggacaaaaattccgcagaatagccctgaaaaatttggagattcggattttttatatacctttgcactcgcaattgagaaacatgccatgcggaaatagctcagttggtagagcacaaccttgccaaggttggggtcgcgagttcgagtctcgttttccgctctcgaaatcagcaacttacagaaatgaagttgctgattttttttgtttacccgcgacgggaaagagacaaaaacgcctttccatggccctggctcccattgcctctccataaaactctccattggaaacatgttttccctcctgcgtcaaacgatacaaaacaatggctttcgaacaaataccccggcaaggatacgcccccgttatgccctttgcgtccccgggacaaacgcaggaaaccagtaacagtgaaataacctgtccgtcttacggatcctgcgactccccgtccggcacgggtcgaacgtatcgggataaaaacttccggcccgagggagtttttttggccgtttgcgggaaaaagggtatatttgcagtgtttcgcaaacgaaataatcaaaccatgttgctgagtgtgattgaaacggcggagaccttgggatgctccgcccaatatgtgaggaaacttttaagggaaggccgcctcgccggccagaaaataggggactcctggattataaacgacgatacattggaatctttcgacaggaaggatctgcggatgaaaaaaaatgacgttccggatcggaaatccaagaaagcgccaaaacaggacgcgctgaattgcctctcctttttctccggggcgatggggctggacatcggactggagcaggagggcatcaacatattgctggcctgcgaaacggataacgcatgccgccggacgatcgtcgccaacgaacccggcatcggactgatcggagatataagggactacacggtcggggagatcctggaatacgccaacctccgggaaaacgggcaggtcgacatcgtcgtcggcgggccgccctgccaggcattcagcacggccggaaaaaggctcggcttccaggacgagcggggcaatgtctttctgaaatacatagaagtcatccgggagatacaaccgcagtacgccgtaatagaaaacgtaagagggttgttttcgtccgcactttcgatagacatcgacgatgaaattacccgcagctacgacatcaattgggcaaagacaccggggtcgacactcttttatatcaaaaagaagctggaagccgcaggttacaacgtaactttcaacctttacaattcggccaatttcggctccccgcaaatcagggagagggtcgtcataacatgcaccaaatccccgaacccggttccgtacctccgtcccacccattcgaacgaagaggtattcgggcttgaaaggtggaggactttcagggatgcagtagccggactggatccggcccgatgcgaccacatcgacttttccgagaagcggctgaagtacataaagatgctgaaaccgggggaaaactggcggaatctgcccaaagaactccagccggaagccatgggaaactcctaccatctgggcggtgggaaaacgggcttttaccgaaggctggactgggattcgccgtcccccacggtagtcacccatcccgccatgcccgcaacggaattggcgcacccgacggaaaacaggcccctgtccatacaagaatacaaaaggatccaggaatttcccgacgattgggtgatcgaaggcagtttgctggacaaatacaagcaaatcggcaatgcagttcccgtcgggctgggcagggcaatcggcaggacaatcgccgcccaccgccagggagtcgaaacggcggcaccggaaggctttccctattcccgctacaagggcacatcggatcatgaattcgaaaccggaattttatcggaaaaacgaaaaaaaacatcgtcccagttgacgatcgttttcgattaatccgtaattttaaaacaaaaaagccatgacggatgcatacagattcgacgaatcgagtacggaaaaggcaatcgcctatgccaaaatatacgccgggacgaattattcccccgccatggagaccgtcctgaaagtcgccttcagcgaaaaacgcaatttgccgactttccgcctgaaaagttcggacaccataattctctccggctacatgaaaaagtgggtgggagcatacctggccggatataacaacaggccctcggtcagaaccgggaattgttccgagacacatccggatccgatggcaaaaacgatcctcagagccaggatacccgggctcgaggataatttggccgataaaatagtggccgggcactccctgctgatgacaattgaaaacaatatcggcgagttgctcgaagaatacctggcggtaaaattatctcccctggggtggtattgctgctgggggagtacgatcgacgcagtagacttttgcaaggcggacggctcgctgctgcagataaagacaagcgacaattccgaaaacagttccagcagcagggtcaggcagggcactcccatcgaaaaatggttccgcaggttctcgaggcgtccgggagtatataactgggagtcgctcaacaggatgctgggacggccgggatatgtgtccgagtcagacttccgggccttcgcggaaaagaccatagcggcaaacccggcctgcatatatatagccgccaaccacctgttgaacagaccctgacacgtgccgtcccccaggtggatgcaccccaaaattacccggagcgctcgcccgggtaattttcattccggatcgcgggcgggctattttcccagccggtaagcggtgggggtcatgcccgtatggttcttgaagtatttcccgaaaaacgactggttggggaaattcaggtagtaggagatctcctggatgctcatcgtggagtatttcagcaggttcttggcttcgagcaccacatagtcgtcgatccactgcacggccgtgcgcccgctggtcttgcggatgatcgtcgtgaggtatttgggcgtcaggttcaactgttcggcatagaaccctaccgaacgctgctgcatgtagtgcctggtcagcactcccataaactggttgaaatattcctcgttgcggctgcgggaggtagcttccgacgcccccgtctcgacatgccgggcgatgatccggcagaccttgtaggccagtgtccggatcatcgaacgtatgatctcggcggagtaggggtcgttgtgctgccgcgccccctcgatgcgaatcccgtccagcgaacgcatgaccccgtcccactcctcgtcgtcgagcggcaggctggggtgcttctcgacctgcaggaaaagctgtgtcagcagtttgaggtcgatattgatccgttggatgaactccttctcgcagaggatggcatgcacgctggcgtcctccaccgactcgacctgcaggatgctgccgggcaggtgaacgaaaagcgtcctctcgccgatcgtgtggcgcgtcacgcccgacgtggagacaatcgaacctttagaacaaaaaatgatcgcaaaggcatcgagacgtgtcggataccggaacaggtcgatgttgaattcatccttcacattgacacgcgaagcgatcaggcatccatcgtaatagaggtcttccggcctgcggccgcagatgtcgagcaatgtggcgagcgagaagctctgaatctcctttttgttcattttaccgataattatgcggacaaatatacgcaaatcccgggagcttttcactgaatagtacaaaatcgaaccaatcgacgaattcatccgacacgatggtcttttcttacggccgctaaaacggcaactttgcatcgaaaaatacggaactgatgaaacaaacgactttttgcgcaatactgctgttagcgacaggttgcacttcaccgaaaaagccccatacggccgatccgctgcgtgtgggcaccatcgtcgtcaccccgtcgtcggacatcgacgccgcgctctacgtcggcacgatcgaggaggagacctcggccgccctgagtttccccgtcgccggtaccctcgcgcgcacctacgcggacgaagggcagcgcgtgcagcaggggcagttgctggccgaactcgatccgacatcggcccggcagaccttcgatgccgcgcaggcggcactcgaccaggcgaaagatgcctgcgcgcgcctcaaacagctttacaacgccgaaagcctgcccgagatcaagtgggtcgaggcgcagacccggctgcgccaggccgagtcggcatactgcatcgcccgcaaaaacctcgacgactgcaagttgtacgcacccttcacgggcgtcatcggcaaacggcaagccgcagcgggggagacggttctgccgggcgtcccggccatgaccctgctgcggatcgggacggtgaaagtccgcttcccggtacccgagcaggagatcgcacgcctgggcacggacagccggctgcggataaccgtcgcggcactcggcgaccgtgctttcccggccgggaagatcgaaaagggtgccgtggcaaatcccgctacacacacctatgacgtatgcgccacgctgtccaacgccgacggcgagctgctcccgggcatggtatgccgcgtggaggcatcgccggcaggggcggccgaagagatcgcgctgccggtacgcgccgtgcagcaggccggcgacggaagccgcttcgtatggaaagtgagcggggattcggtcgtccgcacggctgtcgccacgggacgcctggtgaacaacgccgtcacgatcaccgcaggaatacaagcgggcgaccgcatcgtgaccgacgggatgcagaaaatcggccagggaagtaaagtcatagcggaatgaaaagcaatataatatcgtggtcgatgcgcaatttccgcatcgccttcctcatcgtgggctgcctgttcgccttcggtatttacgggctggtgcatattcccaagcaggaattcccggaatacacgatccgccagggcgtggtggtgggcgtctatcccggcgccacgagcgaagaggtcgagcagcagctcgccaagccgctcgaacagttcctgatgacttacaaggaggtcaaacggtcgaagaccacctccacgtcgcagaacggcatgtgctacgtgatggtcgaactcgaagaccacgtgaacgacaaggacgaagtgtggtcgaagatcaagcacggcctggcggcattcaagtcgcagttgccgccgggcgttgcggccgtggtcaccaacgacgacttcggcgacacctcggcgctgctcatcacgcttgaatccgacacgcggtcgtaccgcgaactgaaaggctacatggacgacctgagcgaccgcctgcgccgcatcgagtcggtctcgaacctgcgcccgtacggcgtgcagcaggagcaaatctcgatctacgccgaccatgaacggctggcggcctacggcatcggcgaaaaagtcctctcggccgcgctcgcctcgcaggggctgaccccgatgggcgggtcggtcggcaacgccgagaccgaaacacccatccacatcgcgccgtcgctggccggcgagcgggaggtcgccgagcagatcatctggagcgacccgcaggggaatgtgatgcgcgtgaaggacgtggcgcgcgtcgtacgcgaatacgacgacccggacagctacatccgcaacaacggccatcgctgcgtcatgctgtcgatggagatgaaggcgggcttcaacatcgtgcaatacggccgtgacgtggacgaagtgctgcacgaattcattgcggccgagctccccgcggacgtccaggtgcagcgcatcgccgatcaggccaaggtcgtgggcgactcggtgcactcgttcctgcgcgacctgttcgtcgccatggccatcatcatcctggtgatgatgctcctcttcccgctgcggtcggccatcgtggcggccatcaccatcccgctgtcgaccttcatctcggtgggaatcatgtacctgtgcggcatcccgctcaacacggtgaccctcgcggcgctggtcgtggtgctgggtatgatcgtcgacaattcgatcgtggtgatcgacggctacctcgactacctcgggcgcggccactcgcgctggttcgcggcggtcgagagcgcccgggagttcttcccgtcgctgctgctggccacggtctgcatctgcatgatcttctatccgatcctcttcaccatgacgggcatgatgggcgacttcctgacctatttcccgtggacgatcacgatcaacctgatggtctcgctgctgctggccgtgctggtgatcccgttcctcgaaatcctcatcatccccgccgtacagccgaaaaaagcgggcaagtcggtcacagaccgcgtacacgacctctaccgccgcgtactggcgtggacgttccgccacggctggctgacgatctcgatgggcgtcgcttcggtcatcgtatcgctgctgatcgccacgcagctcaagctgcgcatggttcccttcgccgaccgcgaccagttcgccgtggagatctacctgcgccccgacgtgccgctggagcgcaccgccgccgtagccgactcggtctaccgggtgctgcacgacgatgcgcgcgtgaaatcggtcacctcgttcgtcgggtgctcctcgccgcgcttccagatgagctacgccccgcagatggcaggcaagaactacgcacagttcatcgtcaacaccacctcggtcgacgacaccgaagatatcctcgaccagtatgccgacgcatgggccgaccgtttccccgaggcctatgtcaaattcaagcagctcgactaccagaacgtcccctcgctggagttccggttctacggcagcgacatcgactcgctgcgcaccgcgaccgacggcctgatggcccggatgcgccggatgcccgagctgcaatgggtacactccgactacgaagacccccgttcggtcatcgacgtgcggctggatcccgtcacggcaccgcagctgggcgtcacgcggacgctggccgcggtcaacctggcactggcttcgggcgacgtcccggtcggatcggtctgggagggcgattaccggctgcccgtcgtactcaagaacgacacacggcagggccagcgctcgctctccgacatcggggacacctacatctcgtcgccggtgccttcggtcagcgtgcccctgcgccagatcgccgacgtggagcccatctggagccagagcaagatcgtacaccgcaacggcatgcgctgcataaccgtcacggccgacctcaaacgcggcgccaacgccatgcggatgacttcacgcatcagcgacatcatcgaccgggagctggtgctcccggcaggcgtcaccacggaactgggcggcgcccatgaattcgactgggagaccatcccgcccatcgcatcggggctgtcgatctcgctggtgatcattttcttcttcatcctcgtcaacttccgcaagttcggcatcacgctggtggtcatggcctcgatgtcgctgtgcctgttcggcgccgtcgtcgggctgcggatcgccgacttcaccatcggcctcacgtcggtgctgggattcatcacgctgctgggcatgatcgtgcgcaacgtcatcctgatgtaccagcacgccgaggacaaacgcaaggtctgccactggtcggcacacctggcggcctacgacgccggcaagcggcgcatggtgccgatcttcctcacaaccgcgaccacggccgtaggcgtcgtgccgatgatgttcggcggcagtacgttctgggcgccggtcggcgtgacgatcttcgccggcggcatcggctcgctgatcctcgtagtcacgatcctgcccgtactctattccaaaatttacaaatgatgaaaaagaccgtcctattcctcctgctgtgcatggccgccgccccgggcctgtcccagacgctcacgctcgacgagtgccgcgccgcggccgaggagcataaccgcacgctcaaaaacagccgcctcggcctcgatgccgccttgcagacgcgccgcgaggcattcaccacctatttcccgcaggtctcggcctcgggcggcgtattccaggcccagcacgggctggtgcaggccgatttcacgatcccgcagatggggtcgctgcccctgtcgctggtaaaacgcggcatccagggttccgtcacggccgtgcagcccctgttcgcagggctgaagatcgtcagcggcaacaaactcgcccggctgggcgaagaggtcgcgcagctgcaactgcaaaagaccgcagccgaggtgcgcgaacgtaccgacacctatttctggcaggtggtatcgctcagggacaacctttcgaccatcgaagccgtggagcggcaactggcggagatacaccgccaggtcgcactctcggtcgaggcagggctcgtgaccacgaacgacctgctgcgcgtggaactgcgcaggcaggaggtagcctccgagcggctgaaggtcgaaaacgggctgaaggtgtcgaagatgctgctcgcacagcatatcggcgccgactggcatacgttcgacatcgcggccgcagccttcggcgaacctgaggccccggcagcctattacgtgccggtggacgaggcgctcgaccgccgcgcggaatacctgctctcggaaaagaacgtcgaggcgcagaaataccgcaaacgcatggaacgcggcaaacggctgccgaccgtggccgtgggcgccgggtacctctattataacgtgaccgacaaggacgtggacgacggaatggtcttcgcacaggtatccatccccatttccgactggtggggcggggctcatgccctgaaaaaggcccgcatcgacgagatgcaggccgagaacgaccggctggaagcccgcgaaatgctcgccgtggagatcgaacggacatggagcgaggtgcaggaggcccacgcacagatcctgctcatgcagcgttcggtggcatcggccaccgaaaacctgcggcagaaccgcaatttctacgacgcagggacagctaccctcacagacctgctcgacgccgagacgctctacacccagagccgcaacaacctcacctcggcctatgccgcctaccacacctcgctcgcgaaatacatgcgcgtcacggggcggtaagggtacggccggcattcgacaagtatattcggcagtctggcggatcggtcgtactgcctgatcccgggtgttttccgaggcgccgcatgagggtcgcgatattctcgcgtttgcactgggtgatgaaatcggccctgtccgccgcgagctccccgataagcgggcggataatggggtaggtgacgaacgtgaagatatcgagcgaaaggatatccagcatggggtgccgtacgtccacacgttcgatttcaccccggcccgccgcgatctacgtggtgcgggcgccttcgaaaccttttttcagcagctctcccggacaagaaaaaaacaggcacagcgtacgccccaccgcaaaaaacactatatttgcgacccggagcggcactgaggcagaccggacaaaaggtgccgaagtcgtttacccgccccaaataacttctacccatgtattgcgtccgttttaccgtcgtattcctcctgtgcctgccggccatcggctgccaaaccattcccgaagccattccacaagccgaggcgatcgtcatggagcatcccgacagcgccgtgcggctcctgcggggaatccccgcccccgcgaagaacctatcccgccgcaactatgcccgctacgcactgatcttgacccaggcgcggtggctcgcgggcgaaaacttgaccggcgacacgctttccgacgtcgcactcgcctattacagcacccacacgaaggattttgtccgtgtgcacaaggcttattactatgcggccaagatcgccgatcgccgccaccaacccgaaatcgccatgtcactgctgctgaacagccggcaggcgctgcccgcggcgggggagtggcaaaggcactatgtggtggaaacgtggctgggcgtcttctgcgacaagcaacggctctacgaggagaaggtcggccacgccatgcgggcctatgcctacgccgacagcctcgacagggacggctggcgttgcatttcgctcggcgacatcgcacatgcgtacatggggctcggcaaatacgacagcatggaatactatgcgctgaaggcgctccgcctggccgaggagaaggggatcaccgaaaatacctcccagaaatgggccatgctgatcgaaaacgccctccggcgcggggactatgccgctgccgaagagtactgggaacggggatacgaattcgcccccgaacgggcccgcttttcgtggatcaagaccaaggcagaaatatataacaagcaggggcgctacgacgtggcgctgcgtctaatcgacagttcgcggatgatgtgccccgacacatccgacctcaccgcacgggcgctgtgggcgttccacgcctcggaagcctacgagggactggggcaggcgaagaaaagcctcgaagcgctgaaatattattgcagcctcagggattcgctcgaagacaacatacacagcgccgatgtgctccacatccgcgaattgtggcagtacgagcacctcaaagcccggaacaccgccctcgaggggcagaaacagttccgcgaacgcctcgcataccggacgatgctggcctgcggcgcgatactgctgctcggggcatggctggggatgcgcatatggcaccggacaaaactgcgggaaatcgcccagcaaaaacgcctcatgaagcaggcgaacgagctcgacgaaatgcgccgcaaggaagaacagctgcgcacggctttcttccgccagctcaacagccgcttcatcgcgcaggtaaagcaggccggggagtcgaagaaatgccggatgtcggatgaagactggaagacgatctacacccacgccgacgccgtgttcgataatttcacggttcggctccgccaccggttcccgtccctgaacgaggatgacatccgctattgctgcatggtacgcatgcatttgtcgcaggccgagatcgccggcgtcgtctgcctggagaaggactcggtaaaaaaacgactgaagcgcatccgcaccgaaaaactggcctcggcaaagggcgcgacgctggaagatgtcctctccaaattgtaaaatgtccccctcttgtcccgcctctcgaacatgaaacaaaaagagaaccagcgggttgaaaaataatcccccccccgcaatatacccctatatacccattcggaacaggtgccctgcaattaactttgcaccgaatacgaccgtcatgccatgactgccgtaaaggagcgtcctgcgcttagtccgccggataacgcgaacgggcaacattcatccaaatttacaataatatgcagaaattcaactacaccccgaccaaccccttcagcgggtcgctctcatcgctggccatcggtgccggcatggtcatcgtacccctggtatatcctttcggcatccgcatcggccgcatgcccatcctgggcgccaccgccacgacggccatcttcgtggtcggcggactcgccctgctgacgttcaccgtgcgcgagatcatgcaggcacgcaagctcatcgctcagggcggagaaatcaccgtcgacggcgacctggtcacgattcccgtggtgaaaaagggcaccgtaaccaacgagtcgttcaggctcccggacgtcgagtacaccaaattcgatgcggaggaaaacgaattcaccatctcgctgccggccgcccaccatgtcatccgcggcgcattcttcgaaagctccgaggcgttcgacgccttcaagtccaccttcaaataacagaatatacaccacgaacaaacaacgttttgcaatacacgacacgtccgctaagcaaaacattttatcaattaacgttataaccgaaaagacaatgcgacacattttcaaactgctcgccgcgagcgtcgctgcggcaacgatctgctcctgttcctcgctcacaggctatccgacggatgccgaggcgagttatgccaaagccatcgaaatcgcaaaaaagagcgtcgacaccgacaagttcaaggtctattcgctttcgttcatggagggtgaacccctgtcggacaacctgttcctcatctcggtaaaactggtcaacaaggacaaccaggcattttcgcagtcctactacatgaccgggctcgaaccgaccgccctgagcgacgtacagcgcacgttcgaggcccccgaatacgaaaccaccgtcggcatcgaccttacgaagctcgacgccgcgcaaatcgccgcacagatcgcacaggccaagaccatgctccccgaagggcactcgttcaagtcggtaggaagctaccagatcgaggaggatgtcccggcaggcaactcggtattcaaccgcaacaagacattcgggaagcagcacacgtccttcgtcgtccgcttcaccgaggacggtaaggagaccgagagcagcgcgggcaaaacgtcgtatatctactacgaggccgaggtgaccgtggaacccgacggcacgctttcgatcgaagaaaattaagtttttcgcccgggagcgcggttttctcccgatttttcctaaatttacaggacagatgccccgacaaccggggatcgccataataaaactacatgaaaactactcacccattcgtcgctcctgtcctcggctcgacccagagcaaggtcaacatggaggcctacgagcaggccatagaccaatacaacgagggcaattacctcggggcgttctatcagttgctcgaccacctgaacccggaattccgcaccaagtacggcaatgccaacggcacggagttccatatcccgcacggatctatcctggtgcacatccgcatcgcggacgacaggctgcacatcagcgccgatttcctgatactccccgaaaagggacgcgtggccatgctgcgccaggtcgccgacctgaacatcaaccggctgatgctgccgcgtttccgcaaggaaggcgacaggctgatgatggaatacgcctgcccgctgtcacaaagccatccgcacaaactgtatttcatactgcgcaacatctgccacgtcggcgaccgctacgacgacgagttctgcacgaagttcggcgcccggcgcagctacgaaccgcaggtgacgccctacccggaagaggaggtgacgcgcatctacgaagccgtccggcagacatgccgcgaaacgctcgacgcggtgaaggaatacgagacggaacgcaaatacggctattcgtggaacgtgatcgacatcgcgctctacaagatcgcctacttcgcgcacccgcaggggcagttgctcaacgacctcgacaaggcggtcgacgacatggacaaggagcttcccgtggccgaactggtggccaagggcaaggcgttcctcgaacggctactcgcaatgccgcgcgaggagatggcgcgtgacctttacctggtcgacacgctggtttcgaccaagcgccgctcctcgctcaacaacgtgcaggagaacttcaaggaggtgtaccaggaggctaccgaagccatcgaatcggagaatttcgagcgcagcaccgtccgcatcctctacaagttctacgaaatgtattactacaacgacgtgcaggacgacctgaacgccgtcgtggcgggggcgctcggcaagtcggccgggaaaacgatggaggaagcttcggagatcctgtacgaagcactcgaaaaaatcatggaggacgacctctcggcggacgacggggatttcgacgccggggagctgggcatcgccggtgcggccgccgcggagcaggtgcagcaaatggccgccgccatgcagggcgaggtcgtgcagatgcaggccgcgatgcaggaggcgctggccaaaggcgacatggccgaatacatgcggctggcgcaggaattccagcaaaaaatgatggaacaagccctcgggcaacaaaaataaccgctctaaacccgtatatcctatggaacagaacaatatttacaagtcggtattcaaagtaacccattcgggcggctcgggcagttgtttctacctcaaggcctatgaccttttcgtgacgaactaccacgtgaccgagggcttccgcaccgtcgccattcacgacaacgagcgcaacccgtacctggccaaggtcgtgctggcgaacccggcgatggacatcgccctgctggcggccgaaggggatttctcctcgctgccggacatttcgctcgccgaggacgacacgctgacgatcggccgcaaggtctacgtcgcagggtatccctacggcatgcccttcacgatcaccgaaggttcggtgtcgtcgcccaagcagctgatggacggcaaatactacatccagaccgacgccgcggtgaacccgggcaactcgggcggcccgatcctcgacgaagacaaccgggtggtgggcgtcacggtgagcaagttcacgcaggccgacaacatgggcttcggcatccgggtcgagacgctgcacgcgttgctggacacgatcggcgaccttgaccgcacggtgttccaggtgcagtgcggtagctgcgaggagctgatcgcccaagaggaggagtactgcccgtcgtgcggcgacaagctgcccgaaggcgtcttcgaagaacgcgaacagtcgcccctgggcgggttcgtcgaatcggccatcgaacagatgggggtcaacccggtgctggcacgcgacggctacgactcgtggcttttccacaagggcagctcggagatacgcatcttcgtctacgacaacagctacctgttctccacctcgccgatcaacctgctacccaaaaaggaggtggagccggtgctggactacatgctgagcgaggatttcggcccctataaactggggatcgaaggccgccaaatctacatcgcataccgcatccatctctccgacatcaccgacgaatcggaggaggagatccggaagaacatcgtcgacctggctttccgggccgacgccatggacaacatgctggtggaacgcttcgggtgcgaattctcggagtattcgaaggcggacgcgcagtaggcaccacccgccaagacaaggcgatgccgggcttcctgtgaagcccggcatcgtttattccggcattgcacaaaccggcgctacgggttccggaagggcacaggatcagtaagcggcatcacgacggccgggaacgggcaccgtgcgggcaaaactacgcgaccaggacgccatcgggcagcatgcggccgataccccgcagtacaacactatacggacaggccgccggctatcgggacgaaccccgccaaagctggagtggcggctaccggaaaagctccttcagctccagccagaagtccatcgggcgttcgcccctgtccgggcaacaggcgccgatggccgtggaaagccacgcgtaattcttcaggtaacacgaagagaggcgcacctcgcggcgcccgcctttcagcaggtaacggtattcgtacacttcgccccggctgacaaggacggatgtggtgacaccgtcgaagtcgtgcatatcgtacctgcgggtcatgcccagacccatataaggtgtaacgcagagcgtcccggcatcgaggcacaacctcacggccgagcgccgcaactccccgaacaccagccagcaggagccgaaaagcatcacagcggcagccaggtacaacgcgaatggttttgcccccggggcgaacaggaggcacaggaacacggcgctgaacccgacgaagagcagggcaagggcgaggagcatatacccacgccatgaaaaccgcgacacgacggcattcctgccggccgcgaccgtatggtcgcgtacgaacaccgcgccccagcgcgccagcagcgcacccaccggcacatagagccaccaccgcccgaatgacacggcggccgaagcgggttttacggtgacgacataaggttccgcggcgaactcccggccgccgaacgacaaccgcgggacacaggaatacgtgccggggccgtcaccggcgacccgataatggtaaacgaactcttcgaggccgtttttctcggaataaccggacatcagcggcgccacgtcctcaccgttcacggccagcagcggctccctgcggtcgggccggcggtcgcacgtaaggcgcaggatatgcccgcccatccgccgcgagacgaccgagtcgtatacgatccggcattgcggctgcacggacaccagcgcggggagtatcttaacgcgcaagccgtcgcagcggcacgtctgcccgccgacaaccgccgtcgttccgggaataaccagctctccgccgaccgcagaacggacgaggtaacggtatgcatgggtttcagaacgggtcatgacgccgtcgcgtaccgaagtctgcgtgccgctcgtccgtccaagttctctgaccagggtcagggcgccccagcagggcatttctatcgactcgatctccccgccggccgtataccgcacctcgaattcctggagtgccctcggttgcgaaggcacggtttcgattccgagctcctgggcatgtgcaggggcggcggcaaacaggagggccatgaggaggggcagtgcgaagcccgggcggcaaaggtttttttccatgggtcaggcaagttttgcggatcggcttcaaaggtacgaaaaatccctcgtccggcgcaattcggagccggttaattcattgccggaggctttgctgcgggattcccggcagaagcgggcgcgcggcattcggcaggcaaaccggatacacgacgtccgcaagcggcattccgcaacgacacggcgcgcgcaggaggagagcagccgaaaaaagaaccccgcaggccggaacgggctgcggggccggaaggcctataagctatcctgtttgagatgttcggcgaaccggtcgatgcggtgcagttcctgcgggatacggatattctgcgggcaatgcggcacgcactggttacagccgatacagtggctggcctggcggagtttcgggacgctgcggtcgtagcccaccaaaaacgcccggcgcgcccggcggtaattttcgtcctgcgacgaggtggcgacattcccttcgttgacacacttgttatagtgcagcaggatggccgggatgtccagcccgtagggacacggcatgcaatacttgcagtcgttgcaggggatcgtggggtagcggagcatcagctgcgccgtctgttccagaaactctttgtcgtcatcggtcagctcgtcgagcggcgagtaggtgcgcaggttgtcctgcaaatgctccatgtaggtcatgccgctcagcacggtcagcaccccggggaacgaccccgcgaaacggaacgcccacgaagcgacgctcgacgacgggcgccgctgtttgagatgggcggcgatgtggtcgtggacattcgaaaggcgcccgcccagcagcggctccatgatgacggccgggataccgcgcttctccagttcgccgtacaggtactcggcatcggtattgcgcgtgttgacctccttggcgtgtttccagtccacgtaattgagctgtatctgcacaaagtcccacttatagcggtcgtgctgcgcaagcaggtggtcgaacaccgcgatgtccccgtggtaggagaacccgaggttgcggatacggccggcctcacgctcggcaagcaggaaatccagcatcccgttgtcgatgtagcgggcttcgaactcctccatgccgctgcccatgcccacgccgtgcagcagcaggtagtcgatataatcgacctgcagctcccggaacgaattgcggtacatggccatcgaagcttcgcggctccaggtcgagggcgcgaaattggacaatttggtggcaatgaaatacttgtcgcggggatggcggctcagcgccacgcccgtggcatgttcggaatgcccccggcaataggcgggcgaagtgtcgaaatagttcaccccgtgggcaatggcatggtcgaccagcgcgttgaccatctcctggtcgatgtcgtcgctgccactgacggtcggccaacgcatacagccgtatcccagcagcgacacccggtctcccgtcttggggttggtacggtaagtcatctgcccctgccgtgcgccgtctgcctcagaggcgcttcccgcagagcggggcttgcagccatacaacgccgccgtcgttacggcggcaccggtacctgcgactttcaggaactcccggcggcctatctttttcttctctttcatacgtttgaaggattaaacggtacggtgattctggtgcccttcgacataaatggcgctgaacggacggctcggacagaggttctcgcaggcgccgcagccgatgcagcgggcctcattcacgaccggaatacgcagggagtcgggcttccccggctccttatgcaccatctggatagccccggcggggcagtggcgggcgcagttgccgcactccacgccgtcggtattgacgacgcagttggcggcgatccatacggcgtggccgatctgcaccgatgacttgtcctccttcgtgatccggcgtatggcccccgtgggacagacctccgaacacttcgtacattcggggcggcagtaaccccgttcgtaggacatctcgggtaccatcagcgacatcagcttgcccgacggtctcagcacctggttgggacacacggccacgcacagctggcatccggtacagtgcgcctccatattacgcatggagagcgatccgggcggggtaatgggcgtcgtacgccgggggattttcttctgctcgatcacggccaggccgccgtcgaccttcttctcctgcgccctgaccgtcgcacaggccatgaccccgaccagcgaaaggaacttgcggcgcgaagcatcggccggttcccccgccgcaacggccgccttcacgatcgcaggttccacggcatcgggtttgcggccggcagcgggtttgcgcgaaaaggagatcgctccctggcggcatttccccagacagtccatgcaggccacgcaacggctgtaatcgatccggtgccccttcgcgtcgatgcacgacgccttgcagttgcgggcacaaaggccgcagccgttgcatttcgaggcgtcgatacgcggcttgaaaaccgcgaagcgcgacacgagccccaggatcgtgccgacaggacagaccgtattgcagtaggttcggccgttgcgccatgccagcacggccagcacgatgaacgtcacggccgccacagccagcgtcgcggcgcccttgacccagacatcgaccgtgtagaacgcatagctgccggcccgctcggccagataggccagcaggttgttgccccacaggtaaaggggcgcaaaaaggttggacacgatacgcccgtaggcgctgtacggcgccaacaggttcgacacgggcttgaaatgggcgaccatcgccacgaggaacagcaccagtacgccgtagcgcagccacgacagcgcccgcgagtagcggaagcggttcttccgccgccgggcggccgcctgcgacacgacatcctgaaagacgcccagcgggcagatgaccgaacagtagacccgtccgaaaagcagggtcagcagcacaagtgctgcgaccacgcccgcattgacggccaggacggcgggcagcagctgcaccttcgccatccagccgaaccacgcatggagcgttcccgtgaaatcgagcaacagcagcgtgatcaccgtgaagaaaacggcagcagccgtgattctgattttgcgtaacatccgttttcgtttattttgacaaattcattccaccgatccatttaccgacggcatcccgcgagcccttcacggcactgccgcgcaccggtagcccgcccagcagggtagccccgggacagagcttttcgatgtcgtcctcgctgcggcccatgcggctgcccccgtgcgtcatgaacggcgcaacggtctttcccgaccagtcgtacgcggcaaggaacgtcgccacgggcggcgcgacggtgccccaccaacagggcgagccgacgaaaaccacgtcgtatgcgccgatgtcgggcaggcgccccttcagcgcgggccggtatccccggccgatctcgcgcttggcctgggccgtaacggcatcgtattgcgcagggtaggcgctctgagggacgatctcgaaaagatccccgttcgtagcctcggcaatctgccgcgccatttcgcgcgtgttgccgctatgtgagaaataggcgacgagcacctttttgccggaggccgtctgggcctgcatgtccatggccgggaataaaaccgcgacggccgctattaaaaccgataatctcataatccgtaattttcaatccgtttatacgccgcgccccatggcataggcctcgtccatcgcgggcatcccctcgatgtcgccggcacgccatgccccgaccccgtagaccacgcctttctcgcgggggtcttcgaggcagtcgagcaggccgcggaaacactccaccgtgcgttccatcatcgggacgctctcttcggcggccgtcaggatgaaataaaactccttacccttcatctccaggtagcgggcgcagcagcggtcgatcagggtcttcatctgtgcgctgagcgtatagaaatagaccggcgtagccatcacgatcacgtccgcttcgaccatcttgccgatcaccccggccgcatcgtctttctgcgggcagggcccggcaccgccgtagcaggcaccgcaacccgtacaatagccgatcctgcggtctttcaggaaaatcttttcgacctcgtgtccggcctgctgcgcacccgccatgaaacggtcgcagagccggtcggaatttcccccgcgccgcgggctggaggagagtatcaatacttttttcgccataatcttcatcttcgtttattctctcccgggcgccgcttcattcaggcaggcgatcgcgttgagcgaccgcggatagcccacgtagggcagcagttgcgtgatgacggtcagcagcgtccgtttgtcgttgcccaggttcaggttgccgcggatatgtcccttgagctgcggttcgcagccgcccagcgtaagcagcatcgaaaacgtcagcagctcgcgcgtccgggcatccaacccgccgcgggtgacgtaatcaccgaaacaattcatcgacaggtaatcctgtatgtgtttctggccttcgggggccgcttcgcgcatggcgtcgatatgtccttcgccaaaaatggccttctggacggccagtcccctttcgaaccgcgtccccggcgaggtcgtcgactgtccttcgagcggaagcgccacgccgcgcgtcaccagcacatcgttggcgatatgtacgaaatcgagcaccttggccatccccacgtacggcaccgcctggtagaggacttccttcgcctcgacgggcgtcacgccggcgttgagcgcccctgcgagcatcgtccggaactcggcctgcccctgcgcagcgatacacgatgcgaggatgcacatcatccgcgtaggggtatcgaggtcgccgtaaccggcgacttcgccgaatgcaaagttatcaaaaatttcgattaattcgggatccgtcgcccccagtcccgaggcatcgcccgagaaaagttccgcacggttgcggagcgcctcggcgcccagctgcggaacgacggcagccgcaggggcggtcgccgcggcatactgcgcgtcgtcgaccggctccagccacgtattgcggttcgtctgcgggttggtctcgacggccaggtgcgaaaaccagctgtcgggggccgcgccgtgccagtgcaccacgccggggccgatctcgaccacgtcgcccggcagcaattcccgcgcaggttcgcccttcgcctgataatacccccggccgctcacggcgacgagcagctgcccgcccgtgtggctgtgccagttgttccggcaacccggctcgaacgtgacgttcgaaacggggcagttcagggcctcgtcacgcgtcagccgcgcaagataggcctgcccggtaaaatacttcgcaaacatttccggcagcttctccccccggggaaaaaccgatccgtatattctctccttcgtttccatgttacccgtatcgttggtttgtgcgtaaatctccgccgtcagcgtcagcgccagcgccgcgacaaacgccgcaagaattccttttttcatccgtccgctatttatcgaggtcatacttcatagtcccgagccattcgaccgtctgcggatcgcggtgcgagaggaaacagctctgcttcatgtcgagcgcggcgatccgtaccatatcctccggcgccccgcgcagggatgccgctccggcggacggcccgccccacggcgcgttcgttcatataggcggcggccgtgtcgatcgaccggtaaccggccgccagggcatcagacacgcaccgttcgcaaatcgccccgtccacctggtagacgccgaaccccagcaccggcatctccacaccattgtttaaaatcttcgtttccatagttttatcgccttaacaaattattatgttgcaaaagtagggtattccgcactgcccgtcattacccggattacagttcgtcataccattattaccgatccgccgcagcaggtgcggcaagcgaagaaaaaaacactaactttgtgtcaaacaaaccggaacaactatggaagagatcgcaaggctggatcatgtgtaccagtataacgaactgatgggaatcgaaaccctgcatccgctggtcagcgtcatcgacatgtcgaaatgcccgcgcatgcgtcactcgcgccgcctgtacgggttctactgcatcttcctgaaagatgtcaaatgcggcgacctgcgttacgggcgcaactactacgactaccaggaagggacgctcgttttcacggccccgggacaggtggtcggcgtcgaggacaacggcgaggttttccagcccaaaggctgggcgctgctgttccaccccgacctgatccgcggcacgtcgctcgggcgcaacatcgaccgctacaccttcttctcctacgaatcctacgaagcgctgcacctctcggaacaggagcggcacgtagtgatcgactgcctgcaaaacatcgcgggcgaattgcagcacgccatcgacaagcacagccggacgctgatcgtctcgaacatcgaactgctgctcaattacagcgtgcgcttctacgagaggcagttcaccacgcgcagcgacgtcaacaaagacgccctgtcgggattcgaacggctgctcagcgactatttccgggacgacgccccgcagcgcgacggggtgccttcggtacgctggtgcgccgagcagctgcacctttcggccaactatttcggcgacctggtgaaaaaggagaccgggaaatcggcgcaggaatacatccaactgaaagtcatcgacatcgccaaggaacgcatgttcgacacgaccaagtcgatcagcgaaatcgcctacgagctcgggttcaggtatccgcaacacttcacgcgcctgttcaagaagtgcgtggggcagtcgcccaacgaataccggacacaaaactgacccggcggcacggccggcaaaaggaggcggacgggaaaaacggagagaaccggagagaacggcggactaaacggtaaaaacaggccggcacaaacagctcgccaggtacgatcagcccggataaaacgcagtttctgccccggacaaaacacaggcttccgcatcgcgtacgaaaatccccgcacacttttctagtgtgcggggatttcaaatacggggtacttcgcggcatatccggccaaccggttccctgccccggccagtcccgaactacaccggacgccagccagccggcagcaattcccacagcggtacccgtgcggcatcgtgcgacaggcgcgctacgcctcagcctttcctgccctgatcggcaacggcggccatcagccgggctatctcatcggggtcgcccaggaaacgatcccccgcgtagttgaggccctcgtcgaactcgaagacataaggcacggcggtcgggaggttgaactccgaaatcgcctcgtccgaaatgcctttcaggtgcttgatgatgccgcgcaggctgttgccgtgggcgacgaccaggatggcgtcgtggtgcgccagcgcaggcaggatctcgcatttccaatagggcataatacgcgcgacggtgtcgctgagcgattcggtgcggggcagttccgcctcggggacatcgcggtagcgggggtcgaaacgcgggttgcgcgggtcttcctcgcccaacggcgccggggcgacgtcgtaactgcggcgccagatgtgcacctgttcgtcgccgtacttttcggcggtctcccgtttgttgagcccctgcaacatcccgtaatgcttttcattgagccgccagctcttcgagaccgggatccagtcctgatccagtttgtcgagcaccacgtcgagcgtcttgacagcacgtttcaggtaggaggtataggcatgcccgaacaggaaaccctccttgcggagcagctccccggccctggccgcttcggcaacgcctttctcgctcagatcgacatccgtccatcccgtaaaacggttttcccggttccatgtgctctcgccgtggcggagcaaaaccacttttttcatcctatcgctttttcaggttcggcacgcacctcgttcaccaatttgcggtgcttgtcgaaatcgttaatattctgcaatgtagtatgcgctatattatccaacgcttcacgtgtgaaaaaaccctggtgcgaggtcatgatgacgttgttgaacgacagcaggcgtgccaggatatcgtcgtccatgatccggtcggaggtatcctcgtagaaataggcagcctcctcctcgtaaacgtccagcccggccgccccgatcttcttctccttcagcccctcgatcagcgcctcggtatggatcagctggccgcgccccgtattgatcaggatcacgccgggtttcatcttgccgatggcatcgccgttgatcatatagcgcgtctggtcggtcagcgggcagtgcagcgaaatgatgtccgcacggcggtaaagctcgtcgagcgtcacgtattcgacctgcgcctgcgcggcgtattccgcatcggggaagatgtcgtaagccagcaccttcatgccgaaccccttgagtatccggatcagctcgcgggcgatcttgccggtaccgacgatgcccgccgtcttgccgtacatgtcgaaccccatcaggccgtgcagcgagaaattcccgtcgcgcgtgcgccagtaggcacggtggactttgcggttgagcgccagcatcagcgccacggcatgttccgcgacggcatggggcgaataggccggaacgcgcacgacggggatgccgtattcggccgcggccttcaggtctacgttgttgaagccggcgcaacgcagtgcgatcagcttcacccccatcgcggccagctgacgtatcgtgccggcgtcggccgtgtcgttgacgaagatgcagaccgcgtcggcgccctgcgccagcagggcgttgttgccgttcaggtggctgcggtggtaattgaactcgaacccgcaggacgcattggcgcggtcgaacgactcgcggtcgtagggttgggttccgaagaatgttattttcataaatgcactttttttcctcttttatcgtacagaaaacggttttgcacggccggttattatgcgatcgtgacctcggggtcgagatatacgtcctggatggcgttgagcagcgccacgccctccttcatcgggcgctggaacgccttgcggccgctgataagccccatgccgccggcccgcttgttgacgacggccgtcatcacggcctcctgcaaatcggatgccccgtgcgactcgccacccgaattgatcagcccgacgcgccccatgtaaccgttggccacctggtagcggcaaaggtcgatcggatgctcggtcgtcagcttggtgtaaacctcgtcgcgcgtcttgccgaagccgacggcgcggaacccgccgttgttctcgggcagcttctgcttcacgatgtcggccttgatcgtcacgcccaggtggttcgcctgccccgtcaggtcggccgaagcatggtaatccaccccgtccttcctgaaaccttcgttgcgcaggtagcaccacagaatcgtagccatgcccagctcgtgcgcatagtcgaacgcctgggctatctccacgagctggcggcggctctcctccgacccgaaatagatcgtagcccccacagcggcggcgcccatgttccaggcatcgcgcacggtgccgaacatcacctggtcataggtgttggggtaggtgagcagctcattgtggttgagcttgacgatgaacggtatcttgtgtgcatatctgcgtgccacggcgcccagcacgccgaaggtcgaagccacggcgttacagccgccctcgatggccagcctgacgatattatccgggtcgaaataggccgggttcggggcgaacgacgccccggcggagtgttcgatgccctgatctacgggcaggatcgagacatagcccgtaccggccaggcgcccgtgggcgaggatccattgcaggctgccgagcgtccggatgttacggtcggattcgatccagaccttgtcgaccgtatcgggtgcgggcaggtaaagcaggcgcttgtcgatcgtccggcagacatgggaaaggtagtattcggcctttcccccgagaatttcaatggttttcataattttgcgatattaagcgattcgaagctccttactgcaattcgggttccaaacacgccggcgccccgcgacaaaacgaaagccgcccggcggggcggcttatttcttggaattgcggtactcggtgggagattcacccgtatgtttcttgaaataacgccccaggtaggactggtcggggaaatgcaggcggtaggcgatctcctgcaccgacaagtcggtcgattgcaggagcatcttgatctccagcaagaccgaccggtcgataaactccttggcggtgctgtgcgcgatcgtgcgcacgatggtcgagaggtaacgggtggaaatgcagagtttgtcggcataaaacgacacttcgcgctcctgcgaaccgaactcgtgcacgaaggccacgaacctgtggaacagttcggtctgccgcgtggtcgattcgggcacctggcgctgcatgcccacaaaacgctgcaacttgtcgtaaatctccatcagcacattctgcaaacggttgcggatgatcgtgttgcggaaaatattattccggtcgcggtaggtataagccgccatctgaaaccagatggcagccccctcgacgatacgcgccgggggataggcgatcggattctcgcgcagggtgcggaaaaaggagggctcgagccggagccgaaacgccgcctcggaaaaaatatcgtgcgaaaaggcgcagaacgtcatccggaagtcatcggttcgctccgtgagcatcagcatcgaaccgggcagtacgagcaccagggtattccgtttcacaagacctccgtattggtttacagtcacatgggcgctgcctttgcggcaaaacagaatggcccctccctcacagcggttcgcataattgttgaaataggaaaaatcggattccccgactacgaattgctcttcggcagtagtaattataggatttatggcagacatatgaattcgtttttcgaacaaatttagcgcattttccgatattttcccaaattttgttccgaaaaataccaacactgttcgcaatataaaggcacgatcacgccctttttagggtacttttgcaacgaaaaaagtttttttagtttaaaacaggagaaaagtatgaagcaaacatttgtgaaagctgctatcatggcaagcttcatggcagccgtttcgtgcggtcaggcacccacggagcaaggccccgcgcaatacggcgtgacgaccattgccactaccgaccgcgaaatccagagcaactactcggcaacgatccgcggacgccaggacatcgacatctatccgcaggtttcgggaaccatctccgaactgcgtgtcaccgagggccagtcggtttcgaaaggacagacccttttcatcatagaccaggtaccttacaaggcagcgctccagacagcagaagccaatgtcgcagcggcaaaggccagcgtggcaacggcccagctgacatatgacagcaagaaggaactcttcgcaaagagcgtcgtgtcgcagtacgacctctcgacagccgaaaacacgctgctgacggcaaaggcgcagctcgcacaggccgaggcacagcgcgtaaatgccgccaataacctctcctacacggtcgtgaaggccccggccaacggcatggtaggtacgctgccgtaccgtgtcggcgcactggtgagcgcgtcgatgccgcagccgcttacgaccgtttcggacaattcggagatgtacgtctatttctcgatgaccgaaaaccagctgctcaatctgacccgtaaatacggctcgatcgccaacacgctcaagaacatgcccgacatacagttgcagctcaacgacggttcgatttacgaccagacaggccgcatcgagtcgatcagcggtattatcgacacctcgacgggcagcgtgcagctgcgcgcggcattccccaacaagggaggcctgctccacagcggcggcgcaggaagcattatcctgcccgtcaattacacggattgcatcgtggttccccaggtagcgacgttcgaactgcaggacaaagtatatgtatataaagtggtagacggcaaggctacctcgtccatgatcgacgtggagaaaatcaacaacggacgggaatatatcgtcaagtcgggcctcgtcccgggagacgtcatcgtagccgagggcgtcggcctgctgcgcgagggtacgcccatcgtagccaagacgcagggcgccgcagcgcaggccacaccggcagccgcagcccaaacccaaaccgaaaaggaggaataacctatgacactgaaacattttatcgaacgacccgtactggcgtcggtcatatccatcgtaatcgtaatcggcggtctgatcggtctggcgacactgcccgtggagcagtatcccgacattgcgcccccgacggtgatggtgcgcgcctcgtatccgggcgccagcgccgagacaatccagaaatcggtcatcgtaccgctcgagcaggctgtcaacggtgtggaagacatgacctacatgacctccagcgccgctgtcggaagtgcctcggtgacgatttacttccgccagggaatcaatgccgacatggctgccgtcaacgtgcagaaccgcgtttcgcgggccaccggccagttgccttccgaagtcacacaaattggcgtgacgaccatgaaacggcaaacctcgatgatcaagatcttttcgctgtacagtcccgacgacacctacgatgaaacgttcctgtcgaactacctgaagatcaacatcgagccccgcatcctccgtatcgcaggcgtcggcgaggccttcacgctcggtgccgactattcgatgcgtatttggctcaagcccgatgtaatggcccagcacaagctcatcccgtcggacgtaacagcggcactcgccgaacaaaacatcgaatcggcgaccggtacgctgggtgagaactcggacaatacattccagtatacgatgaaataccgcggacgtctgatgaccccggaagaattcggggagatcgtgctcgtggccaagcccgacggcacgcttctgcgcctgaaggatgtcgcggacatcgagctgggaagcgaatcctacgcttacaaaggctacaccaacggtcatcctggcgtcagcacaatggtcttccagaccgccggttcgaacgccacgcaggtcgtaaacgaaatcgacgccctactggccgaaatcgaagccgaactgcctaagggcgtttccatcgcccacctgcagagtgtgaacgactttctcttcgcctcgatcaacgaggtaatcaaaacgctgattgaggccattctgcttgtgatcctcgtggtgtacgtcttcctgcaggatatccgctcaacgctcattccctccgtttcgatcatcgtatcgctggtcggtacgttcgccttcctctcggtagcgggcttctcgatcaacctgctgacgctcttcgcgctcgtccttgcgatcggtacggtcgtcgacgacgccattatcgtggtggaggctgtccaggcgcgtttcgacgtgggatataagtcctcctatatggctaccatcgacgctatgtcgggtattacctcggccatcatcacctcaacgctggtcttcatggccgtgttcatccccgtatcgatgatgggcggcacgtcgggtgtattctacacgcaattcggtatcacgatggccgtggccgtgggtatctcggcgttgaacgccctgacgctctcgcccgcactatgcgccctcatcctgaaaccttacctcgacgaaaacggagagatgcgcgacaactttgcggcccgcttccgcaaggcattcaactcgggattcagcaccctgatcaataaatacaagcacggcgtgctgctcttcatcaagcacaaatggctgatgtggtcgacgctcggcctggcattcgccgcactcgtcctgctgatgaacaacaccaagacgggtctggtgcccgacgaagaccagggtacgatcatggtgaacgtcaccacggcaccgggtacttcgctcgccgaaacgcatatgatcatggagcaggttgcggatcggatccaggcaatcccccaaatcagagacttcatgcaggtggcaggctacggcatgatcgccggccagggttcctcctacggtatgtgtatcatcaagctcaaggactgggaagagcgaccggacaaggcggatgcggtgaacgccgtaatcggccagatatacggacgcacatccgacatcaaggatgcacagattttcgccgtggcaccgccgatgatctcgggttacggtacctcgaccggtttctccatgcacctgcaggacaagacggacggcagcctgacggacttctacaacatctacctgcagttcatcggggcgctgaaccagcgcccggagatcgaacgcgcctactcgaccttcaacatcaacttcccgcagtacatcgtgagcatcgacgcggcaaaggccaaacgggccggcatctcgcccaacgcgatcctttcgacgctttcgggttactacggcgggcagtacgtctcgaacgtcaaccggttctcgaagatgtactacgtgacgatccagtccgacccgaaataccgtctcgacaccgaatcgctcaacaacgtcttcgtacgctccaacaacggcgagatggctcccctgggacagtttgtgaatctggaaagggtttacagctccgaggtgctgaaccgcttcaacatgtacagttcgatcgccgtgaacggcacggcggccgccgggtattcgtcgggcgatgccatcaaggccatccaggagacggccgcccaggtactgccgaagggctacggctacgatttcgacggtatcacccgcgaggaagcgcagacggggagcaacacgacgatcatcttcgggatctgtatcctgctgatttacctcatcctgagtgccctgtacgaaagcttcctgcttccgttcgccgtcattctctccgtaccatgcggcctgttgggctcgttcctcttcgccaagatgatgggactggagaacaacatctacctgcaaacgggtatcatcatgctgatcggcctgctctcgaagaccgccatcctgattacggagtacgcctccgaccggcgccgtgcgggtatgaccctgacacaggccgccgtatcggctgccaaagtccgtctgcgcccgatcctgatgaccgtcctcacctgcgtattcggtatgatcccgctggtgctctcgcacggtgtgggcgccaacggtaacatgaccctcggttcgggcgtcgtgggcggtatgatcgtcgggacactggccctgctgttcctcgtaccgacgctgttcatcgccttccagaccctgcaggagaaagtcaagcccatagagttcgaccccgatccgcagtgggccgtacaggcggaactggaggagtgtaaaaacgagaaagaggagtaacaagatgaaaaagcttattatcatactggccgcagcggccatgaccggctgcggcatctacaagccctacacccgtcccgaggtgaaaaccgacgggctgtacggcacggccgagaccgccgacacgacgacgatcggcaacatgggctgggaagagatgttcaccgacccctacctgcggacactcattcgccaggggttggagaacaataccgacctgcaatcggcgcaatggaggatcaaggaagccgaggcgacgcttaaatcggcgcgcctggcttacctgccgtcgttcaatttcgcaccgcagggcagcatgagcagtttcgactgggccacgccgggcaaaacgtacagtatcccggtcacggcaagctggcagatcgacatcttcaacggcctgaccaacgccaaacgcaagtccaaggcgctttacctccagagcaaggagtacgagcaggccgtgaaaacgcagttgatctcgggcattgcaaacctctactacacgttgctgatgctcgacggacaatacgaggttaccgagcaaaccgccgagaaatggcgcgagagcgtccgcacgatgcgtgcactgaaagaggccggcttggccaacgaagccgccgtagcgcagtacgaaggcaactgcctcgccatcgaggcttcgctgcacgacctcgaataccagatccgccaggccgagaacagcctttgctcgatgctggccgaaggcccgcaccccatcgagcgcggccgcctcgaaagccagcagctgcccgacgacctgactgtcggcataccggtgcagatgctttcgaaccgccccgacatccgcagcgccgaatactcgctgatgcagtcctattatgccaccagcgaggcacgctcggccctctatccttcgatcacgctgagcgggactctgggatggacgaacaacagcggggcccggatcgtcgaccccggaaaattcctctggtcggccgccgcttcgctgctgcaacccatcttcaatgccaacgccaaccgcgcccgcgtgaaaatcgccaaggcacagcaggaagaaaccaagctggcattccagcaggccctgctcaacgcgggcgccgaggtcaacaacgccctcacgcagtgccagtcggcccgcgcgaaaaccggcctgcggacacagcagattgaagcgttggagcgcgccgtagagagcacggaactgctcatgcaacacggcagcacgacctacctcgaagtactgaccgcccagcagtcgctgctttctgctcagctgaaccagattgcggatcgttttgacgagatccagggtatcgtgaacctctaccaggctctgggtggcggacgcgacatcgcagcggaggcgaaataatgaaaaggggagcgaccaaagaggagatcatccgcatcacgcaggagctcatcacccggaacggcatccgtgccgtccgggtggatgagatcgcgcagacgctgggaatctcgaagcgcaccctctatgaaatgttcgctgacaaggaagacctggtgagcgcctgcctcgatttcatgtgccaccaacagcaggagcgcatcacggcttacaggaaacgccgcagcaggagttcgctgcaacgggctttcaagctggtatatgaatacatcgaacacttgtacacggtcgaaagcagttttctgtccgacctgcgccacaaggtggcctacgcggaacatttcgacgaacaccgggaattctggcgcagcgaactgaccgcccacctgcgcggaagccgcgaagaaaagctcctgttgcccgaaatagatgccgatagtttcgccgaccggattttggaaacgatcttcgaaatgcggataaacaatgcgacgcgcgaggagtcctacctcttttgcaggacgatcctgcgcggtgcggcaacccgcgaaggggtcgagcgaatcgacagccacagataattattctgtaatacaatgaaaatccccgcaggagagagccctgcggggattttttctgtcataatggcgggcggcaggcaaaacccagaacgagaatacgattggaatacgggaaaggcaagaggggagggacgcaaatcccgccgtcgggcatccgcacaaaaagggccgcacttgcgaagtatggcccttttcaaccatcatatttaacctctgactaatagagcagggtttcgtcggcttcgtcccgataccattccacatgttcccggccgcccgatgcagcccatgcgttgaaatatgtatagacatcccggatatcgctgcgttcgagcggatagcggaactcgcccgggatacacagcgcccacatcatgtagttgttcttcacaccgtcgcccttggtgacgaaatagcggtagggatccgactccaagaaggtgttgcccgatacgaccgcgaattgcgtcggcttgcgcctcggtatgtggatctccttctcgcgggtgaacgagcccgaactcttctggttcacaacgatgaacgcattgagcgccgattcgcggacggctgcggggtcgaccggctgcgcaaaggtcaccgtcgtcgtgtgtttcacggtcggtatggccacgcccttggtcgtattgatgtaagtcccttcgcccaggatctcctgcgaagtgttgaaaagcgggatcacggccagttcgctgcccgattccgggccggagcccgcaaacgcaccgcggccgaaggtcgtattggtggtctccacgccggcgacctccgaggtacgaaccttgtccaactggatggcaaaagcattcagatgcgcggcccctgcggccttcagttcccagttgatgcggatcaggtcgaccttcccggtctccttgtcgctgcggcggtcgacgcttacgaccaccacgacatcgttcatgtcgtagtcgccgatccacggccagccatcctcgaagcagtaggtataaggggcacccttgacctcgatatattcgggttcgggttccggatcgggagtaacgggctgcctgccgccgttgcagatggcctcggggatcacgaccgtttgcttggcacgcatcacggcgccaccggtaaggctacgctcgtcgataacgtatttcgaatcggccgcattgtcgtacacgacttccatcagcccatcgaacttcgtcccgtaatagcgtgagctcacgcctttctcgcggatcacgaccacggccatgagctggtcggcggcagcctggctcacgatacggacattgccgcccgacttaccggcattatactcgtccatggcgaagatcgagccggcagcggcgtacaactccgtattgctgttgaaatagacctcctcggcatcgagccccgcgccggatgcaatatagaatcgggcaccttcggcggcaatttcctcggctacggtatggcaattcacatagagtgtccccccgccgcgggcttcgagtttctccatcgaggccaaacctttctggtaaacaaccgagttgttggtcaaatagaaagtcccgtcaacatcaacgacaccattctcgcagttagacagttcggcgtaggagttgagctccaaatcatcgctctctatcttgccgtcgttataaagtttcgcccggttggtgatttccatgtcatcggcctccaattctgcggcagcaccgttgtagaacgcacaggaattattgatgtcgaacgtcccgtcgacgatgaatttcccttcgttgaccacggccttgcaggaaaagttcgttttcccggccgtgaacttaccgccttcgaaaacgaaaatcgcggggttgggtgcgttctactgcatgttcgcacttgcttcacggatgtacacctcgccgcccggaagcactgcgagcgtcgcctggccgatcgtaacggaggcatcgagcgtcagtttgcccgccacgtagaggatcggcgaggggttggggctaaaggttccgttcaggccgatattgcccgtaacctcggctcctgccgggatataatactccgcagcggcaaaaggagcccagctcgcacccaggtcgatcttgccggcaggcgtactccggatgatggccccctcggcgaaatcaccctcggccttcgccgcgagccgcgggtagtcgggcatcgaactgtcggccgcggcgcgcgccatcccggccatccggagtaagggcgtcccggctgcggccttcatccgcgcaccggcgacgttcaccgacgctgcgaccggttccatggagacggccaccgtaccgtcgggcagggtagtctggacataaatgttcccgatcccggccgggatcgtcaccgcggttccgagcacggggcgggatggcgtcaccacacccatcgccacgatattgccgtccgagaggatcggggagcaatacacgcggataacggcatattggggcgtattgcccgtaacactcggcataccgaccgaaatatccaggtcgcgggtcgtttcccatttgaagtcggcgggaactgcagacgagggctcctgcggttcgccgctgccggtgcccatgtttttctggcacgaaaaggccaaaaacgtcgttgcaataactgcaacagcgtaaagtcgtttcataaattgatatttttaatctatcccttgtgcatagtgcacattcttcgacacaaatataaacattaatttttcaaaccaaaacttttccgcccttttatttaacaaaaaaggtcaaggtagcaactatggcatgcaaaaccccggccgctaaacagttttttgcaaaaaaatcgggccgaccgcaagcatgagtcgaaaaattcctatatttgcacacaggaaaacatccaaaagcagaaaatgattgccacgacgacataccacgacacatacggcggctcgctccgcagtatgaccatggatatgatgtacatgcgcaaccgattccgccgggtgtagattttccgtgtatacgaacgacacaatccggcttcagagaggtcggattttttttgtaacgactaaaaaacagatagcatggctgagaaaaaattacgtttcgagacattgcagatccacggagggctgcaacccgacgacccaacgggtgcccgcggtgtggcaatatatcccacggcggcataccgcttcaagagctgcgaacacgccgccaaactcttcgacctgagcgaagggggcaacatctacacccggctgcagaacccgaccacgaccgtatacgagcaacgcatcgccgccctgtacggggccgtgggggcgctggctgtctcatcgggcatgtcggccatactcatcgccgtgctctcgctggcggccgagggcgacaacatcgtcgcctcgccgttcctctacggcggcaccttcacccagttccgcatttcgctgcgcaggctcggcatcgactgccgcatcgcccgaagcgaacgccccgaggacttcgaggcgctgatcgacggacgcacgaaggcgatctacgccgagagcatgggcaatcccacttgtacggtacccgatctcgaagcactgggacaactggccaaacgctacgacgtgcccttcgtcgcggacaatacgttcggtgccgcgggctacctgtgcaaccccttcgaatggggtgcgaacatcgtcgtcgactcggcgaccaaatggatcaacggccacggcacggccatgggcggggtgatcgtcgacgggggcaattacgactgggccaacggcaagttcccgcagatcgacggcccgtcggaagggtatcacggactgaatttccacgaggcattcggcgcggcggccttcatcgtgaaatgccgcgtggacggtgtccgcgacctgggctgctgcccctcgccgttcgactcctacctgatgaccctcgggctggaaacgctttcgctgcgcgtgcggcacgaagtcgagtcggcccgcaggctggccgaatactgccgcaaccatcccaaagtggagcgcgtgagcttcgtaggcttcgagtcgcacccgagctacgcgaacgcgaagaagtatttccggttcggttcgtcggcagtcttcaccatcgaactcaaaggcacgctcgacagcaccgtgcgtttcgtcgaatcgctcaacctggcggcacacatggtcatgatcggcgactcggtcacggtcgttacgcacccggcatcgaccacgcacaaacagctcagcgacgcagacctcgccgcagcaggcgtcacgccgaccatgctgcgcatctccgtcgggctggagaataccgacgaccttatcgacgacttcgaacaggctttcgcacacatcggataatggaacccagcatttacaaagcacccgggccgttcgagctcgaaacggggtatacgctgcccgagctgaagatcgcttaccacacctacggcaagcccaatgcggcgtacgacaacgtcgtgtgggtatgccatgccctgacggccaactcggacgtggcggactggtggccgcacacggtcgaggcggggcgtttcctcgacccggcacgccacttcgtggtctgcgccaacatcctcgggtcgcactacggcaccacggggccgctgcacgtgaacccggaaacgggaagcccctattacaaggatttcccgccgttcacgatccgcgacatcgtccgtgcacaccgcctgttggccggcgcgctcggcatcggccgcatcgacacgctcgtaggaagttcggtcgggggattccaggccatcgaatgggcggtcttggagccggagcgcatcggcaaactgatcctgatcgccacggcggccaaggcctcgccctggacgatcgccatcgaccagacccagcgcatggccatcgaggccgacacgacgttcggcgagccgcgagacgacgccgggatggccggactggctgccgcacgcgccctggggctgctcacgtaccggggttcgctgggatacaacctcacgcagcaggacaaggaggaactccccgcagtacaccgcgcatcgacctaccagcaatatcagggcgagaaactctgccggcgctacaacgcctactcgtactatgccatactcaacgccttcgacacccacgacacggggcgcgggcgcggcggggtagcagccgccctcgcacgcatcgaagcccgcacggcagtggtcggcatcacgaccgacatcattttcaccccggcagagatgcgcgaactgcacggcatgatcgccggaagcacgtaccacgaaatagattcgccgttcgggcacgacgggttcctagtcgagcacgggcagttgaacgacatcctctatccgttcatgaacaatcaataaacaagcagcatatgagcaaaatcaaaatcggcctgttcgggttcggcgtcgtcggacagggaatctaccaggtagtgcagaaatcgaagaacgcccacgcggagatcgtgaagatctgcgtccgcgacccggaaaagccgcgtaaggtcgaagtcgacaaatccctcttcacgacgtcggccgacgagatactcgacaacagggacatcaacctgatcgtggaggtgatcgaccaggccgatgctgcatacagcatcgtcaagcgggccctgctgcgcggcatcccggtcgtctcgggcaacaagaccatgctggcgcaccaccttccggaactgatcgagatccaaaagacgcacaacgtggcgctgctgtacgacgcctcgtcgtgcggttcgatccccgtcatccgcaacctcgaggaatactatgacaacgacctgttgttagaggtgaaaggcatcctgaacggctcgtcgaactacatcctctcgcgcgtcttcgaccacgccgagagttacgacagcgccctggcgcaggcgcaggcgctcggcttcgccgaaagcgacccgtcgttcgacatcgaaggctacgattcgctcttcaagctggtgatcatcaccgtacatgcgctgggcacctacgtcgccccggaaaagattttcacctacggtatctcgaccatccacgattcggacatccggtatgcccgcgagaagaacgtcaaaatcaaactcgtggcgcaggtcgtcaaggtgagcgacgaacacttcacgatgttcgtcatgccggaattcgtgacgccctcgaagtatatttacagcgtcgacgacgagtacaacggcgtagtgatccgcggcgagtgctacgaccggcagttcatgttcggcaagggcgccgggagcctgcccacggcctcgtccatcctgagcgacatcatggcccgcctgaacaactaccgctacgagtacaagaagcagaactacatgcagaagcccgactacacgacggacatcacgctgaaggtctacgtgcggtacaaggagaccgacgtgcacggcatcctgaattttacgaaggtgcacgaacagtacaccagcgaagacagcaactacgtcatcggcgacatccagctgagcgaactgctcgccaaacgcgaccggctccggggaaaggacgtgttcctggccaacatcccgattttcttcctgaaccgcgacaactgacacgacgcgggcactgggctcctgcggggtgggacacgcattcgctgcgccaccaaaaggtcatcacgcaatggcctgtgctcaccgcagccccgaggaaaaccgcacggcggcctgcctcaggagggtaaaacccacagtaaaaagacgatccccggctcatccgagaccggggatcgttccgttgccgcatcctcggctacggctatatatccttcacgcagcgcagcgagacaccgtttccggccggaaacggagcaagcccggctacgataccgccagacgaataaggcatggcttgataattcgcaccgttatcttctgaggtacagctcatcagataccccttcttttccgtaatatacagacctgtatccgacaccaacatcccggcgctacggagcagggaggcatcgtattcggggctggcgatcatctgctcgatctcggcgcccgtggggacatgccagcccggcggacaaatcccctgcaccggggtgccggatgcagccgtcgcaccgcccagggccgttgtgaagctgtaaagcaacccccgttccgcgacatattcggcgtcgttcgatcccgccgtaccgcagcaagggtaccagataccggttccgatctgggcaccgtcaggcaggtaacgcaggttccgggtcatccaaacccgtccgccgatcgtcgcggtggggtagtccacacccccgtaggaaagcgtcccgggatcaccaccctcgccgccgccttcgccaccgccgccatcgccgccgccatcgagcgaaccgccgtcgccccagtcgacgacttcgccgctcagttccacgtcgatgtcgatattggtcacaacgaccgacatgtcgtagcgtttcccgctttcgagctgtgcagaagagagggttttactgcggctctttccgtcaccggtcgctaccgtaaccgtcagagtggcctgctgcggcacgaggatagcacggtaggcggcatcggccgtcacttcgaacgcctcgacgtcggcagcagcagccccgctcttggccgcggcggagggcaccgtgaaatcgaccacggccgtcgggacgagcccgccgaccgtaacccccgtaaccggggcgtcggaattgttggtaaggacgatcgtcagctgcgacatcacatggtaaaagagcatcccgacaggtgccgaagatggggtaacctcttttttcaccgcgaccagcaggtcggacgatgcacctcccgacgtctggtctgtagcaacggaaaactccgcgggcattccctgttcggagtaaggatggtaggccgtgagcgtcgatttttcattcgaatcgttataccacagcaaatccgcggccgtaaaggccgtaccgtcgtaggtcatcggaacgttctgcgcataggtttccgaacctttggcaatgctcagcccgatgcggtcgccggtatcgaaatgcaatcccgtaacacgggtctggatcgtcggcgcgattttcacacaaggcgtacctgtgtcggactttgagcagcctgccgcaagggcagcggcggccaaagccgtcagaagtgttgttttcatctcgcgataatcgtaataaggtgtgacttttcagcacaaatttaaacctttttacgtcattcacaacactttcgaacagtttttacaatcaattccggtaataggattcgtcgagtccgagcgtaaagctaccccggcgcaggagtgtgacgacagcaacggccagcaccagtgccgcattgaaaaagaaggggaagcggtcgctgtgcgtcccgaaaacatgacggaagaggtctacgataaaagggcagaccatcacggccagataattcaccgacatgacgaacgaaagggccagtgtagcggaacgcggcggggcgatggtcgccgccttgtcgtaaatgacaggctgcatgatcccatacccaagcccggtgcaaagcgccccgaaggccagcatcgccttgccgtggaaaaccccgacacacagcagccccacacagaccagcacgagcgccacgaggttgacgttccgcttcaaagaacggataatcttgtcgatgaacagccccggcagcatgatcgcaaggaaaaacagcgagatcagcaccccggaaaacgagctgtcgatcttgtagtcgtcgaccaggaacgaggcatagaacgtcacgaccagcacggcgtaggtgacgaagaaatagaacgccatcagcccggcgagcttacggcggtcgatcatcttgtgccgcagctggatgctctgttccggctcgggaaaggagcgctgccgcttgagcaggaacgacagcgcaagcgaaatacccggcagggtatagaccaggaagggcaggtgccagtcgacgttggccaggtatcccgtcacgacggtcgccagcacgagcgtcaggttgttgatcgacgagctgtaccccagctgccggacacggtaatcgcccgtaaagtagtcgaccacgagccccgtggagaaggggattaccataccggcgccgataccgaggatacagctgatgacgatgagccacatcatgctccgggcgaagaggcatgccacgccgctcaggaagaagaccgacagtccgacggcgaggatcttgagcttgtccttgccgacggagagcttgccggcaagcaggacgaaggggatgatcagcagcgagggcagcgacgtaagcatctgtatttcaaggtcggtggccttcgggaagattttattcaggtcgccgaggatcggcgagatcgccagccccggcagagaggcgattgccgacaccgaccatatcgccagcagcaccccgagcgtaatcgtacctttgcctgtcttgattttcattgccagtggatttacacgcccacacagcaagtgttataccaaagcagggcgggccggcatgttgccggcccgccctgtcgtatcggatgtacctacctgccctgctgcttcacacaacgcacctgaaggccgttggcgcgggcatagggcaccgaattttcgatgccggccgaggtgtcgagtttctcgaaccagaaatggagcgccgcagcctgcgtgccggacacggcggtcgtccagtaaaggccttcccagggttgcgcctccatggcgtcggaacgcaccttgggcagcggattgtagatattcaggatcttgccgttgtcgtagcggcggcgtccggcaccgatgaaaaacgattcggcgtttccgtcggtcagcgtccagccgtatttcgcctcgtcgcccacggccggggttccgacgatcgccaggttgtcgaacgcgcccgagggagccacgcgccagccgtaggggcaggggtcgttaacgctcttgtcggccacattgtcgtccgccgaccacaactggtcggaacggccgctccaaagccagtcgttgtccgtgtctgccacacccgtaataaagacgagcgggttccggatggcatattccatcgttccggtctcggcgctcgactcggacattttcaggtagacgcgactgccgctgccgctgtacatcgaggcaccggagccctccgaaccctggtaggtattcggcccgatgaacgggtctttgcggccccactggtaatataacccgtaggaagcgagtatcttgtccgtcgtcgaattgtcgttcgccagggctccgaggttgcggttcatcagcgtatagccgttgaaatcgaccgtaccgccctccgcatcggggtcgtaatcagtcgcccagatatgccagctccagataagttcgccgtcagcatcataagccccgatcacggcgttgccctgcttgatcttggtggcgtcgtcgctgtcggcaccgatgtagaacgacgccttgccgtcctcgaagtcggcatactgcacgaatcccgatgcggtctgccatacgacgtccacataggaagtagccagctgggaaccgtcgcccttgcgcgtggcgtcgatcaggtagttcgtttcgggttccgtgacgatgtaactgttggccacctcggcgctgatgtccttcgtcgtcacgataccggcgaagagcgtcgccgaaacgagcgtcccgccgggggtgtaacccgtaaaggagaacgagccagtcttgacggcatccccgctctcgatgtcctcggccgaaggagccttgacggagatcgtcgcgcctgccaggtcaacgaccgcctcgtcccaaccggtgggtttgctcgtcgcggacagtgtcttgatgttctgtgccgtgaaaccgaccgtagccgaccctccggcctgcgcaaagaacaccgccggggaatcgagcgtgatcttgcccgaatccttatccttactgcatgccatgacgaaaaccgccgcagtcacgaccacagccatcagccttacgaatcctttcatattactcaaatttaccgaatttcaatttaaaaaatctttgcaaagataccaaaaagcgggataaatcctacaaggacatcccaaattattcatttgggaataattattgccgcctactccctaacgaattataaatgcaaatagtatgtccaaattgaaaattgaaacgggaagttcgcccgccggggagcgtttcagcatcacggtgaccgaagagggcccttacctggtctacggaaggccgccgctggccgaacagttcatcatgcccaacgagtccaacgaaagctggtatttccagcagggcaggcttttttcgaccgaggcggaacccacggcgatctgccgctgcggcgcatcacaccgcaagccctattgcgacggttcgcacgagaaggctgactgggatccccgcctcacggcacgtccggacgccctgctcgacggggccgaggtgatcgacgggggcacgctccagatgacggacaacgagaaatactgcgtcttcgcacgtttctgccacccgcacggcgatgcgtggacactgaccgagacatccgacgatcccgaagcccgcaagctggccatccgcgaggcctcgatgtgccccagcggccgtctgatggcgtgggacaaggagacgatgaaacccttcgagttccgtttcgaaccgagcctggggctgattgaggacatcacgatcggcgccagcggagggctgtggatacggggcggaatacccatgcggcgcgagggcgggcagacctacgagatccggaaccgcgtcgtggcatgccgctgcgggcagtcggccaacaaaccctattgcgacggcacccacgcctcgatcaagtggaaggacggcctggcaggcgaacccgtcggcgaaaccctgcccgaagaggtatactgagagatcgccgcaccacactgcgacaggcaggcacggcaccgcgcaaccggaacgacggcagggctgtgtcggcaggggtaacgggcctgctgcacacgggaagaggggcgcacacgcgtccctcttgtattacaacacattgcaaagtttacctacacaaaaactcgatgtaatcgcagatggctttcgtacaaacgggacaaaactcgtccgtccggtgcaggttgttcatcaggcagttccgccacgggcggtagacccccttcgcagcataaccgccgccctcgaaaacccctacgaccccctcgtacccgggggtgtcgggcgtcggaacgggcgtcccggccgacaccatcgctttccagaacttgtccttgaagccgacaagcgttgtcaggttcgcctcccacggctcgacatcccgggcatacatgtcgtcgtaagaggtcgtgccgacatactcgtcgcccagccccagcagcaggtgcccgaattcgtggacgtaaatcttcccggtacgcgtagggtggtgtgcggcgctgatgccatagaagttgaagataccgccgcccccgtatttctgggtgttggacaacacatagatatagtcgtaagggacatgcgccgcgatgtcgcgcaggcgctggaagtcgtcgaccatctggtaacgctccgagccgaacgtatagaaagaggccccgcaggccgtgttgcgccacacgcgctcgccgggaatcgtcacgcccgaatcggcggaaggcgcccacacggcgcggatattgaaccgcgaagcgtactccctgaaaggcgaatagctgaaaaattcgcgtgcgaattcacggcaggccgcttcgaatttcgcccgctccccggcgctatacccctcgggcagcaacacgatgtcgacacgatgtgcggggttgccgttatatgccacctcgaaagcctcgtagcggggtgagaactgcgcgacgaagcaggatgcggggtcgatattctggctgaaccgcttttcgaagcgccccccggcattgcggccgaagatctcgatgcggcacgggcgcctgggataggggaatacgaccgactcgggataggaacggcgcacgctgtcggcctcggccgtgctctgccactcgttgaagagcgtacagaagccgcgcgaatagatctcccgttcggaagcacggtcgacgatgcggaaaaactggttcccgtagcccgtcgtatcgagaagcgacacgtgcgagcccgcccagtagggttcggccttcagggcgtcgaagaaatactcttccgagcggctgtcgccgctgtggtaatagtcgaagcgcatcgtctcttcgaggaaatagtccgagaagcgcacctgcgccgacacggccgggcacgtaccgagaaacagcaagaggaaaaatctcttcatggcaatctgcttttcaatccacaccccgggaaacgggcttccggttccgggatgtcgcaatgatataactctattcggcatctaatatacgaaaaaaggggtacggtttcgaccgtacccccggaaaatcccccgaacaggttattttttctccggccgggcgatcgtctcgcgcatcgacgtgtcggccatgatgttcttcatcttatagtagtccatgatccccaggttgccgttgcggaacgcttcggccatagccagcggcacctcggcctcggccaggatcacctttgcgcgggcgtcctgtgccttggccttgttctcctgctcgagtgcgacggccatggctcggcgctcctcggccttggcctgggcgatgttcttgtcggcctgcgcctgatccatctgcaactgggcgccgatattcttgcccacgtcgatgtccgcgatgtcgatcgagaggatttcgaacgccgtaccggcatcgaggcccttttcgagcacgacgcgcgaaatggaatcggggttttcgagcacgatcttgtgcgatgcggccgaaccgatcgacgagacgatgccctcgccgacacgcgccagcacggtctcctcaccggcaccgccgaccagctgcttgatattggcacgcaccgtgacgcgcgccttggcgatcagctggatgccgtccttggccacggccgctacgggaggcgtgttgatgaccttggggttcaccgacatctgcacggcctcgaacacgtcgcggcccgccaggtcgatggccgtagccatcttgaaatcgagcatgatattggccttctgtgccgataccagggcatgcaccacgctggtgacattgccgcccgcaaggtaatgcgcctcgagttcgttggggttgagttccagcccggccttcgtgctctcgatcatcgacgatacgatcgtcgagggcggcaccttgcgccagcgcatcagaatgagttgcagcaggctgatccttacgcccgacaccaatgccgagaaccacagccccaccgggatgaaatagaagatgagccagatcgcaaaaaggctcacgaatacgatcaatacgatcaatcctgcttgaaaatccataatcgaatgctattaagttagaaaattatccttgaattacacctttcggcccgagctcattccacgggcgttatcctgaccagcgaaaccccgtggtagggtaccagcgcccggagcgtgcccgtgcacgtacccaggtcttgctgccgccacaagtcccggacttcggcctttccgccgatcccgagttcccgcaggtcgaattcgaattcgtagttctgctcctggatggcttccgcctcgtcctgatcccacagcacgaaatagggatccaactggaaaaatcccagcgcatacgaaccgtcgcagagttttttgtaccacacctgcccgttgggaacgacccgtttgacggcgggggcgaccagcggatcctggttcacggcgatcacttcggaattggtcagcagcccgagcgtgaagtcgtctatcgcccgcatgtcgcaaccgatcagcagcggggcggagaggatggcccacagcgaaatatgggcatattgttcgtcgggggtcagctcggattcgtgggcatcggcaccccagccgtgtcccagccggccgaccaccagcatatcggggtcgttgtacctgcccggggccgtggcctgcgcgcaaacgtcctggaaacagccgatcgccgtcaccacgttccattcatcggtgatgtcgcgggtcgtacgccacaggttgccgccggcttcggcgccccagttccacacgttgggagccccgtagcccacgcagtagacgatatcccggtcgacctgatccagcgccttgcgcatgaccacgtagggttcctggatcgtcttttcctcggagtccctttcgatttgcaggtagccgcaatagtcgtgtttgaggtaatccacgccccattcggcccaagtccgggcgtcggtgagttcatgccggtagctccccggataatttccgcaggtcgtgggcccgggcgaggagtagatgccgaatttgagcccaagggagtggacgtagtcgctgaggcctttgaaatccgggaatttttcgttcgggaggagcctgccgtcggccgaacgcgtatccgccggccatccgtcgtcgatattgacatacgtccatccgtaggccaggagtttttcgtgcatggcgcgggcggcatcgcgcaccttcgcgtcgtcgaccgagaacccccagcaattccagctgttccagcccatgggcggagtcagggcgatttgcggccctattttcagcaatatctcccgttcggctttcccgagggcattctccgctgtcagcagcaccctgaaatccccttcggcgggcacacggcccgttatcaggcccgtacggggatcgagctccagcccttcgggaagcccctgcgccccgtacgccatcgggcgtttgccgctggccatgacaggcatcagaaagggattgcccgggcgggcgccgtatacgagcggattgttgatctgcggcgtttcggggctcgcgggggtcaggatatatttacccttggagattggcctggcccagacggacaggggctccacctctccgcgcgtggtgatcttcacctccagccagtcggcatggtcgtacatgatcccgtcgccggcctcctcgaccagcagcaggactttgtccaggccggacaagtcgacgtcgaacgcacgggcagcatcgcccttgcgcatcacaccgctgtcccacagcaccttccggtcgccgaggattttgaaccggtgtttcccggcgaacaggtttttatcatccgcgcccaccgccccggcgatggagacggcatcgccgccgagcccgaacagcatacggctgatcgaatgggttcccacgccgcggccgtaaacgacgccgcccaccgtgaggggagtatccagcaccgagcggtcggcctgcggcaagccccagtcctgaatgcagcacgagagatccagctcgtccagccagacctccttcgttccctgcgcccgggaatcgcaagccatccccacgacggccagcaatgcaaagaatctgagatatcccatccccgtccgattatccggctaagcgtgccgatccttcacggtctttacgatgacgctgaaattctcgaagcccacgacttcgacctcccggcgcgggtcgacataggccgtcagcgacttggcctcgtagaccttgccgccgacctcgaccgtacccatcggagaaaggcgcgaaagggtcatgccgcggtcgcccacctgcaattcctggtcgggggtcgagggcatactcgacgagtcgaccctctgtttgagcgaaaagcgctgccaggtcttggcgcgcagggaaataatcgtggcgacgagcgaaagcaggaggatagccaggatgactacgaccccggctacggtgccgtaatcgcggaaagcgaggtagatggaactgccgtagcaaaccagcgccaggatggcaccgatcgacacgccgggcagcagcaccaattccgccaccaggaaaagcagtcccaatacgatcaggagtatgatatagaacatcgtcataaggagttgttgaacattgcactaaagataggcaataaattcaattattccgcaatttcggcgacttttatttccaaagacgggtctgcctgtattattgcggcggccacgcggtcggccacggccttgtcgtcgaacatccccaccacgaacaactgctgtcccacgcgcgagagttcgcacccctcggccgcctcggtgataacggtcttgacaacgtcgggcagtgcctccgtaccggtgatttcgacccggtaggcaatctgctgcgcctcggggtcacgcgaaaggttgcggtaggcgccgtccgtccacaccacgatttcggggcggacgaagcctttggatttcaacagtttttgcgcggcctcggcctcctcccgggttgcgaagcccccggcatagtaacaccatttcttatcctcgccgaccagataggagagcggatacgccccccggaacgtggagacggcacgcttggtattgaacgtgcccagcaggatacggtagatcgtcccgtgctcgtagaccctgcactcggggatcgggtgctggtagctgtatttgggcgtcgcggagaacgcgatactgtcgtagtcgaggaaatagcgctgcgccacgtcgatacggggcaggcggaagtcgatgccatccaattgcgcagccacgccgcgcagcgagtcgcgggcggaagtgagccccaacaggccggccacggccgtctcgtagcccacgaggactttcttgcgcaggaaataatcggccacggcatccgaagcgacctcgccgcgcagtgccgagagttcgcgggcagccccggaaagccgcttctcctcacgcgccaggatggcatcctgccccagtttgtccatcagatagccataggcataccctttgttgtcggcgatataattccatgcctcggcgagcgaatcggccagcacgcggttgaagccctgcaacgtattgtagcggtcgtaaatctcgcccgcatccgcctcggtctgcgccgcggcataggccttggccagttcgcagatcgtcccgtagttggcaaaatagcggttcacatagtccacggcgtccagctccagcccctgcgccctgcgcagggccgcataatcggcctcgggcagctgctcgcggaaataggggttgaaaaccagattgcgcaccttgagcgagtcggggatcgcccctgcgggactttccgcggcaggctccgccggctgctgcgccgccccgttcaggttggcgagcacccactcctgctcgatggtgttgatcttgtcgatcaggcgccccttggcattgcgcacttcgaatatccggctttcgagctgcaggatctcctgcgaatagcgctgcctgttcgcggggtcttcgcgcaactgttgccgggcgcgttccacggcattgacgatcgagtcctcgcggatctgcaactgcgcatcctgttccagaagcgacatgtactcccggttgccctcgagccccgcgatacggggttccacgcgaacctgctgcgcacagaggtctcccgccgccagcagcgccgcacataacactatataaaccttacgaaataccatctcggttacctccaccatttaatgaaaaagagttgtatgaatccgaatatttccagacgccccaacagcatcagcagcgaattggagagcttgaacaccccgggaagcgccgaaaaattgtccatcgagccgacctcgccgaagcccgggccgacgttgccgatcgacgccacggcccccgagaaactggtcatcaggtcgacgccgaatatcgtcccgaaaaccgtgccggcgagtatcagcatcaggtacgccacgatgaatatcatgaccgaatgaagcgcctccgtttcctggataacgccgtcgaggcggatgcggatgatcgcattgggatgctgctgctgccgcagccgcgtgcgcatcatcttcatggccagcaccagccggttggtcttgataccgcccgccgtagatccggcgcaggcacacacgatcgagccgaaaatcagcaggatgaccgcgaacgaagtccactggttggaatcggccgtcgcaaacccggtcgtcgtcaccaccgacacgaactggaaaagcccgtggcggaaagccgacgtgaaggcggggtagatatccgcggcatagaggctgacggcgatcagcagcccgcccgcgaacagcatgccgaggtaccagcgcgtcacttccgaacggaaaatattgctgcgcttgcccgtcaccgtggcatagatcagtccgaaatgaatacccgccgtggccatcgcgaagatcaggatcgtgtcgatcatcgggctgttgaaataggcgacgctggcgttcttggtcgaaaacccgctcgtggcacaggccgacatggcatggcagagcgaatcgaaccagttcatgcccgccatcttgagcagaagggtcgaaaccaccgtaagcccgacatagaccaccagcagtatctgcacgatgatctgcgtgcggtaacggtaattgtccttggcgagcgtcgagagctcgacattcgacagcgtcagcttattgcggcccagcgagggcaggatcagcagcgcaaacatcaccacgcccatacctccgacccaggtcgtcgagaaacgccagaactgcaacccgcggggcagcgcctcgacatcgttcaggatcgtcgacccggtggtcgtaaagcccgagacgctttcgaaccaggcgtttaccaggctgaactccccgccccagatcaggtaggggaatgtcccgaccacacaggccaccagccacgagccgaccaccacgcagaagccctccttgttggtgatttgctccgtgcgttccacgaaaatcagcgggaaagcccccagcagggccgtgagcaacgacgacaggagcagcgggtagaacgccgagtccatgccgctgacgtaggagatacccgccgacaggagcatgaacagcgcgatgaatatcatcactaccccgacatatcgcaataccacgtctactcgcatcgcatcaggctttcggttgcttggaaatggtgatcagcgtctcgatcttctctttgagctccagcatttcgtccttgcagtcggccttgacgacgaacggcacgcggaacgaaaggtaatcgcccagccccttgttcatgcgcaggatgggattgacacagtagacggacatgaaataatagagcatcagcacgatggcgatcatcaccgccagcgagatcaacacgggcgtcacggcccggtaggcgttcttcttcatctgctcggcacgcggcgccagcgaactctgcgtcgaagtcatatagttcttgatggccgacgtgaggcgcccgtagagcgccacgtactcgtcgttataccatttgacccccacggaatcgggtaaaacgggccccggcacctccggcgcagcggttccgaaggccagatagttgtcggtcagcaggcgcagctcggtcgtcgcgaaggcgagcgagtcgaggaacgacttttcgagcgcctcgtcctgtgccacgagcagcgtattctccagccgttcgaggctccggcggcaaaggctgtcgcacgagcggtcgccgaataccgaaaggcggatcagcgccacgttctgttcgtgcgcggcgtcgagcatctccttggccagctcgatattacgcatgttggccttgaggatctcgcccgtgtctcggctcagatggctcagctccacgaacgagaccatgcccgaaaaaaacagcaggcatacgatgctcaggaagcccaccgtcacccttttgcgcaaacccgtcatactctttatgaattttgtagtggcaaatataatgatttaatcccgaatttcacccatcaggtcgtgagattcgtccatagcccccagcctgacacggcaaacggtgttgacgcgggccttgtcgtagggagccttcacccggcggtagttgcccgtaaagccgaacatcatgcccccgcgccgcgtgctttcgaacaacacggaatcctcgctccccacggcacgggcgcagaatgccccgtgcagcttcgcgcacagcgcctccagctcggccgcgcggcgcgtcgccaccgaagcctgcaccttgccgggcatctccacggccggcgtgccgggacgttccgagaaggggaaaatatgcagaaaggccggttccagcccggcaaggaagtcgtaggtcgtgcggaaatcctcctccgtctcaccggggaaaccgacgatcacgtcgatgccgatgaaggcgtcgggcatcagcgcgcgtacggcggcgatccggtcggcgaagcgcgccgtggtataacggcggcgcatcagccccaggatcttgtccgaaccgctctgcagggggatgtggaaatgatgctggaatttcggcgaagcggcgcagaaggcgatgatctcgtccgtcaaaaggttcggttcgatggaggagatgcggtaacgctcgatcccgtccacgccgtccagcgcccgcagcaggtcgatgaacttctcgcccgtcgtccggccgaaatcccccgtgttgacacccgtcaggacgatctccttctgtccggccgccgcgatccggcgcgcctcggcgaccagatcggcgaccggcatattccggctgccgccgcgggcgtagtggatcgtacagtatgcacacttgtagtcgcagccgtcctgcaccttgaggaaggcccgcgtgcggtcgccgctcgaaaaggccgcgaagaacgatgtgagcgaatcggcatcgcaactgtaaacctgcgcacggcccttgcccggaagttcgagcacacgtttatataaatcgcccttatcgttgttacccacgacaatatccacaccttcgattgccgcgatctcctgtggtttgagttgcgcgtaacaccccgtgacggcgatgatggcaccggggttgcggcggtgcagcttgcggatcaggttacggcatttcttgtcggcatgttcggtcaccgaacaactgttgacgacgcatatatcggcttcagcatcgggtgccacgcggacgaaaccgccctcttcgaactcccgggcaagggtggagctctccgaaaaattgagtttgcaacccagggtatggaaattgactcggcgttgttgcataaaatatgtgttttactgggcgaaattacgaaaaccgtacgaaaaggggcgtcttttcaacaaaaaaattacagaccgagataaatagagcagaggcgccctgtacggacgcctctgcagcataagaaaaacggaacactactcgtccgtccggggacgcatgacggcaccgcccatcggtcgtatgggacggatatcccacaagtcgccgaaaggcttcatcggactgcccccgccgcgtgtcaacgacgaagcctggagttccggcttcttgccgctcttgatccacaccagcgcaatatagccgagctgatcttccatcgtaccgaactcccccgggtagatcgccgaatcgtcaatctcgacatcggggacaaaacccgtcgaataatcccggaaccccttggcgttctcaacgtaaaaggtaacagggtagagcaggaactcatgattgtagaatgaccgcatcactccttccatacctacgttcttgccgttggtggtctgcccgatgaggttgacctcgatgtccagaccacgcaggccattgatcaccatttcactggccgaagcggtcgtctggctcaccagcacatatatcttcttcaaccccacagcatgctgaagcgccgtttcgagcggttcgtatatgcgctcaactgtttccttgacgccgatcttgtagtcaccgccttcaccggcttccgtgcggtcttcattgaacgtagtatgtgcataaacctgtcccttgtagtcgttgcccgcaaccagcgtaccgagcacggcgctcgaaagcacatcgccaccgttgttgtagcgcaaatcaagaatcaggtcggtgacgttctgctggcggaaacgttcgaatgccgccatcaactcatcgtcgtagtcgatattaaagcccatatagagcaggtatcccacctttttatcggtgccatcgatgccaaccaccttgtccatgtagatggccggatcggtaaaggaagcggccccgagctggatgttgcctttcgagctgagcacaggagtgcttccgttatcttcccaggtcacctggctaaccgcaatctcgacagacccgtcgtatacatactggcccagcgtcttgtagttggcatcggtcacctccacgccgttgaccgacgtgatgaaatcgccgcgcacgagtcccgcgtcgtcagccggcgtcccaggaacgaccgccataaccgcaaacccgatatagtcggtaccgaggcgggtggcttgcaacagataaatacctgacccggactgcgtctgtcccggagctcgcgacacgggagcatcgctttgcaaattagagtaatagtacatgcgtttctgcccctgccagaagccgtcgtcgtggttcacgtcatcctgggcagctacgccgtcgaggatcgaggtgaaaaagcggtcgtagctaaggctgtaatcgaggaagaggttttcgatcggacgattccacaagtagaagttcttcatatagtccgctacccattcgttcacggagcggtatttaccatccccctgctcggttgtaccttcggcctgcttcaccacgaaagaggccgatgcggcgtatcctttcacctggacggtgatcgtggccgtacgcgcctcagcaaggttgttcttggcgaccttcaacctcagcagcgattcgcctgccacacccgagggagtcttcacctcgcaccagtcagccgagctcacagccgtccaccggccttcggcggtaaattcgaaatcgagcgtctcgccttcgatcacggcctggttctcagccttccatgcgggagaggcaatccccgcaccttcattcaaatcatcgtcgtcgctacacgacacaccgaccgtcaaggccagcagtgccgccagcatccatccaaacaaattcttcatgtctaaagtattttattaaggattaacgcatcattcgttctgccgcaatacgacggctgtcggccacaggagcggcatcgaggttcacggtcacccgttcgggcaggctaacctgccgcacgttcttcacggctgccggctcggcgccctggtcggcatcgcgcgtcaggacgatctcgtccgatgctgcaaaagccatatcaccccaccattggctggtacccgacaacacaccgggataatactcaaaggagttgtcgaccgctttcttgaccgtcaacgtcagatcgtccgccacttcgatggggaagcttatcgccatatccgtgtaattgtcgctgttgggacgtttggcataaccgtggaaatagagttccttgccgttaaacttcgccatcgtgtaatccagctccccgtttatcggagcgctcgtcgaaatcgtgttgtcactgttgaattcgatgaaccacttcgggccgtaaccggcattggcttcctcttcgttcgcaacccagccgttcgcaagcaacttctcaggatccgcatactccacaccgcacggagcaaaacccaatacgaccaagcggttcatatcgtggtaagccttttcggtcgcctcgttcacacccgtggcaatagtgacagagaaggtcaccgttttgccttcgagatccttggtcgtcgcggtgtatttgccgggaagtttcgcacgcacgccgtttccatcgtactgcggcaacgaaactgtcgcgaaatccttcactacggaaacgcccacgctttcctcattcgtcgcacaaacaccgaactcgtactcggtattcggcgtgagcacgtcgctctcgatgacaagcccctctccactcatagcagcagcaacctgttccggggttaacgaagtgccgttggcagcgatgacatcgccggccgtaagcgcctcgttaccgggacggctgagaacgtcttcgatggatcccctcgggaaaactccggccaccatcgaaaccgtataggtcgtcttgatcttgaaggccgctttgttccacggcgtttcgacggttacgggctcggcagtcagctcgggcaggggcccggtaggttcgcccgtcgtaaagtcatagagcaggaacttctcgcgcatgtccttatcgaaccctacgatcccgacctggtactcggtattgggcttaaggccctttgcattgacagtgatagtccccgaactttcgttcgaaacatcgtcccaatggccgataatcatacggcgaacggaagcctcgccctcgaaagcaatatagtcgaactccgccttcgtgttcacatgataacggaagcgctcgattccttcctcgggcttaatggttatatcggccgtcatcgaagcgatattgctcacagagacatcgataccatatggggcagtgccggcttttttggtcttgaagacgagcgtcttcgctgcatccttggccacttgcccttcgccgtcgacttcaccggctatgatgataaactccatatcggagtaaatatcctggcgaaagccgttggcatcgaagaaagtggtatcgaaaacataggtgtcatcttcagtggcttccttgccaaaagcgcttacataggaggccggagtaccgcctgcaaggttgattatatagtcatagtcagacttggaaaggcagacgtgcttgtatttggccacgccttcgggcttcatgatatgataagcgaaagaagtagtcttgacactttcgagcgtaatcatgtcggtataagcgacatgcgtgtcgatcgattcggatacgagtttgctgtaaaggaaagggttgaggttgcgtgcggcggcatagagcttgtactcggtgtcaccagtaaggtcttcgattttgacctcgacctttttagcaccttcgaacatggctacgataccattttcgaagagagcctctgcatcggcaatcgtttccgatgccggcaatacagcgtaggcataatcggctgcaccgctcgtagtaattgtaaatgatgcggttgtacgggttacatcacccacctcaacattaatcgtgggggggggatttttgccgtcattgccaccctcgtcatcactgcacccctgcaaaccaaacgtcgtcagaaatgcgaatccggtcatgccgagaaataaagatgtacgcataaatgtaaaaatgtaaaaaatttgaaaataaatggggttaatcatgcggataccgaaaaaacaagcagtcatccaagcgcaaatataaaaataatcgaatgcttttctatatccaagaactaaattatccaagtaaaaaacgtaaatttgcgcgcaaataaagagaacgaggatggaatttttcagcgatctgatccaatacggctacctgtccaatgcgctggcggcatgtgtcctctcgggcataacgtgcggcgtcgtaggcacctacgtcgtatgccggaggatggttttcctcgcgggcggcatcacgcacgcctcgttcggcgggctgggcatagctttctacgcgggagccaaccccatagccggggcgatggtcttcgccgtgctttcggcgctgggcatcgagtgggccgggagccgggggcgcatccgcgaggattcggccatcggcatcatctggtcggtgggcatggccgtcggggcgctcttcatgagcctcaggccgggttacacctccggcgacctctcggcctacctgttcggcagcatcgtcaccgtgacgcacggcgacgtcgtggcgctcgccatcctgaccgcggccatcatggccggggctctgctgtggctgcgccccgtgatgtacgtggctttcgaccgcgacttcgcccgcagccgcggcatcccgacgcgcgtgatctcctacgccatggcggcgctggtcgccgtcacgatcgtcctctcgatccgcatcatgggcatcgtgctgctcatctcgctgctcaccatgcccgtcgccatcgtcaacgccctctccaaatcctaccgcaccatcgcgctctgcgcgccgctggtcgccgtggcgggcaatgtggccgggctggtggcaagctacaatttcgaagttccgcccggggcggccataatatttaccctcacccttacgcttattatggtaaaactattacctttgcgtcagaaaaaagccggagccgccgcatgaaaaccatccacaaactcgtactgaaagcctacctcgggccgatggtgctcacgttcttcatcgtgatgttcgtcctgatgatgaacatcgtgtggcgctacatcgacgaactggtggggaagggattgagcgccggcatcatcatcgagctgatgacctacttcatggccaacatgatcccgctggggctgccgctggccatgctgctggccgcgatcatgaccatgggcaacctgggcgagaactacgagctgctggcgatgaaatcggccggcatgtcgctcgtccgcatcaccaagccgctcatcatcctggtgagcgtgatcgccgtgggcagtttcttcatcggcaacaacctcgtgccgtatgccaacaagaaggtgtacagcatcatctacgacatccgccagcagaaacagagcctcgaattccaggacggcctgttcttcaacggcatcgacaacatgtcgatccgcgtgagccggcaggaacccgaaacgcacctgctgcgcgacgtgctgatctacgacaaccgccttgccgacggcaacatgaacaccatcgtggccgactcgggctacatccgcctgtcggacgacaagcggttcctgctcgtgacgcttttcaacggcgaaatgtacgagcagacccgcaacagccagtggttcacccagagcaggctgcgccaccacatcttcgacaagcaggatcagacgatccccatggaaggcttcgccatgcagcgcagcgacgccaaccaattctcgaacagccagaccaagaacatcaacgagttgcagcaggacatcgactcgctggaaatcctggtgaacaacgccacgacccgttcgtacgaaccactgctcaaggaacagatattctcgcgcgacaactccgtgctgccgcagcccgacagcctgcgcaaagacaagagcaacttcggcactctcgtggcgatggactccctctcggcactcaaactccgcgacaaggaacggatctgggaccaggcgcggacgctggccaaaagctcgcgcaacatgttctcgttcgacgagtcggccgccaaggaggcgctcaaccagctgtaccgcagcaaggtcgagtggcacaagaaaatatcgctccccgtgtcgatcatgatcttcttcctgatcggggcgccgctgggcgccatcatccgcaagggcggcctgggacttccggtcgtagtgtcgatcatcttcttcgtgatctactacatcatcagcctctcgggcgaaaaactggccaaggaaggtagctgggaagccgtgtacggcatctggctctcgacgttcatcctcacgccgatcgccgtatacctgacctacaaggccaccaacgactcggcattgctcgacacggactggtatgccggaagactcaaggcattgaacgagcgcatgcgacctgcgatcaacaaattgaaaaacgcgataaaactcaaacgaaatggcaaaaagcacgattctgaatagtgtagaagaggttattgaagatttccgcaacggcaggatagtgatcgtcgtcgacgacgaagaccgcgagaacgaaggcgacttcatcgtcgcggcggagaaaatcacgcccgaaatcgtgaacttcatgctcaaggagggacgcggcgtgctctgcgccccgctgtcggaggagcggtgcgccgaactggggctcaacatgatggaagagaacaacacctcgctgctgggcacgcccttcaccgtgacggtcgacctgctcggcaacggctgcaccacgggcgtctcgatccatgaccgcgccgccaccatacgcgccctggccgaccccgcgacccgggccaccgacctcggccgcccggggcacatcaacccgctgcgtgcccgccagaaaggcgtgctgcgccgtccggggcataccgaggccgcgatagacctcgcccggctggccggcctgcagcccgcaggcgcactgatcgagatcatgaacgaggacggcacgatggcgcgcctgccgcaactgacggagatcgcccggaaattcggcctcaagatcatttcgatcgcatcgctcatcgaataccggctgcgcgaagaatccatcgtcgagaagggcgagaccgtcgacctgccgaccgcatggggcgacttccgcatcacgccgttccggcagaagagcaacgggctggagcacgtggcgctcaccaaaggcgagtggacggaagacgaaccggtgctgacacgcgtgcattcgtcgtgcgccacgggcgacatcttcggctcgtgccgctgcgactgcggcgaccagctgcacgaggcgatgcgcatgatcgaacaggagggcaagggtgccatcatctacctccagcaggagggacgcggcatcggcctctgcaataaaatcaaagcttacaagctccaggacgaagggctcgacacggtcgacgccaacgtccggctgggcttcggcgtcgacgaacgcgactacggcgtcggggcgagcatcatccgcgaaatgggcatcaagcacatgcggctgatgaccaacaacccgctcaagcgcgcggggctggagggctacgggctgaagatcgaccagatcgtgcctatcgtcatcgcccccaatgagcacaacctgcgctacctgaagaccaaggagcagcgtatgcaccacacgctggggctggacaagcaataaacccgtgcgatgaaacaggccgcgcccggaggcgggatgcaggccggaaaaaacgtcagacaacgatgaacccgaaagaactgcgtatcttattcatgggcacgcccgaattcgccgtgccgtcactccgggcgctggtcgccgggggctataacgtcgtgggcgtggtcaccacgcccgacaaacccgccggccgcgggcagaaactccaccggagcgacgtgaaactggccgcactcgaactggggctgccggtattgcagcccgagaaactcaaggccccggaattcgtcgcggcgatgcaggcactgcggcccgacctggggatcgtcatcgcattccggatgctgcccgaggtaatctgggccatgccgcgcctggggacgttcaacctccacgcctcgctgctgccgcaataccgcggtgcggcgcccatcaactgggcggtcatcaacggggagacggaaacgggcgtcacgaccttcctgctgaaccacgagatcgacaaaggcgccatcatcggacaggttcgtgtgccgatcctgcccgaagacaacgtgggttcgctctacgacaaactgatgcacaggggcacgtcgctggtgaccgaaaccgtcgacaggatcgccgcaggcgacatcagccccatcgaacagcagcacgtcgacgaatcggcactgcacccggcgcccaagatattcaaggaggactgcctcatcgactggtcgtgggacggacgcaggatcgtgaatttcgtacgcgggctgtcgccctatccggcagcctggacggaactatacagggaaggctcacagatgccgcaagcggccaagatatattcggccgctttcgaacccgccgcccacggcgaaaaacccggcagcatcgaaagcgacggccgcacgctgctccgcgtagcctgcgccgacggctggatcaccctcggggagattcagatagccgggaagaaacgcctcgccgtacgcgaactgctgctcggcctgcgcgacatagggcggtacaggttccgggaataaagggcgagggcagggacgcccctgcaatgcccggctgcagacgccccgctccgacaaagacattacgaaactccccggctcgattcacgagccggggatattcattccgggacaacggccgccatgcgcccgaacaatcccgggacaacaactgccggagtctgaccgtatgccggggagtttcattccgggacaacgatgtcatgcgcccgagccatcccgggacaacagctgccggagtccaatgcacgagccggggattcgcaaccgaagcatacgcaatgcgcccctccgcgacggctattcgatcacgatatccgccgtaaggaaatagtggtcgctgggatacttgccgccgacacagtcttttaccaatgcggaggagacgacccggatacccgtgcctttcaggaaaatgaagtcgatacgcccgggcgtccccttcttcggcttataggcatcgccctcgaaccggtggaacgacatatgctccgcatcttcgccattggcctcgacgaacgcatcgacccagccggcaccgacaagcaccccggcaacggggttcgaaggcctggaattgaaatccccggccagcacctgcggcacaccggcaagatactgcgacgtttcctcctccacggcccgcacctgcgcaagccgcgcctcgtgcgaaatatggtcgaggtgcagggacaacacccggaactcgcgccccgaacggcgatccctgagccgtacccaattgacatggcgcgggcgggccgtgccccacgacgaggagccgcccacgagcggggtgtccgacagccagtaaaccccggcgcccgtcatttcatagcgcctcttcgagaacatcacgaggttcttggcgataccgtggtactcccggtcgggcagggcatccgtctcggggcccgggtagccgaagacgaaataccccgggaacatccggcacatatcctcgtactggccgacggtcacctcctgcaggcaatagatatccgccttgcagcgtttcatcaccttctcgcaaacatatttacgcgcagcccagccgtttccgccctcctcatcctgcggcagggccacccggatattgcacgacgccacgcggtgtacgccgcgcccccgggcggcggccatgccgcacagcaacagcgcggcacacacgatcagaatccgtttcataccgatcttaccttaataattaatactgccccaacaagtattttagaaacacacacggaagcatataaaaaacaaacagaaacaataaaacacacaataatacaaaaaaaagaaataataaagcataaaataagcacaaaaagaataaaataattttacctttgcattaccggcccgccggaatggagccggaaccaaccgcaaaaaaacacgatccacacctaacgaaccatgaaggaaacatacgtcataggcatcgactacggcacggattccgtgcgtgcccttctggtggatgccgcgacaggcgaaacaatcgccgactcggtattcagctacccgcgctggggcagacaggaatactgctccccggcggaagcgtgcttccgccagcatccgcaggattatctcgatggcctgcgccacgtgatcggcgaagtggtggccgcacggcccgacgcggcgccgcatatcagggcggtttcggtcgacacgacggccagcacgccgtgtctggtagaccgcacgtgcacgccgctggcgcggcgccccgaatacgccgacgacccggacgcgatgttcgtcctgtggaaagaccacacggcgcagcgggaggcggaggaaatcaccgccctgtgcgccagcagcgagatcaattatgcccgccattcgggcaaccattactcggccgaatgcttctgggccaaatgcctgcacctgctgcgcggcagccggcggctccgccgcgacgcatatgccatggtcgagctctgcgactggatacccgccgtgctcaccggggaggacgatccctccgcgatacgcaccagccattgcgccgcagggtcgaaacagatgtgggccgaggcctggggaggattccctccggagacgtttttcgaagcactcgaccccgcattgctacccatcgtgcgcaacatcagcaagacgaaccgcacgtgcgaccacgctgccgggacgatcacgcccgcgtgggcacagacgctcggacttcccgaaggggtcgtagtaggggtgggcaacatcgacgcccatgcgggagccgtaggcgccggaatccgctgcggcacggtcgtgctcaacctcggcacctcggcctgccacatggcgctgatgccttcggatgagatgggcggacgcctcgtcgaagggatattcggacaggtggacagctcgatcgtacccggcatggtcgggttcgaagccgggttatccgccttcggggatgtctatgcgtggttcaggaacctgctgtgctggcccctggaagagttgctcgtgcagcctggggcacccgacgcgcaggcccggcagcggcaggccgaagagtgccgcgacaaaatcatgggcaggctcgccgaagaggctgagcggctggagctccgggcggacatgccgctggcgacggactggctcaacggccgccgcaacccgtaccccgcgccggaactgaccgggacgctcacggggctgcggctctcgacgacggcgcccgaaatatactacgccttcgccgaagcgacggcgttcgccacgaaggcgatcctcgaccacctcgcagcgaacggcgtggcgatcgagcgcctcacggggatcggcggcatatcgcagaaatcgcctttcgtcatgcaactgctggccgacgtaaccggccgggaaatctcggtcatcgactgcaaacaggcctgcgccatgggttcggtggtctacgccacggtcatcgcgggctgctacggctcggtggaggaggcgcagcgggcgctctgcaacttcccttcacggcgctatacgccccgcgcggaacgccacccgttgctcatgcagcgatacgaacgctacaaagcccagggagggctcccgcaacgctaaccgacacgcaaacccatacaaccgacgacacgcatgaacctgctgaacaacccggaaaaacggaaatggatgatcgtggtgacgatcttcatcgccatcatctgcaattacctcgaccgccagttgctttcgatcctcaagccgacgatcaaagcggccttcgacatgaacgacgacggctatgccttcatcgtcaacatcttcctgatatgctacgccgtcatgtatcccatatcgggcatcctggtcgaccggttcggcccgaaaaaggtgatgtttctgggcatcctggcatggtcggcggcctgcatcggaggcggcctttcgaccaatatggagcagttcgcctttttccgcgggctgctggggctggccgagcccacgatttttgccgggcagatcgtcgccgtgaccgtctggttcgaaaaacgccagcgcgccacggccaacagcctctgcacggcgggcgggtcgatcggcacggtcgtggccccgatcgtcatcgcatggctctcgacgatctttccgtggaacgacgtcttcgtcctggccggggccatcggcatcctgatcgccatcgtttggatggccgtctacgccgacccgcccaaagagatactcgacgtcacgctcagcgaaagcgccgccaaccggcaccacggcaaagccttcacgtggggcgggctctggaagacgcgcacgctgtggggcgtgctgctcatccgttttgtcagcgacccggtctggtatttctgtctcttctggctgcccggttacctgcaggaggattcgggactgacgctcatacaggtgggatgggtcggctggatcccgttcctgttcggcgccgtaggcggcgtattgacctcggcatggtcggacaaaatggtacgcaagggcatggatcctctgcgcgcgcgcaagcgcatgatgacgctggtggccgtcgcggcacccctgtgcatcttcacgccctatttcaacgccctgccgccgtactggaacgtcgcggccatcatcgcctcgttcagcctgatcgccatcatgtgcctgagctggctctacaccatttgcgtggtgatcgccgaggcattccccgtacgcaacgtggccagcgtagtcggtatcacggcaggcttcggggccgtgggcggggcgatcttcaactactacgtcgggcaactgctgagcaccatggggccgtcgcttttcctcgtaatgggcgtcctgcactggatcgctgtcgtgatactctggaaaatgacacgccccgaaatcccgcaggaaaaacaaactgtacaaaaataaaaaccgaaaccatggaaaagaaaattacgaccgtccgcgaacccgcccgcgacatccccgtacgcgcatcggcggacatactcatcgtcggcgggggcccggcggggctcatggccgcacaggccgcagcgggcgagggactgaaggtaatgctggtcgaaagccgcggctacctgggcgggaacctcacgatcgggctcccgatcctgggattcctggggcagaagggcaaccagatcatcgaggggctcccgcagcggtttatcgaccggctgcaggagcggggcgccgcgagcgggcaccgtccctgcaagctccacgtaagcctgacgatcatcgacccggaggagagcaagaccctcgcgcagcagttgatggaggaggccggcgtcgaggtactgatgtatgttttctgcaccgacgtcatcagggagggcaacgaagtaaagggggtggtcatcgaaagcaaggccgggcgcgaagcgatcctcgcccgcaccgtgatcgactgtacgggcgacgccgacgtggccttccgtgccggcgtcgagtgccgcaaaggcgatgccgagggcggcatgcagcccccgacgctgatgttctcgatgcgcggtgtctccacgcaacgcctgcgcgacgcgatcgcagagcacccggacatctacgacatggacatcatgcctgcggagtcgttccgcaacgagaagttcatcaccgtggggcttcgcaaccagatcgccaaggcacgcgaggcggggatcgacctcccggtggcccgcacgatccttatcacgggcatgtccgaggacgaaatatgggtcaacatgtcgcgtgtgaacggcgtagacccgaccgatcccgggagttacacccgtggggagatcgaagccaggaagcaggtttaccaaatccggaaatacctgcggcagttcgtaccagggttcgaaaacgcgtggatggatcgggtggcaccgttcatgggtatccgcgagagccgcgtcacggtcgggaaatacgtcctcacggccggggatatcctggcctgccgacacttcgacgacgccattgccgtagccagctatcccgtcgacctgcaccatcccaaaggcggggactgcacgctggaatactgcggcgactgctacgacatcccgtaccgggtgcttgtgcccgaaaaggtcgaaaacctgctcgtcgcaggccgctgcgcctcgttcacccacgaagcgatggcctcgacacgcgtgatgtcgacctgcatggccctcggcgaagccgccggacgcgccgcacgcatcgccctgcgggacggagtgaaaccgtcgcaggccgacgtggcgaagctgcgcagcgaattgaaacgaaccggagcctacctccgatgacggtacggatcatgcggtttacgaaactgctgctcggcctcggcctggcggcctgtgcatggcccctgtccggacagaacgcccgccaggagatttatgccgaccccgacaaagccggcggggtatactatgcctacacgtacgacaatccggcccggactcccgcgcccgaaggttacgaacctttctacatcagccactacggccgccacggctcacgctggctgctcagggcgtcggaatatacggaggtgttggaaactttcggcaaggccgcccgcgagggcgccttgtcggagttcgggcaggatgtcttacgccgcgtggaacgggcctgttcggacggcgagggcagggcgggcgacctcacgccgctgggtgccgaacagcattacgggatcgcggaacggatgttcgaatcctacccggaggtcttccggggcaacgcgcgtgtcgacgcacaatcgaccgtcgtggtacgctgcgtgctgagcatggcggcattctgcgaccagctgcggaggatgaacccggaactggaaatcacgcggacggccaacaaccgcacaacccgctacctgaactttttcagcacggcggcaaaccccgggcccgccccggagtacctgaacctgctgaaaagcgagagctggatagaggccgaagagggattccgagaaagccggatgcatccggaacgcctgatggccaggttattcgcaggcggaaaagttccggaggacatcgaccagtgggagctgatgcaacagctctgggccctggccgtaaacgaacaggacacccgcagcggaatcacattccgcgacctgttcacccccgatgaactgtatgccgtctgggagtgcgtcaactaccgtttctaccatcagcgcggccccggggcgctcaaccagggatatgccctgcgctatgcgacagcgctgctcgaagagatcatcgcccgcgccgacagtgcgctcgtgcggggcgtgcccgccgccgacctgcgcttcgggcacgacggcaacctcatgccgctgacctgcctgatggctttcgacggctgcacggccgaggtttccgacccgggtctgatcgcggacgcatggcgcgattaccgtatttcaccgatggcggccaacatccagatgatcttttaccggaaagagggaacggcggacatcctggtcaggatactccacaacgaacatgaaatgtatcttccgctcgcctccgcaaggccgccgtactacaaatgggatgaactgcgggccttctaccaccgaaggatcgccgaagcgaaaggcacggccgcgcaaccgccgtcagcaggtgcgctccaggctcccggagcataaccggcagcggggcttccgatccaggaggcacagcgtatccaacgaaggggagggggctttataaagcctccctttcccgtagcgcgttgcattattcttactctccgattttcagatcagcccttaaaacccgtccgctcagggtcgataaagaaatcgtaattacctgggcttcggacaaccgggagtttccgtctgaaaaatcgagtcgtaaaaacccgtcctgcaacaattccatatctgcggcagtcagttcatcggcatgtttacggatatgggtcaatccaccctttgcatgatctttcaatgtcggcgcaaaagagtaagccgtgaaatagcacaagtcattcaacgtacttccggcggaatgcccctcgccccatgaaatactgctcctgatttcgatcccggtaaaattttccgcatagcttacgtagtttcctacggtatatccgaaatctaccgtgatataatcgctgaaatcatcgttgtgcttaacagccagctccttgaacttagcgacctccgaagcattttccgacgttataccatatttcttaccggagaaatacaactccagggtcgttgcattcagttgccggacatacatcttttcgacctccaaataagcgtcgaccagatactccttataaatccggtatgttccggtgtcgttattattttcagaggagtcgcacccggaaaacaaagggagcatcaggatgttacaatataataaccatttcatatgaatcatctttggtattgaataagtttttttatctttccacaaactattccggattattgtgcgactaactccgtaatagccgttccattacaacctcccgggccataatgaaaatcaggtttaaatgccagccataaaattcaaccattatcactccaaatataataaaaaaataaacaatattccattccgcccgaaaaataggggatttaggctctgtcacggacagacagaataaccgcggaatcaatataaaaggaggctttgcaaagccccccccttacattgccggccggaaccggactatcccttgatagctatgcctttgccgagttttttctcgatctcctccttcgggagaggacgggtgcagaagaaccagtcgtagcattttaccccttcgggctggtcgtccatatcctcgccctgcatcgggacgatcacctcgtcgcccggacgccagtcggccggcatggcgaccccgaatgcgtcgatggactgcaaacccaccaggacacgctttatctcctcgaaattgcgtcccagagccagcggatagtagatcatcgcgcgcagtttgccctcgggatcgacgaagaatacggcacgcacggctgccgtctggctttcaccgggctggatcatgccataaaggttcgccaccttcatcgacacgtcgtcgatgatcgggaactcgaccttgatatccttcatgccccggtattcgatcttctcacggatcgtacgcagccatgcgatatggctgttgcggctgtcgaccgacaatccgatcagttcgcagttcaaagccctgaattcggccgtacgggcaccgaacgtgagcacctcggaggtgcagatcggcgtaaagtcggcggggtggctgaacaggatcacccatttgcccttgtagtcggcgggaaagctgatctttccccgtgttgtcatcgcttcgaatgccgggacgggttcacccaggcgcggcagttgctgttcgttcttttccataatccgaaatattagttttatgccggggcccgcaaagtcggtgccgatggatgcgaaccggggatctttctactaaattacggtttttacaggaatagtcctaatccggaaccctctggtttgcgcggaaatacggaagcgtatacacaaacggcgcttttgggtagggcccggcttccccggacgatcgcggcgtccggaaaggacatcgcaccgatggaggccgaaagccggaatacggggacaggctcagccaacggggttggaaagcgggtgacgggaaaaacacggcggacaggcagaagggacgggcagaaggaaccaggaacaggaaacaggaaacagaaaacaagattaaaaaacgaacaaaggaaataccacaagacgaacggaaggaacagaggcggaaaaacgggtggttccttccctgccaaatagaaaaaagcggcgaccttccggcctgccgctctttccttcgggaacccaccggaacccggatccgtcagcgtaccttgcggatgatctcgccgccgtggcggatcgcctcctcgttggcgggaagcatcttccacgcacgttcgggcagcgacttcttgaggccgaccatcacgttctccatctcgacgacggggcgcaccttgaggtacccgcccagaatcatcgtattgaacagcttggcctgtcccatccgggcgcattcggccgtggcgtcgatcgcgtagacctcgatgtcctcgcgcacgggatggcgcgtgataccgttcgtatcgtagatcaggatgccgccgggcctgaccatcggctcgaatttctccatcgactgctggttcaggatgatggccgtatcgaactcgtgggcgatcggcgaagaaatcttcctgtccgaaaggattaccgtcacattggccgtaccgccgcgcatctcggggccgtacgagggcatccacgtgacttcgaagtcctgcattacgcccgagtaggccagtatcttccccatcgagaggacgccctggcccccgaaccctgcgataattaaagtctctttcatagcatcccttattttacgtccttgatatcgcccagcggatagtagggcagcatgttctgttcgagccactcgttcgaggccacaggcgagagtttccagccgctgttgcaggtcgaaacgacctccacgagcgaaaagcccttgccggccatcgaattttcgaacgccttgcggatcgcacgcttgcacttgcgcacgttggcgggcgtatgcacgctctggcgcgtgatgaaggtggcaccgtcgaggtgcgccatcatctcggcgatcttgtagggatagccgttcaggcgcgggtcacggccgtagggcgtcgtcgcggtcttcatacccagcagggtagtcggggccatctggccgcccgtcatgccgtaaatggcgttgttgatatagatcgccacgacgttctcgccgcgtgcggccgcgtggatcgactctgccgtgccgatggccgacaggtcgccgtcgccctggtaggtgaagaccagattgccgggatagagcctcttcacggccgtagctacggccagggcgcgtccgtgggcggcctcgatccagtcgatgtcgatataattgtatgcgaatacggagcagcccacgggcgaaacgcctacggtcttttccgcgaagcccatctcctcgatgacctcggcgatcagtttatgtaccgtaccatgactgcagccggggcagtagtgcatgacgttgtcggtaatgagcttcggtttcgcgtaaaccaggttttcgtttttgatttcaacctctgccatagcctttactttttaatcagtttttccttgagcgccgcgagcacttcgtcgggcgcgaacatcataccgccctgacggccgaaatgctcgacgggagctacgccgttcacggccagccgcacgtcctcgaccatctggccggcattgagctcggcggaaaggaagcctttgacaccgcgcgcggccagttcggccagcggcttcttggggaaaggatagagcgtgatcggacgcagcaggccgaccttcagcccttcggcgcgcgccatctcgaccgtggccgagcagatacgggccgacgaaccgaacgccacgatcacgtaatccgcatcgtcgcagccgatctcctcataacgcacctcgttctcttcgagcgccttgtatttctcctgcaggcgcttgttgatgatctccatcttctcggactgcaactccagcgacgtcacgatattgcgcttgcggtcggcaggcttgccgtaggtagcccacgagcggcactcggcagcgatctcttcgtcggtcttgcggggacgctgcggcgcgagcaccaccttctccatcatctgcccgatcgccccgtcggcgaggatcatcgccgggttgcggtatttgaacgcgaggtcgaacgcctcggccacatggtcgtgcatctcctgcaccgaattgggcgccagtacgatcatgtggaaatcgccgtggccgccgcctttgcaggcctggaaatagtcgccctgcgaaggctggatcgtacccagccccgggccgccgcgctggcagttgatcaccaggcagggcagttccgcccccgccaggtagctcagcccctcggacatcaggctgataccggggctcgacgacgaggtcatcacccgtttgccggtcgatgcgccgccgtagaccatgttgatcgacgagatctccgattcggcctgcagcacgaccatgcccgtggtctcccacggcttgagttccatcagtgtctccatcacttccgactggggagtgatcgggtacccgaaatatccgtcgcaaccgtagcgaatcgccgcatgggctatcacctcgttgcctttcatcagttttacctctttctctgccatagctactcgaatttttgacgataaaccgtgatgacgctatcggggcaaatcaccgcgcacgaagcacaccccgtgcaggcatcgggatttaccatccgggatatgggatagcccttgctgttcacctctgccgacaattccagcacgtcgcacggacacgaagccacacagaccccgcaccctttgcaccgttccttgtcgacaacgattgttccttttattttagccataagccgtagtattgttaagttccttacaaatataagaaaaaatcccggaaattctaaacgaatgcaacaaatcttatcgtgaaaaacggataaatgaaagcagtgcgcccggaataacccgcccgaacgcactgcgtacaaaatatttccgccattttattccgccttcggacaggggtcgaaaacgcgccggacaggcggttccccgagggttgaatgacttaccggcccccgaccgtcgcgggggcggttactcttcgaacgagtggatcaccacgcccgagcggagtttcggctcgaaccacgtcgtcttcgggggcatgatgttgcccgtgtcggcgatgttgatgagctgttgcatcgaaacggggtagagggcgaacgccgccttcatctcgccgctgtcgacacggcgtttgagctcgcccagaccgcggattccgcccacgaagtcgatccgcttcgacgtgcgcaggtctttgatgtccagtattttgtccagcacgaggttcgacagcaccgtcacgtccagcacaccgatcgggtcgttgtcgtcgtatgtcccgggcttggccgtcaggctgtaccagtgcccgccgagatacatcgagaaattatgcagttcggtcggacggtactcctccgtgcccttgtcctcgaccgtgaaactttcggcgagcttttcgagcaactgctccggcgtcagaccgttcaggtctttcacgacacggttgtagtcgatgatccgaagctgccccgcggggaaagtcacggcgaggaaatagcaatactcctcgttgcccgtatggccggggttctttgcctggcactcctgtcccacgcgcgccgcggcggctgtgcggtgatgcccgtcggcgacatagagcgccgggatgcccgcgaaaatctccgtgatacggtcgttggtcttcttgtcgcggataacccacaacttatggccgaagccgtcggcagccgtgaaatcgtattccgggtcgttgttcttcaccacgtcggccacgatggcgtcgatctcggcgttgtcgggataggcgaagaacaccggttcgatattggcctgctggttgcggacgtggatcatgcggtcttcctccttgtcgggacgcgtcagttcgtgtttcttgatcgcccccgagaggtagtcctcgtaatggcagcacatggtcagtccgtattgcgtgcggccgtccatcgtctgcgcatagatgtaataatactccccgggatcctgttcgagccagcccttctcacgccatgcacggaaattctcgaccgccttgtcgtaaacctcctgcgaatgttcgtcggcaataggctcgaaatctatttcgggcttgatgatgtgcagcaacgagcgttcggtggcctcggccttggcctcggcggaattcaacacgtcataggggcgcgacgccacttcggacgcatactgtttcgggggacgtatcccgcaaaaaggtttgattttcaccatatgaattaatgtattaaagcgaaaaaggcgggcgcagccttcgctcccgcctttcacgcgccgttatccgctatttgttcacctggaaccgcgtattgccgttcctgaaaaaatcgacgatttgggtggctgcggccagacccgcgttgacattggcctcggcggtctcggcccccatctttttggcggtggcaaacacccgcttgccgaatttctcgtccagctcggcctggttcccggcagcgatgtcggtaatgtatttcaggtcttcgcgttcggtcagcgcacgcacgacaccctgttcgtcgatcacctccttgcgggcggtgttgaccagcgtggcacccttgggcatcgacatcagcagttcgtagccgatcgagccgcgggtttgctccgtagccgggatgtgcagcgacaggaagtcggcctgcctgtacaaatcttcgagggaatccaccttcttcacaccgtcggcttcgaacaccgccgcatccgtgatgaaggggtcgtaggcgatgacgttcatgcccagcgccttacccttgcgccccacgagtttgcccacattgccgtaggcgtggatgccgagggtcttgccctgtatctccgaacccgtaccgggcgtaaagcggttgcgcgacatgaagaccatcatggcgagcgccagctcggccacggcgttggagttctgccccggggtattcatcaccacgataccgcgcgccgtggcggccgcgagatccacgttgtcgtaacccgcaccggcacgaaccacgattttgaggttcttcgccgcttcgatgacttcggccgtcaccttgtcgctgcggacaatgagcgcatcgacatcggccacggcggccagcaattgggccttgtcggtatatttttcaagcagggccagttcatagcccgcgtcctcgacgatcctgcggatgccgtcgacagcctccttggcaaaaggcttttcggtcgcaactaatattttcatacctgtactttctatcagatgaataaaatcgatgtccgtggccgcctttttcttcggggtgaacgtaaagaaatgcgccatgaccgtccgttatttcgcgtgtttggcggcgaactcctgcatgcactctacgagcacctcgacgctttccttcggaagtgcgttgtagcacgatgcgcggaagccgcccaccaggcggtggcccttgatgcccacgataccgcgtcccttggtaaattccatgaactcgggagccagttcctcgtagccgtcggccatcacgaagcagatgttcatcagcgagcgatcctgcttgtcgaccgtaccgcggaacagcgggttgcggtcgatctcgtcgtacagcagggtggccttctccttgttgcggcggtagatttcgggtacgccgccgatcgacttgagccagcggagggtctccaagagcacgtagatcgggaatacgggaggcgtgttgaacatcgagccgttctcgacatgggtgcggaacgaaaccatcgtcggcaggtcgcgcacgacacggtcgagcatgtcctcgcggatgatggcgaacgccacgccggccggggcgaggttcttctgcgcaccgccgtagatcatggcgtatttcgtaacgtcgaccggacgcgaaaggatgtccgacgacatgtcggcgatcaggggcacgggcgaagcgaggtcttcgtggtactcggtgccgtagatcgtattgttggaggtgatatgcacatagtccaggtcggctgggatcgcgaaacccttggggatgtaggtgaaattgcggtcttcggacgaagcgagcaactcgacctcgccgtaacgcttggcttccttgatggccttcttggcccagacaccggtattcacataaccggccttcctgcccaggaagttggcgggcacttcgtagaagaacgtgctggcaccgccgccgatatagaagatcttgtagttgtcggggataccgagcagctcacggaagagcgcgtcggcctcggccatcacgttctcgaaatccttcgtccggtgcgaaatcgaaagcagggaaaggcccgaaccgttgaaatctacgatagcttttgctgcgttctggatgacttcgtctgcgaggatcgagggtcccgcgttgaaattgtgctttttcataatattcggatgtgaatttagtgtttcggactccagcctgttagtttactaacacaaatataaataaaatattccggagaatacaacagttgtgcaaaacttgttcaaagaaatttcactcggcgtcccgaacgctcggcattttgaattgtttttattacttttgcccaaacttaacatcctccgcaaatggtaaaatccatgacgggcttcggcaagggcgaagccacgctgcaaaataagaagatcacggtcgaaatccgttcgctcaactccaaacagctcgacctcgggctgcggcttccggccgtataccgccagtcggaatacgaaatccgcaatatcatcacccgcacggtacagcgcggcaaggtcgatgtcttcgtgaccgtcgaatcgcagaccgtggagaccccggcgcgtattaataaagaggtattcgccgcctatgccgggcaactgcgcgacgcggcgcaaaacgcccgactcaactatgcagggatcgggtgggacagcgctgccctgcaggccatcatgcgcctgccggaggtcgtatcgaccgaagcggagagcatctccgacgaggaacacgcggcgctggtcgccgccaccgaagccgccgtggcgcagctcgacgcgttccgcctgcaggaaggcgcgatcctgatcgccgacctgctgggccgcgtggacaaaatcgaaggctacaaacaggaggtcgtgcctttcgaaaaggcccgcacggagacggtcagggcccgcctgctggaaaacctcgaaaagctgcaggtcgacgtcgaccgcaaccggctggagcaggagatgatcttctacctcgaaaaactcgatatcaccgaagagaaggtacgcctggccaaccactgcaggtatttccgcgaggtggccgcccaagaggagggcgcaggccgcaaactgggcttcatcgcacaggagatgggccgcgaaatcaacacgatgggctcgaaggccaacgaatcgaacatccagatactcgtagttaagatgaaggacgagctggagaagatcaaagaacaggtactgaacatattataatgggcaaggttatcatattctccgccccgagcggttccgggaaaacgaccatcgtacgcgaattgctgaagcgtttcccgcagttcgaattttcggtatcggcgaccagccgcgcaccccgcggctgcgagcgccacggctgcgactaccacttcatgacgcacgaagagttcatgcgtgccgtcgcggaaaaccgtttcgtggagtgggaagaggtctaccagggcacttgctacggcacgctgcgctcggaagtggaacgcatctgggccaagggcaacatcatcgtcttcgacgtggacgtcatcggggggatcaacctcaaacgcatcttcggcgacgacgcctgctcgatattcgtcatgccgccctcgatcggggagctgcgccgcaggctcgtatgccgcggcacggacgccccggaagtgatagaccgccgtgtggcgaaggccgaattcgaactgacgaaagcccccgaattcgaccacatcgtcgtaaacgactcgctcgacgaggcgatccgcgaaacgactgcgatcatcgaccaattcatcgcacggcagccatgaaacgcgtcatgctctatttcgggtcgttcaaccccatccataaagggcacatcgccctggcggaatacgccgtggaaaaaggactgtgcgacgagctggtgctcgtcgtttcgccccagagcccctataaacaggccgaagagctggcccccgagatggatcggttcgaaatggccgaggcggcctgcgcggcgtcgcgctatcccgaccggataaaaccctcggtcgtcgaatttctgctgcccaagccgtcgtatacgatcgacacgctgcgctacctggccgagaaccacggcgcggatatggagttctcgatcctcatgggcgccgaccagatagaacggctcgacggctggaaagagtacgaccgcatcctcgaatacccggtatacgtctatccccgccgcggcgaaagggtggacaggttccccggccgcatcacggtgctggaagacgccccgctgcaggatttttccgcgacccaaatccgcgggcgcatcgggcggggcgaggatgtctcgcagatgctcgacaagggcgtcgccgaccacatccgccgcaaggggctgtggaacccgacagcccgcaaatcggccctgacggcacagatcgccgccgatccggaaaacacggcgctctacatggaacggggcaagctccactaccgcctcaacgagtggggtgcagccctcaacgacttcaaccgcgtactgcaagcagacgacagccacgccgaggcgcggcagtatgcacaaatggtacaggaaatactggaattcagatataaagacatatacaacccctgacaatgacacgcctgaagattgccctcatggcgggcggcgattcgcccgaacgggggatcgcgctccagagcgccgcacagatcgaggcggcgctcgaccacacgaaatacgacatcacggtcatcgacctccaccaccgcgactggcactacacagcccccgacggacgcgagtggcaggtcgacaagaacgatttttcgctcacggtggaaggcgagcgcaaagcgttcgactacgccctgatcatcatccacggcacgcccggcgaggacggcaaactgcaaggctacctcgacatgatgggcgtcccttattcgtcgtgctcgatgacctcgtcggtcatcactttcgacaagatcaccaccaagcgcaccgtagcggggcagggtatcaacctcgcccgcgagattttcctccgcaagggcgaaacggccgacccggacagggtggtcgcggagttcggactgccgctcttcatcaagcccaacgccagcggcagctcgttcggcgtgacgaaagtccatacgcgcgacgaggtgctgcccgccatcgaggcggccttcgcccaaagcgacgaggtgctgatcgaagagtgcatcgcgggccgtgaaatgggctgcggcatgatggtggccggaggcagggaatacctgttcccgatcacggagatcgtatcgaaaaaggatttcttcgactaccaggccaaatacaccgaaggctattcggacgagataacccccgccgacatcgccccggaaattgcggaagaactgcaccgcatgacccgcatcgcttacagggcatgccgctgctcgggtgtcgtacgcgtcgatttcatcgtcacgcccgaaggcaaaccctacctgatcgagatcaactccatccccggcatgagcgccgggagcatcgtccccaagcaagcacgggccatgggcatgtcgctgggggagatgttcgacctgattatcgccgacacctgccgcaaatgatcgaaatcgacgacaaaatcgtgagcgcagacctgctgcgcgaatgtttcgcctgcgacatcgcgcagtgcaagggtatctgctgcgtcgaggggaatgccggagcgccgctcgaagcggaggaggtcggcatactcgaacgcgaatatgcggcctacaagccctatatgacgcccgagggcatcgaggccgtcgagcggcagggcttcatggtcatcgacgaagacggcgacctgaccacgccgctggtcggcgacgcggagtgcgcctatacctaccaggagaacggcatcacgctctgcgccatcgaaaaggcgtggctggagggcaagaccgccttccgcaaaccgatctcatgccacctctatccgatccgcgtcgtgcggttttcgaacggcacggcagggctcaactaccaccgctggtcggtctgcgccccggcgcgcgaatgcggccgcaggctgggaatcccggtctacaaggcgttgcgcgaaccgatcgtgcgccgtttcggcgaggaattttacaaggcgctggaagccgccgaagaatttatccgacaacaataaaatacacatgaaaaaatactgcctcacctatatggccgccgttgcggcactctcggcatcggccgcagcaccgcaggccgaacgcaaaaccgattcgctgcacatcgcatccctctcgcccagggaggctgcgaccatagactccatcgtcgcaatgcgcctgcggctccagcccaagcagatcgagtcgattttcgacaccaacgacgtggtggccatcgacacgctcgattcgggcaacgacgccatacaggtggtgctttacagcaacaacacgtggaaatacgtccgcaaccgcgagatagccaaggacagcaccatcttcgagaaatactgggatacgacaacgctcttcccctacaaggaggtggacatgtcgtcgatgcccaaatcggtggtcatcgacctggtggactcggtcacgagctaccactgcccctaccagggttcggtgcacccgcgcggcaaatacggcccgcgccgccggcgccagcatcagggcgtcgacctgccgctcaaggtgggcgacccggtctacgccacgttctgcggccgcgtgcgtatttcggaatataacaagggcggctacggcaacctggtcatcatccgccacgacaacgggctcgagacctactacgggcacctttcggagcgcatggtcgagcccaaccagtgggtcgaggccgggcagatcatcggtctgggcggctcgacggggcgcagcacggggccgcacctgcatttcgagacccgctattacgggcagtcgttcgaccccgagcggctgatcgacttcaagaacggactgctgtgccgcgagacctttctgctgaaaaaatcgttcttcagcatctattcgaacgccgggcaggacttcgacgacgagatcgccaacgaagagcaggacaagaaggaggcggccgaaaaggcagccatgaagtaccaccgcatcaagtcgggcgacacactgggcgccatcgcccgcaagtacggtacgaccgtgacgaacatctgccgactgaacggcatcaagtcgaccacgacgctgcgcatcggacgctcgctgcgggtgcggtagacggcgaagtgccgatgggatacgacacggctgctcccacacatagacgaaaaaggccggggctttggggtctcggccttttttactcgtccctgaggagagcaatgcggaattacggtaaaacggtttggtgcccgtttatgcgacaggaagcctccggaaaacggcatgttcccgggcgacaagcaactactggtaacaagcagcgcccgggcgaacctatttcttgtcctggatagcgtcgatggcgtcgatcacggctccccggaaacgcttgcgctccagctccgccacaccgacgatggtcgtaccgccgggcgaacagacggcatccttcatcacggcgggatgctgccccgtggcgagttgcagctttcccgtaccgacgaccatctggctggccatgcggtaggcatctgcacgcacgatgccgtgcttgacggcagcgtcggccagcgcctcgatgaacatcgccacgaaggccgggccgcaaccgcagaccgtccccgcaatgccaagacaggcggtatccaccgtcaccacgagccccacgtgcgacagcaacgcctgcaccgactgccactcggcttcggacagcgaatggcggcgttcgcagacgacgataccctcgcagaccgccacgggcgtattgggaatcgtgctgaggtgatgcgtcccgggcgcgaggatctcctcgtagcggtcaaacgtcatcccggcggctaccgaaacgacaaccttgcccgccagcatccctttgacgggggccagcacggcttcgacctggtacggtttcaccgccacgaccaccacgtcggcgaaccccgcgactcccgcggcatcgtcgaaagcgaggaacccgtggggttccgtattacggtgcagcttcgcccggtcgcgggcgcatgcgccgatctgcccgggctgcaaagcccccgatgcggcaagccctgcggccagggcctgcgccatgtttccgaatccgataaatcctaccttcatatcatcattgtttggaataatccctctccccgaatatcagcgacccgacgcgcaccatcgtcgagccgcactcgacggcgatggggtagtcgtgcgacatgcccatcgacaggatgttgaaccgcgccccgaaattgggctgcaacaggtcgaaacagcgcttcagctccctgaagtcgcggcgtatcacctccccgtcgtcggtattggtcgcaatgcccatcacgccgcgtacgcagatgttcggcatctgcgcgaaaggcgccgtgcggaggtactgcatcaggtcatccagctcccagcccgatttgctctcctcgtcggcgacgcggatttcgagcagtatctcgatcgtgcggccgcatttggcggcttcgcgctggatggtttcggccagccgcgcactgtcgaccgaatggatcagcgacacgaacggggcgatatacttcaccttgttggtctgcagatggccgatcatgtgccactcgatatccttgggcagcacgtcgtatttttcacgcagctcctgcggacggctctcgccgaaaatgcggtgcccggcatcgtaggcctcgcggatcgccccggcggggtgggtcttcgacacggcgaccagcgtgacatcctcgggcagggtgccgcgcacgaaggacaattggtatgctatcgacataatctgttcggttttggtgtgtaaaaatacgcaaaattcgtacaagacgaaacaagcccggaaaaattccgggcctgcataccgtttttatccgtccggaatcccggacatgctatcgagccagtacgatttcggagcaggggacggctccgtccaagacccgctccgagccggactccatgtcgtagacccggatccggttgccgccatccccggtgtcgcagagcatgaatatctcctcggtcttcccgccgtcatgacgaacggcgatcgagcggatggtggcctgcaccgtcgccagcgtcctgtcgaactccatcgacacgggattatacagacgcagttcggtcacaccgcccttcgctacggcatagccgccgacggcgtaacaggtctcgccgtcctgccctttgtccagcactccgaacggcaccatcgcgtcggcctgttcggcatcgcccgtttttacggcgtatccctcgccgctgcggccggtaagcaccagcggcgtataactatccggggcagtgtgtgccgcgagcagaaggtaaccgccgtagacggtcacgaaaggattttcgcccagcatctcgggcgcaatgtccgaaggcagcgtccacgacgggggcacaggagcgacgttggtacgggtcatattcaattccatgaggacgagccggccggcctcatggcgcaggaaggcggcgaaatcggagagggtgcccgcgacgacgacattgtcgtagcccgaatcccggaagtaacgcatcgtgaggtcgtagaacgccgcagcaccgatatttccgccgggcgcgaggccgtagatacggttcgaaccgggggtattcaccacgcaccgcatcccctcggggacacccagggtttcgatgcgcgtcagcccgccggtcgccatgtcgatgcggtcgatcgccgtttcgcccgtaaggcattgtgcgacgccgtagagcgacggctcctcgggcgggcggccgtcggatacggatattttacccagcgtcatggccttgccgcggcggaagagcttcacctcggtcgtagaggcggggtagcctccgggggccaggaacgtgatgtccgattcggtacgttccgtcacgacggcccagacaccgtcggcatatccttccgggagagccgcctgcgacaggggccacgcgatccgcagcatgatgtcgtcgtcggcctcgaagccgcgcgccgcaacggtcacctcgtcgccgggcgcgaatagctgcgatgacgggggcatcaccacgtcggtgacgaacggcacaccatcgccctcgtccgtggtacatgccaacaggaaaagaccgaaaaaggataaaaacaatagttttttcatataacctgctatataacaattacatacctccgcaccgggggggggtatccgccggaatgcaatgcgcttgcatacgtcgtaaagatacgacataaagccctaatatccaaataaaatgcgacatatcgtacccgctgcgttttgccgtttaggatttgtttcgtacatttgggatcaaaaccggaaaacctatgagaaaactccagtattgcctcgcggcggcagccctcttcgcctatggcgcagccgcggcctgtaccaatttcatcgtaaccaaaggggcatcgaccgacggctcggccatggtctcctatgccgccgattcgcacgcgctctacggcgccctgtaccacacccccggcgggaaattcagggccggggccatgctgcccgtctacgagtgggacacgggacgctacctgacggacatcccgcaggcgggcgaaacctattcgaccgtcggcaacatgaacgagcattcgctcatcatcggcgaaacgacctacggaggccgcccggaactggaggactcaacagggctgatcgactacgggtcgctgatctacatcacgctccagcgcgccaagaccgcccgcgaggcgatcctcacgatcgccgagctggccaatacctacggatatgcctcgagcggcgaatcgttctcgatcgtcgatcccgaagaggcgtggatcatggagctgatcggcaagggctacaaggacgacggcaaaggcggcaacgcccgcaagggcatcgtatgggtggcccgccgcatccccgacggctatgtctcggcgcacgccaaccaggcacgtatcacgaccttcccgaaggacgaccccgagaactgcctctattcgcccgacgtggtggcgttcgcccgcgagatgggttactacgacggcacggacgaggatttcagtttctgcgaagcctatgccccggccgatttcggcgcgctgcgaggctgcgaggcccgcgtgtgggcattcttccgcacggtggccgacggaatggacaaatacgtggactatgcgatggggcacaatgccgaaaaccgcatgcccctgtgggtgaaaccccgcacgaaggtgtcgcccaaggtggtcttcgactgcatgcgcgaccactacgaaggcacgccgatggacatgaccaccgacataggcgccgggggcagcgcctgcccctaccgctggcggccgatgtatttcgaggtcgacggcgtggaatactgcaacgaacgtgcgacggccacgcagcagaccggcttctggttcgtggcacaggcacgccccgacgtgcccgacaacatgggcatcctctggttcggcgtggacgatgcggccacgtcgtgcctgacgcctatctactgctgcacgcagggcgtccccgagtgcctgagcgaaggcaacggttcgatgctcgaatattcgccgacgtcggcgttctggctcttcaaccgcgtttcgaacttcgcctacatgcgttacgacatgatcgcgagcgacatccgcaaggtcgtggacaaatgggaaaacgaggcgctccgcctggtgcgcgacgtcgatgccgaggcgatgacgctctcgcccaaggcccgcggcaaattcctctcggagttcagcatcgccacggcgcagcagttgttcgaccgctggtcgaagctcgacaagtacctgctggtgaaatacatggacggcaacgtgaaaagcgaacatgcgggcgtgctggaatacctcgacggcaagggcggcccggcgcatttcgtggacaacggcaacggcaaacagatccccgacaagatccagttcccgggttacggcgagaagtggaaacgtgccgtggccaaagacaacggagaaatactcaaagtgataaaatagagctatgaaatacgatatcatcgtcgtgggaagcggcccgggcggctatgtggccgcaatccgggcttcgcagctgggacggaaggtcgcactcgtggagcgtgccgaggcgggcggcgtctgcctcaactggggctgcatcccgaccaaggcgctgctgaaaagcgcacaggtctacacttattgcaaatcggccgaacattacgggatctcactcacgggcgaggtgcatcccaatctggaaaaaatcgtggcgcgctcgcgcggcgtggccgaaaccatgtccaagggcgtggccttcctgctgaagaaaaacaacatagacctcatacagggcttcgggcgcctgacggcggcaggcaggctcgacgtcgacggcacacactacaaagccgaccatattatcctcgctacaggggcgcgcccgcacgaaatggcgttcatgcccgtcgacggcgagcacgtgatctcgtcgcgccaggcgctgacgctcacccgactgcccgaaacaatggtcgtcgtgggttcgggcgccatcggcagcgagttcgcgtggttctacgccgcgctgggcgtgaaggtcaccgtggtggagtacatgccccgcatgatgccgctcgaggacgaggaggtatcgaaggcgatggagcgcgcattccgcaaactgcgggcggcggtgatgacctcgacgaccgtgaaatcggtcagggtcaacgccgaagggcgctgcgaggtcgagaccgagggcaaaaagggccccgaaaccctgacggcggacatcgtgctctcggccgtggggatcaagtccaacatcgaggggatcggcctcgaagagctgggcatcgccgtggagcgcgacaaagtgctcgtcgaccggttctaccgcaccaatgtaccgggcgtgtacgccatcggcgacatcgtgggcggcccggcgctggcacacgtggcctcggccgaaggcatctgctgcgtagaggccatctgcggactgaatcccgccccggtggattattcggccatcccgtcgtgcgtcttcacctcgcccgaggtggcttcggtcggcatgaccgagcagcaggcgcaggagcggggcatcgcctataaggcagggcgtttcccgttcacggcatcgggcaaggcgaccgccgcgggcgaccgcgacggcttcgtgaagctcctcttcggcgaggacgacaccctgctgggggcgcacatggtcggacagaacgtcaccgagatgatcgccgagccgacgctggctcggatgctgggtgccacggcacaccggatcgcccgcacgatacatgcacaccccacgatgaatgaaggggtcatggaggccgccgaagcggcattgggggaggcgatacacctctaacccgcctggcagactaaacgcccctctggtaacgaggggcgttttgttataacggtatttccacagggcgatacaccgatccggctgcaggttcacaaacgccgtacgacgtcagaaacccgttccgggaaccgcaggtcaggcatcccggagcgtcaccacgaaccgtgcacccccggtataggaggtgtcgagggcgatcgtaccgcccaatttctccacgatcagccggcagaggctcaagcccagtcccagcccctgcgcaaagggatcgcccttgtagaagcgatcgaaaatcttttccgccagtccgggttccacgccgcaacccgtgtcggtgaccgacaaggtcagcgtatccggccccgtcaggccgcattcgaccgtcacggatccctgttcggtgaatttgacggcattcttcagcaactcgcgtacgagcagcgacacataactccggtgcaacgggaatacgatctccggggccgcgagctccagccggtattccacgccctcctttacgggcaggtgttccatttcggcacggatgatcttgctgatgtcgagcagcttccggggcatttcggcactcgtattatccagctgcgacacttcgagcatatcgttgatgagcgaagtgaagagctgcgtattgtcgcggatgatctgtgcgaactcccggcgctcctcctccgtgagatcttccccggcgatcagctcggcaaaaccgcttatggcattgagcggcgtacgtatttcgtggctcatcgaccccatgaagtcccgcttgagccgctcgctctcctgcgcgcgctgcgattcgaccgacaggttgtgctgcaggtgcttgatgcgcagcaggttccgccacaggtagacaacggcgatgacggccagcagcaggatcgtcagggcgaagtagagcgagttctgccgtttctgcgccagtagcaacgctttatcacgctcggccttgtccagtccgtactgcacttccagttcgcccaccttctcggcatacctgtgcgacgagagcgagtcgcgcaggccgaccacttcgttataaaccccgcacgcctccttgtagcgtcccatgcgttcgaggatcttggccttgttagcggatatcgccaccaactgcgacgtgacaccgcccggacgcaactgcaccgtcagcgaatcgaggtaagccagcgccctggggtaatcgccccggcggttgtaatactctgcgctgatcgtatagaatccctgcctgttggtcagcaggttgcccgcatccgccgccgcggagtccgcgaaacggcggtaacgctcgtaatacgcctgcaggttgcgctcgtcgagcagcggcgaggtgcacatcgaatagtaacagaccaagtaggacatctccttggaaatatagggtctgcgccgtacgatctccggatcgcggtaatactcgtcgagcatcgcaaggtaaccgtcggccgcatgtaccagcccgctttggtcttccaaactgctgtaagccgcgatcaggcaggtgatcaggttggcatggaaattccggcgtgccgtgggacgcatccgccccagcagggcgagttcgtcgttccagaaaggcaggccgcgctccatctgcaggtttccttcggccgagaccagcctgaaggcggctatgcctttcaggaagagccgcgacgcctcttcgtatacatcgcccgggggcaatgtccgtaccgagtcgatgtattcacggcacagccgcgcggactcctccgccccggcaacctgtatcctgcgtgccagctccaccatgcggtaataagccccgagcccctccatgccgctgccccgcatcagcggttccgcctgcgccaatatccgggcgagcgaatccccggcaccgggcgaggagatgtaatacgaagcgagcgaacccagcgacgccccgacggcaaatccgtcaccgacggcggcggcctcgtcgaacagtttgcggctgtaatacaattcgtcttccgacgagtcgttcaggtctttcaggttcagcaggatatcgacccgtttgcgggcatccggctccgattggcaagcagatttcagcgaatctacgagatgcgccggaggtgtcgcggaagaagtgactatccatccgacagccaacagcgtccacagggattttttcatacaagttggaattggcgattaaataataggcatttaaatccaatatcaaaacaaaaagggagattcgcaatgaaatctccctcagttcaaacccattccgcctttcacttgaaccactcctgcaggtggtctttggcgtagaaataatacaccgcaaaacccagccaactggtgagcagcaccacgatcgaagcgatcaccttgcccgcggtcgaaatgtttttcttgaagatgtccatcacgcaccatattgcgcagaagacaccgataagccaaataacagtcccaatcatagtcgataatatttatttattaaaatcagtaaaataccttacgttcaaacacgtccgccggatagaccacatcgctcaggaaaagcccctgcgcaggggcgccgccgctcgagcgcgacaagtcgcggctttcaacgatctcgcggaactgctgcggggtatagcgcccgcgccccacgtcgaccagcgtcccgaccagcgcccgcaccatgttgcgcaggaagcggtcggcacggatcgtaaagcagagcacgccctgcccgtcggccgtccatgccgcgtgcatgacacggcagatgttggtcttgttgttcgaattgagcttggcgaacgacgtaaaatcgtcgtagcgcagcagccaggccgccgcctcgttcatccgcccgacatccagcggcacgtaatactgccacgtcgtgccccgcgtaaaggggttcttgcgcggctcgatgtagtagcggtattcgcgctcgcgcgccgcgaaacgggcgtgcgcaccgtcgtccacgggcgtcatgcttcccacagcaatgtcccccggcagcaggaaattcagtttgtagaccgtctgcgccggatcgggcacgggcgccgcacaatcgaaatgcgccacataataggaggcgttgacacccgtatcggtacgccccgcccccgtcacctcgattttctcgcgcaacagggtagcgagcgcccgctcgagcgtctgctgcaccgacggcatgtcgggctgccgctgccagccgcaataggcggccccgttgtacctgagttccagaaaatagcgcatcgcgatcggagtggtttgcgcaaaaatacaaaaaaatcggttagcgccgcggttttatcgccagttttacgggatggatcatattctcgggccggagcacctcgtccagttcgtcgcggttgaggatgccgtgttcgagcaccagctcgtagacgccgcgcccggtttccagcgcctccttggcgatcttcgtggagttcttgtagccgatgatcgggttgagcgccgtcaccacgccgatgctgttgcggacatattgcaggcacttctcctcgttggccgtgatgccgtcaacgcagcggatgcgcagcgtgtcgaagccgttgatcagcagttcggccgactcgaaacagcactgcgccatcaccggctccatggcgttgagctccatctgcgccgcctcgtcggccatcgtcacgcacagctcgttgccgatgaccttgaaggcgatctggttcatcacctcggggatcacggggttgaccttgccgggcatgatcgacgaaccgggctggcgtgccgggaggttaaactcgcccagcccgcagcggggccccgacgacagcagccgcaggtcgttgcagatcttgttcatcttcgacgcgatgcgcttcatcgcagaggagtaaccgaccatgcagaccgtgtcggacgtcgccccgacgaggtcttcggccagcgtcacgtcccagccggtgatctcccggatggccgccgtacagcgctcggcataacccggctcggcgcagatgcccgtgccgatggccgtggcgcccatgttgatcgacaggaactcctgcgccgcgtggtcgaggttgtcgacctcgccccgcaggacgctcgcaaaaccgtggaacgtctgcccgagggtcatgggtacggcgtcctgcaactgcgtgcgccccatcttgagcacgcgggcgaactcgtcgcccttgcgggcaaaggctgcgatcagcgcttcgaggtgccgacgcagttcgaggtgcgtggcgtagagcccgaggtggatggccgaagggtaggcgtcgttggtcgactgcgaacagttgacgtggtcgttgggcgagcagtactgatattcgccgcgcgcgtgccccatgatctccagcacacggttggcgatgacctcgttggcgttcatgttggtcgtggtgcccgcgccgccctgaatcatatccacggggaaaaactcgtggaacctgcccgccatgatttcgcggcaggcctgcgatatggctccgaaaagttcgtcggagagaagccccatcgcgtggttggcgatggcggcacccagtttgacgatggccagcccctcgatgaaacgcgggtattcgcacaggcggaatttgctgatggcgaaattctccagtccgcgcatggtctgcacgccgtacaatacgttgtccggcacttctacacaaccgagcaggtcgcattcggtgcgtgttttctttgattcgtttttcatatcccttacaatataaaaatatttcgacttgtttctatttcacattaaaagctgaaagcagcagaaagttaacaattatttctcaaataaagaagtatttcgcattttcgtgccaaaatcgacgagaaggacggtggagaagcagggcggaggtatgccgtgcgggcgccgatttccccggaaaataaaccgcacggtcacaaccgccaaataaatttggcagtcggcgcagcttgtattatctttgcgaacaataaattcccacttaggcaggcggccccggcagcgtgcaggcaaagtctgcacctgcgcccggctccgcagcccccgtacgggatttgcacgactttataatccggaaaaatatgaaagcagctatcataggttacggcaagatggggcgcgagatcgagaagatactcctcgaacgcggccacagcgtagcgctcgtgatcgacacggacaacgcgtccgacctgaacgccgccaacctcgcacaggcggacgtggcgctggaattcaccatgcccacgaccgcctacggcaatatccgcacctgcatcgagaacgccacccccgtggtgagcggcacgacgggctggacggatcgtctgccggagctccaggaactgtgccgcgagaagggcggggcgctgttctacgcctcgaactactgcctgggggtaaacctgatgttccgcctcaaccgccaactggcggagatgatcggccgcgtgggcggctacggcgtacgcatcggggaggtacaccacacccagaagaaggatgcgccgagcggtacggccatcacgctggccgagggcgtcatcgccggcctgcccgccaagacggagtgggtgaactacgccccggggatcgaacacgccgcgaaccgcatcggaagccccgcggaagcgacgccggaacaagtcgtgatcggctccgtacgcgagggcatggtaccgggcatacacaccgtgacctacgagtcggaggacgatattctcgagctgaaacatacgattaagaaccgccgcacgttagcaatgggggccgtaatagccgccgagttcctttgcggcaaacagggcgtctactcgatggacgacctgctgaaataagataagattaggacatgggaaagatcaaggcattcttccgtaacaaatgggtcggcttcacgctcgcctcgctgctctacacgctgtggttcgtcgtatggacgggcaacctctggatgctgctggggctggtggtgatcttcgacctctacatttcgaagttcttctaccgctacgtgtggtgccacaacgtgcgcctctgccagcggagcaagacctacaagaccgtctacgaatgggtcaacgccatcatcttcgccacggtggtggcgtcgctggtgcacatcttcatcttccagatgtacgtcatccccacctcgtcgatggaaaagtcgctgctgatcggcgactacctctacgtgagcaaggtgacctacggtccgcagatgcccaacacgccgctgtcgttcccgttcgtacaccacacgatgcccttttcgaagacgaaaaaatcgttctccgaggcggtcaagtggccgtaccaccgactcaaggggctgcgcaggatcaaacgcaacgacgtggtagtcttcaatttcccggcgggtgacaccgtactgctcgagaaccaggccgtgacctactacgacgtgctgcgcggctacgaagagtcgttcggcaaggaggagggacgcaagcgcctcacggagaagtacaccatcgtcagccgcccggtggacaagcgcgagaattacatcaagcgctgcgtcgccatcccgggcgattcgctcgaagtgcgcgacgggcaggtgtgggtcaacggatcgccgcaggagccgttacccggcatccagtaccagtatgtcgtacaggtcacgtcgcccctgacgcaatatgccctcgacaacctcggcatcacggaatataccggcaacggttcgatgtactacatgttcctcacggacgaagcggccgaaaaggtcaaggccctcggcaacgtgctctccgtgcgccgttatatctacacgcccaacacggacgttttcccgcagtgggcggagccgcgctggagccaggacaactacgggccgatctggattccgcagaagggcgccacggtgcagctcacggccgaaaacctgcctctgtaccgccgcatcatcgaaacctacgaagggcatgagctcgaagaacgcgacggacgcatctacatcgacggcgccgaggccggcagttacacattcggcatggattactactggatgatgggcgacaaccgccacaactcggccgactcgcgcttctggggcttcgtgcccgaagaccacatcgtcggcaaggcttcgttcgtatggctgtcgctcgacgcgaacaagtcgttcccgtcgaatatccgctgggagcgcctcttcaagaaagtacgctaaagggtggaagcaggggacagctatctgacgatcgcggcacccgccgaggcggcatcgagggagcggagcagcaaattcctcgcctatgcctatcccgtgcaggacgaggggcagatacgcgaaatactcgacgccctgcgcaagagatactacgacgccacacaccattgctatgcgtggaggctcgggcccgggggcgggaatttccgcgccaatgacgacggggagccttcggggacggccgggcggccgatcctcggacagttgctctcgaacaacctgacggactgcctggtggtgatcgtccgctatttcggcggcacgaaactgggcgtcccggggctgatcgcggcctacaaggagtcggcggccgcggcgatcggggccgcccggatcgtggagcgcaccgtcgaccgcaccgtccgcgtggagtttccctacatcgtcctgaacaacatcatgcgcgtcgtgaaggagcagcagccgaaaatcgtatcgcaggagttcgacaacctgtgcacgatggtcttcgccatccgcgaaagccgtgcggcggaactgattgaaaaactgaaaaaagccgggggctccgtccccgaagagcaataaatggcacacgaaaaatccatctatatcaaaggtgcgcgggtgcacaacctcaagaatatcgaggtggagatcccgcacgaaaagctggtcgtcgtcacgggcctgtcgggctcgggaaaatcgacgctggccttcgacacgatcttcgccgaagggcagcgccgctatgtcgagagcctctcggcctatgcgcgccagttcctcgggaagatcagcaagcccgacgtggacatcatcacgggcatcgcgccggcgatcgccatcgaacagaaggtcaacacgcgcaatccccgttcgacggtgggtaccacgaccgaaatatacgactacctgaagctgctctacgcccgcatcgggcacaccttttcgcccgtgtcggggcaggaggtgcgctgttacagcgtggacgacgtggcggcctacatccagcagcagggcgagggcggccgcgtcgtgatcgcggcgccgctcacgctgggcagggggcaggggatcatcgagaagctcacgctgctgctctccgacggcctgatgcgcgtctggacgaagggcgaaacgcggctcatcgaggatatcctgccccaggtcgacgaaaagacccgggcggaggagatcctcgtggtcatagaccgggcacgcatcgccgcggacgacgatacgcagacccgcatgcgggactccgtagcccgggcgttctcctacggcgaggggatctgcacggtcatcaccgacaagggcgccacggagttctcgtcgcgcttcgaggccgacggcatccagttcgagcacccctcggaacaccttttcagcttcaacaacccgctgggggcatgtccccggtgcgaggggtacggcaaggtgatcggcatcgacgaagacctggtgatccccgacaagagcaagaccatctacgaggacgccgtggcctgctggcgcggcgagacgatgcgcaagtggaaggagcagctggtggagaacgcctacaagttcgatttcccgatccacacgccgttccatgaactgacgcaggagcagaaacgcctgttgtggcgcggcaacgaatatttccacgggctggacgactttttcgcctacatcgactcggaacgccgcaagatccagttccgcgtgatgaaagcccgctatacgggcaagaccacctgccccgaatgcggcggcagccgcctgcgcagggaggcgctctacgtgaaggtgggcggcaagaccgtcgccgacctggtggtgatgccggtcgacgaactgatcgcgttcttcgccgggctggaactggacgggcacgacacgaagaccgcggcgcgaatcctcgtggaaatccgcaaccgcctgcaatacctggccgacgtggggctgggctacctgacgctcgaccgcctttcgtcgaccctctcgggcggcgaaagccagcgcatcaacctctcgacgtcgctgggcagcaacctcacggggtcgctctacatcctcgacgagccttcgatcggcctgcacccgcgcgacacgaaccgcctgatcaaggtcttgcagcaactgcgcgacctgggcaacacggtgatcgtcgtggagcacgaggaggaggtgatccgcgccgccgactacatcgtcgacatcggccccaaggcgggctacaacggcggcgaggtggtcttcagcggcacgctgccccaactgctcaaaagcaggaagagcctcacggccgactacctgaccgggcgccgcgcgatagcgccccccgccaccgaacgcggctggagcaactcgatcctcatcgaaggggcgcgtgagaacaacctgcgcaacatcgacgtgcggattccgctgggcgtcatgacctgcatcacgggcgtgagcggcagcggcaagtcgtcgctggccaagggcatcctttacccggcgctgcggcgcctgctcttcgacacgggcgtcaagcccggcgacttcgacggcatcggcggcgacgtgcagctgctcaggtcggtcgagatgatcgaccaaaaccctatcggcaagtcgtcgcggtcgaaccccgtgacctatatcaaggcctatgacgagatccgcaagctgttcgccgaccagccctacgcccagcatacgggactgggggcgtcgtccttctcgttcaacatcgcgggaggccgctgcgaagagtgccagggcgagggggtcatcaaggtttcgatgcaattcatggccgacgtcgaactggtgtgcgaggcctgcggcggcaagcgtttccgcgacgagatactcgaagtgaaataccgcagcaagtcgatctacgacgtgctggaaatgaccgtcgacgacgccatcgcgtttttcggcgaggacaaaaaagacccgacctgcaaacgcatcgtcgaacggctcaaaccattgcaggacgtggggctgggatacatcaggctcggacagtcgtcgtcgaccctttcgggcggcgagagccagcgcgtgaagctggcatcgttcctgaccaaggacagcgcccagggcggcgtgatgttcattttcgacgagccgacgacggggctgcatttccacgacatcaacaagctgctggcggcgttcaacgccctaatggaacgggggcacacgatcgtcatcgtggagcacaacatggacgtcatcaaatgcgccgactgggtcgtcgacctcgggcccgaagccggcacgggcggcggcagggtcgtattcgagggcacgccccgcaacctggagcaatgcccggcgagttacacgggaaaatacctccgcctgcgtacgaaattataacgaacaccgcccctgtaaaggcggaatttccccgacaagcaacaacaatggaattcttcacataccgactccccaacggcatcaggggcatccaccgccaggtgaaaagcaacgtggcgcactgtgcgctggtcatcaacgccggcagccgcgacgagcatcccgaccagtacgggctggcgcatctgaccgaacatgcgtttttcaaaggcacgcagcgccgccgtgcctggcaggtcaactgccggctggaaaacctcggcggcgagctcaatgccttcaccaccaaggaggacacgaccatacacgccaccacgctgcgcggcgacttccccaaggcggccgaactgatcgccgacgtagccttccgctcgaccttccccgagcgggaactggaacgcgaaaaggaggtgatcgcggacgagataaacacctacaaggattcgcctgccgacctgatctacgatacgttcgaggacatgctcttcgcagggtcggagctggggcacaacatcctggggcgcaagaatgcgctcgcacgctacgacggggaggcgatacgcgccttcacgggccgcacgcacaccaccgaccagatggtattctcgtcgatcgggaacttctcggccaaaaccgccgaagccgtcgctgcacgttatttcgccgggcaggcggcttcggcacgcggcttcggcagggtagccccggcaccctgcgcggccttcgaaaagacggtcgtgaagcacacgcaccagacgcactgcatcatcggcaaccgcgcctacggcatcggcgaggaaaagcggctgccgctggcactgctgattaacatcctcggcgggccgtgcgccaactcgctgctcaacgtcgtggtgcgcgagaagaacgggctgtcgtacaacatcgaagccagctacacgccgtacagcgactcgggcatcgtggcgatctacttcagctccgaaaacggcaatacggcgcagtgcatcgacctgatcgaaggggaactgcacaggctgcgcacgacgccgctcaccgcacgccagctgtcgatggcgaaaaaacagttcatcgcacagctggccatatcgagcgagagcaacgaagggtacatgctgggggccggaaaaagtttcctgacgcacgacgacgtggataccatggaacaggtctacgccaaagtgcgcgcactgaccgccgcacagctcaccgaggtcgccgaagaggttttctccggcatgtcgagactcatctataaatagagatatggaaaaggagatcgtattcgtcctgctcgacgatttcgcagactgggaggcggcattcctcgccccggcgctgcgggcgggcacgatgccgggacgcccggcatcctacggcgtgaaatacatgacacccgacggccgtcccgtccggtcgatcggcgggttgcgggccgcggccgactgcgacgcctcggcgctgcccgaagcgtgcgcagggctgatcctcgtcgggggtatgcagtggcagtcggaggcggcgcaacggatcgtgccgctcgtgggcgaggcgctggcacgcgggatcgtcgtcggcgccatctgcaatgccgtgtcgttcatggccgcacacggcttcctgaacggtgtccggcacacgggcaacaccctcggaatgctgcaaaagtggggcggggcgaactacacgggcgaggagctctacgaggagcgccaggccgtgcgcgacggcaacgtcgtaacggccaacggcaccggacaactggaattcacccgcgagtgcctactcgccctctcggccgacacccccgaggccatagaagcgtcgtacaagttcaacaaggagggattttgcggcagataatggacgcgctcgaacaatacatccacgaccacacctcgcccgaagaggagttgctgcacgagctcgaccgtgagaccaacctgcgggtcgtacagccccgcatgttgtcgggccatatacaggggcgcctgctggagatgctcgtgcggatgctccggccgcggcgcatcctcgagatcggcaccttcacggggtattcggcgctctcgatggccgcagggctcgaagagggcggggaactgcacaccatcgaggtggaggacgagctggaagaactggcgcaatcctttttcgaccgcagcccgcacggcgcgaagatccggctgcacatcggttcggcactcgacatcgccccggcgctgggcatggaattcgacctggtattcatcgacggggataaacgcgagtatccggactactaccggatgctgatgggggacggcggcaccgcccccctggttcacagcggctcggtgctggtcgcggacaacatcctctggtcgggcaaggtcgtgcagcccatagcccgcagcgaccgtcacacgcaggccgtggtagagttcaaccgcatggtctccgaagacccgcgggtcgaaaacgtgatcatccccctgcgcgacgggctgaacctgatacgggtaaaataagccgggaaatagcatatcggggagcgggattttttcgtacctttcgggaaaaatcagcaacgatggaactgagcgaattgcagcaacgggtagacgcatggatcaggcagtacggcgtgcgctacttcagcgagttgacgaatatggccgtgctcaccgaagaggtgggggagttggcacgcatcatggcacgcaaatacggcgaccagtcgttcaaggaaggggagaaatgcaacctcgccgacgaaatggccgatgtactatgggtactggtatgccttgcgaaccagacgggtgtagacctcacggcagcagtggaagcgaatttcgccaagaaaacctcacgcgacaaagagcggcacctgcacaatccgaagctctgatcccgaaaagccgcctgcccccgcaaacggccgaaggggtcgctccaaaatatctgccacaaaaaataggacgattcgactccggagaatagcccccggcgagcagcacccggcgagccgcaccgaacccttcacggaaaaccaccgcaacgggtcgccccgaaatgtcagccacaaaaaataggacgattcgactccggagaatagcccccggcgagccgcaccgaacccttcgcgggaaaccgccgcaacgggtcgccccgaagtgtcagccacaaaaaataggacgattcgaccccggagaatagcccccggcgagccgcaccgaactcttcacgggaaaccgccgcaacgggtcgccccgaagtgtcagccacaaaaaataggacgattcgaccccggagaaccaatcccgggtgacggttccggagaaccgacctgaaaactgcccgccccgtcaggggccgatccgaaaccacaactgcaccgcaccgcggcacaaaacaccccgcacagggccaaggcctccgtacggggtgtccgcttatggtaaatcggtaaaccggctgttgtcagccgtgcgccggcgggcgtcggcctgggcggagaccagaaagcggtttgacggcagtctgaggcggcgatccggtataacggagaccgggaagcggtctgacggcgagcgagcgtcggcatcgggtggcaaacctgagtatcggaggccgggcagccggcgggcgtcggcctggggtggcgatccggaataacggaggacggaaagcggtctgccggcggtctgaggcggcgatccggggtgccggataccggacaccggccaactgccaacgggcgtcggcagggtgttcgactatcgggaaacgtggggttcggcttcggaaatcttcagcgggacggcccgcatgaccacctggcgctgggcatcggaaagctctccgtaaggcatcccgaactgccgctgcgccaagtgggtacggatatcgtcgaatgcctgcgcaatgcggttctgaacatcgagataactgtcgaacggggtgtcgctcgccgtctgcaacgatacgatcccctggctcacggggtattccatctttccgccgcccggtaggtcgaattccgtcaccaccttctcggccagcccggggtcgtcggacacattgcgtacaaacgccccaacgcgcgacgtgagctcacgggggtcgatgagctccaatgcgtcagccgtcccgaccatcatcttcccgttcccgtttagcagcaccagaaaaacattgcgctccctgacccggatctcaggccgtaccgtagagctatcttcccccgcggcactgccgggcacgaccgccagcacgtcggcaaccacatttacgcccagggaagaggcggagcggggcggcagcatgcgcataaccatgcgctcatcggttccgttatacatgacccgcaggatattggcagcacgcaaggcttgttttatgtcggtcacaacgtccatcttcgcctctttccctgctataatccaggccccgacatcggcgggcgaacgctcgccgcgccaagccacgagcttcggctccagctcggcaacggatccggggcctccgttcagcaggatattgccatcgggcaatacctgtatcagggcggtattcagcgatgtttccataacattttccatctcgcggctccagccgaggccggaatcgccggccaggaaacgataccatttaccgaaggaaagcatggacgcattgctgaaaccggcatcgaagcactcgaagttccggccggcagggttcacgaccaggctgtcgcagcgtatttccgtaagcacatccttcaagaccgggtcgggcgttccatcccggaagcgggcctgtacgttaccggcgaatatcattgtccggacatccgacggataggccctgtcagagcggagcatctccagttgccccgcggcaccgaaggtcacggtcttgccgacgagggcagcagggctgccggatgcgtcggacgtcaggagcacctgcatgtccgcacggtcggactcgggaagtttggcgcgttcggccgcgacatagtccgccagtcggtcgatggatacgggacgcccgttgaacgtcaccgtcccgtcggcggagatatggatacgggaggcagtgcccggctcggcagatccggaggtcttggtcgtaaagctgcaaagcatcatcatcccggccaccacggggatggccgcaccgaagcgcacgaatgcgaaccggcgccttgtgaattgtgtcatcatggcaaatcgtttttttgtgagtgaatgattcaacccgcaggctatatccggattataaccgaagagttgacggaaaatgatcgtcctgtattccgtgaggccgtaccccgcatcgagcacgtcgcggtcggcctcccactcctgcacctccgaaagccagcgcccggcgatccagacaaagggattgaaccagaagaggctgcgcaccagttcgagcgcgatgcgttcggcggagtggcggtggcgcacatggctcgcctcgtggcagaccacgatctcgcggcggcggccttcgtaaccctcgcccagaaataccgtccgcagaaacgaaaagggcgtcccgacgcgaggattctccgccacggcatatgcgccgcaatcggtgatccgcgaacggcggcgcagacgtctgatcccgaggatgcgcacggcaaggatcgcaagcgacaccgcggcggtcagcaggtacaatgcggccacggcgatgcgtgccacgcgtccccagtcggtggcaggggccgttgtgcgcacaacggcggccggctggcccgcctccgcgacgaaaggttcttcggcaggcgggacggcctgtgaggcaaccagcggcagcggatcggcctccgtacgggcggggtagagggggatatcgagcgcggggatcgccgccgaaagcagcattgccgccacgaggtaacggcgacaggccgcgaaagagactttgcggacgagcagcagccggtagaatgccagcagcataccgctgcaaaagaacacttcgagcaggtacagggcaggggatttcatcacttgcggtttttgagcatgtccagaatggcgtcggtctcctccagcgaaatggccttgtgttcggagaagaacgaaaccagccggctgacggaaccgccgaaaaaattattcagcacggtgtccatatagcggcgcgcatagtcgtccttcgagacgagggggtagtattcatgggtcttgccataggccttgtgtgcgacgaagccctttttttcgagaatgcggacgatggtcgaaacggtattgtaggctggtttgggttcgtccatctcgtcgaggatgccgtgtacgacggcagcacccctgttccacaatacctgcatgatctccagttcggcacgggtcagttcctgcggtcggttctttactattcctgtcataactacacttttagttgatttgcctgcaacgaagataaaactaatattttagttatacaactatttttttaattattttgccggaaaacaaaaaaactgcccgcaatgcaatgcggacagagtatcgggcgaagggcagccccggggctattcagccaactcgacgcagatcgcaccgtatttacccgccagcccgtagatttgcacggcctcgacgggcagcatgtagaaataacgcatgggcactgcggcatctaccgaaaaagcatcggtatggcagattttcagccacgattcgatcgtcgagggctggccgccgaagaccaccaggggtatccggtcggggtatacatccccgaggacaaccccctggtcggtatcgtaacgtgccattgtcccggggtcggtgtggacttcgagcgtacgcaggaacagcccgtcgataaactggaatacgctgcccgggacacgtaccccgtcgagcacatagacggctttaggagacaaccgtcgccacagctcctcgggcacctggaacatggacacatcaccgccggctcgacgtaccgaatcatactcgtcgcgcagggtataggtcgcaatgtgcttgggcaccgtgcgccgtgtccgcgcggtttcgtcatagatacggttagaccaggtataccccgcaacattgcccagcaggtgggggcgggcgccctttttccggtcgcgctcggtaaaaaatttcagcagccgcaccttttcgcgccgggtggagtcggtaagtttcatgcggcgatcccggattttgaccttgcggacgttccacaaggtcacggcgtcgtaagccacggcctccgtagtgcgtttccggttgagtttataggcaaaggggcggcctgcgacggcagaatctacggcgacggcgggggagggctcatcggcaagttcctcgcgctgcgcctggtcgaagcgcagctccgcctcgtgcttctgcggctcctgcgccgacacgccatgtacggccatcgcggcgcccaacagggcgaccagccggataaacaggtttttcatgctacggtcgctttacgctactaaaattttagtaaaaataaaactaaaaatttagaaatacaaattttcggggcaaataacggcctgggaatagttggaaatggccatgaaaaagccccggcaaaattgccggggccttatgcagcagggtacgcggctactccagcttgaggtctctcttgatgccttcgatcttggcgtcgagctcggcctgcacctcatcgaaatcggcaaccgacgccaggggagccttcacgccgaagtagaacttgatcttgggctccgtgcccgacggacgcaccgacacggtcgtgccgtcctcggtgaaccactggagcacgttgctgcgatcctgcacgatcggggtcatggcgccgctcttcacgtcggtcgtttcgagcgtcaggaaatcgttgatcttcacgacgggcgatcccaggatcgtcttgggcgggttcgcgcggaattcgaccatcatcttctggatcagttcggctccctccttgcccttgcggacgaccgacacaagcccttcgcggtagaaaccgtatttcacgtaaagctcctgcagccactcgtagagcgtcagacccatcgtatccatggcccatgcggcggcttcggcagccagcgagcaggccgacacggcatccttgtcacgcacgtaatcgccggcaaggtagccgaacgactcttcgccgccgccgatatacttggccttgccctcgttctcgcggatgatcttggcgatatacttgaaccccgtgaggcagtcgtagcacttcaccttgaaatagtcggccacggcattagccatctgcgaggtgacgatggtcttcacgacgtactggttcccgtccagctcgccgcgctcggcccagcgggtcagctggtagctcatcagcagcaccaacgtctggttgccgttcagcagcacgtactcacccttcttgttgcgcagcgcgacgccgatacggtcggagtcggggtcggtagccaggacgaggtcggccccctccctggccgcgaggtcgatagccatcgacatggtcttgcgctcctcggggttgggcgactcgacggtggggaagttcccgtcgatgacggcctgctccttcaccatgatgatgttcgtgaagccgaatttccgcagcgacgcgggcaccaggcggacgcctgcgccgtgcatcggggagtagacgatcttcatgtcgcggtgcttcttcacgctttcgggcgaaagcgacaattcgtgcaccttatttaaataaatctcgtcgaatttctcgtcgaggatcgtgatgttttcgggattcttacccgtgagtatcatgtccacgtcggtgatcttctccacctcggcgatgatgttcttgtcgtgcggctcggtaacctgcgcgccgtccgtccagtaggccttgtaaccgttgtattccttggggttgtgcgaggcggtcacgaccacgcccgaatggcatttcagctcgcggatggcgaagctcagctcgggcgtcgggcgcagcgtatcgaacaggaaaacggtgaatccgttcgaggcgaaaatgtctgccacatgctcggcgaacatgcgcgaattgttgcggctgtcgtggccgatcgcaacccggatctgctcgcccgcgaagttcttcttgagatagttcgaaagcccctgtgtagcagcccccaccgtatagacgttcatgcggttggtacccacgcccatgatgccgcgcaggccacccgtaccgaattcgaggtctttgtaaaaactctcggtgagttctttcatatcgttatcgatcaggtatttaacctgctttttggtagcttcatcgtagtggccgtcaagccatgcctgcgcttttttcagcaccaattgttccagttcgttagccataagttttattggttttatttataacttgattataggactgcctaaaaaattgatatgcaaatatacgaaatttatttctattattcactatcagggagttaaaattgaatgcccggaaaccgttgtttttctatatataaaaaaagtgaaaatacaacacctttttggaaatctttttgcaaaattattcacaactttgtcacatcaaaaacagtgcaacccttatcatgttaaacaacacgcagacatatagcgatatgtggcagaactgccttgaccggatcaaggcacagacctccgaagaggagttcgtgaagtggttccagccgatcgtaccgctggagttcgacggcaccaacctgcgcctgcgtgttcccaacgagagctacgtacaccagatcgaaaagaactacatcccgttcctgcgtccgatcatctcgcagctctacggacagcagacccggctgcactatgccgtgccgcgttcgacacccccggccgtacccgttaccgccgatgccgacaccacggccatctcgcgtttcaacacgcagaccaacaccgcaaatataaagaatcccttcgtaattccggggctcaagaagataatcatcgacccgcagctgaatccggggctcacgttcgcgaccttcatcgagggcgaatgcaaccgcctggcacgttcggcgggcatgtccgtggccgtaaacccgggcaacaaccccttcaaccccctatatatatatggggactcgggactgggcaagacgcacatcgtacaggccatcggccacgaggtacgccagcgccatcccgagttgcaggtgctgtatgtctcgatgaacaaattccaggcgcagttccagaccgcgtacaagaacggcgaaatccccgatttcatccatttctaccagatgatcgacgtactgatcatcgacgacatccaggaactgaccgggaagacgggcacgcagaatgcgttcttcaacatcttcaaccacctacagctggcgggcaaacagctgattctcacctcggacaagccgcccgtggagctgaaagacatcgaacagcgcctgctgacgcgcttcaagtggggattgtcggcacagctcaacacgcccgactacgacacgaagctcaagatcatccgcgtaaaggcgcagaagttcggggcgcagatttcggacgacgtggtggcctacctggcggacaacatctcggccaacgtgcgtgagatcgagggagcgctctcgtcgctggtggccaacgcctcgttcctcgggcgcaagatcaccacgtcgctggccaaggagatcctgaaggtctacgtgcagctctaccagaaggagatcacgctcgaccacatcatcgaagtggtgtgcgaatacctgaacctcgatttcgctcgcttcaactccacggagcggacgcgcgagatcgcccaggcacggcagatcgccatgtacctcgccaaacagcacaccaaggcaccgctcacgaccatcggggccgccatcggaggccgcaaccacgccacggtgctccactcgtgcaaggccgtatcgaacctgatcgaaaccgacaaggcgttccgccggcaggtcgaggagatcgaaaagaaagtgcttgcgcaataaccggttacagggaggggcttccgccgggagggggtgcccccgccacgaaggcgcatcgcacaaagcagccccaggccggaacaattgcggacacataccgtaaaatccaaacagggagccgtgacaggttttgtcacggctttttttttatatatttgcggcctgggcaggcgggcaaacccgccgcccgcaaaacatcctgaaaactccggaagcccgccacgggcgcaaccggaaaaaacaagcgaccaccgcatggatcaacccaaactcgaacgcctgctgcggctgatgaagctactcacggcaaacaccacctacaacgtcgaccagctggccgaacggctccagatgtcgcgccgcaccatctatcgctacatagacaccttccgcgaggcgggtttcgtcatcaaaaaagcgggcgactgcatccgcctcgacaaggagtccccgcacttccgcgacatctcgcagctcgtgcatttcaccgaagaagaggccgtgatcctcaagagcgccatcgagaacatcgacgacacgaacctgctgaaacagaacctcaaacgcaaactctactcggtctatgacaacaagacgctggccgacacggtcgtgcgcggcaagaacgccccgaacatccggacgctgatcgaggccatcgaccggcaacggcaggccatactgcacagctaccagtcgccgcacggcggggaagtccgcgaccgccgcgtggagcccttcgccttcacgaccaactacgtgcaggtgtggtgctacgatcctgaggccggggcatgcaagctcttcaaaacctcgcgcatcgggtcagtggagcttaccgcagaggcctgggaacacggggcggagcaccgcgaagggttcatcgacgtcttccgcatgcacggtggcgcacgccaccgggtgcggctggagctggggctgctggcctacaacctgttatgcgaggagtacccgctggccgaacgcgacgtccggccgctggggcggggaagatggctgctcgacacccaggtcgccgggtttgccggcgtgggacgcttcgccgtcgggctgctggacgacatccgcatcgtcgactcgccggagctgaccgcctatatccgcgattatatcgcggcaaacaagttgctataagattttttcgtatatttgtaatacacataaaacatccgacatcatgaaaataaacacgatcgcaacgctgggtgtgctttgcacggcattagcagccggttcctgctgccggcaaacaccccgaacgactgaaacgctgccggcagcagcggccgtcgtactgcaggattacgggacggaaccgaccgtcctgaacatcgaaagctacacgctcgggaacgagaatttcaggacggtgctctggacgggcaacaacctgcaggtcacgctgatgacgattcccgtaggcggggatgtagggttggagcagcacatgggcatcgaccagttcctgcgcatcgaagagggtatggcacaggtgatgatgggcgacagccaggataagctcgacttcgtacgcgacgtggaagacgactatgcgatcttcgtcccggccgggaagtggcacaacatcgtcaacaaaggcgacaagccgctgaaactctattcgatctacgccccggcggagcatccccacggcacggtacacaagacccagcaggaagccatggaggccgaacacgcccactgaccacagggtagggttccggcaaaaaaaatgcatgtttcgcaaaaaaacatgcgttttttaattccgtgtcacaagttgtcactacggcgctgttactttgtaccgtgaacctaaaagaaaacgattatgggaacagcttacaaaatcaggtgcaggcactgcggggcgcagttcgagcaccacatgcaaccgggctacggcgtactgccggtgtgcgtgggatgcggcgaatatgtcgaaaccgaaacggcgatccgctgcccggcttgccacaagaaactcaacaccacgcaggaagagttcaacgaacagatcgaggtgacctacatgtgggactgagcggcgcgtggcacacgcggcagggcaacaaaaaagagtaggcacagaagggtgaaaatccgcggaaaattcctatctttacccaaaataggcagcgctcgggccttgccccggaaacggggtacagcgcagggtctgcactatttttgcgaaaacgaaccttttttcggaaacgtatgacacagttacaggcgggggatatggccccggatttcaagtccacgacccaggacggtgcggcgctgacgctggccgacctgaagggacaacgcacgatactctatttctaccccaaggacaacacctcggggtgcacgctcgaagccaagagcctgcgcgacggcagggcagaactcgcccgcatgggattccggatcatcggcgtaagccccgacagcgaaaaatcgcaccggaacttctgtgccaagcacgacctgaatttcacgctgctcgccgacaccgaccacagcgtctgcgaagcttacggggtctgggccgaaaagtcgatgtacggccgcaaatacatgggcgtactgcgcacaacgttcgtcatcgacgccgaggggcggatcgaaaaggtattcaccaaggtcgacaccgcaaaccactaccggcaaatcctggacgcttacaaataggacggcaccaaccgacgacaggcatgaaattctttgcgggcatactacttgcggcaggcagcctcttgggcaccttgcagcttccggcacaagggcggccggcagcactcgggcatgagcttgcgcaaagccccgcacgggaatccgcagcggagccggggcgccaccaaccggcggaattcgcagcaggatctccgggcgtgcccgcgacagaacttccggccgagttttcggccaaggcgcatgccgccgcaagctcgctgcagatgcttcccccggaagagttcgggctccagtggctgcaggaggaggtgaacccctacctgcgcgcacgccgcaaactccaccgcaccatgcaggagcgggctgcgcaacaggaaaagtccctgatccggtcccggcagaaatacccgcacgacctgaacaggcgaaccgggctctggggaataggcaacacatctgtcaacaactggagccccttccaggatcggatgctggatgcccggacaatcagcttcccgatgccgcgcggcacgaaagccgacaagcgcaccgaccagatgaaagcgctggacaggatgcggcaacaaaaacgataaaaaaaaaattcaaataacgaggaactacacaaaatggcagaaaaagtacaggtaaatgcggataagctcaaagtgcttaacgcagtgatggaaaaaatagaaaaggacttcggcaagggctcgatcatgcgcatgaactcgcaggaggtgaacgacgtaccggtcatcccgacgggttcgatcacgctcgacatggcgctgggtgtgggcggctatcccaaaggccgcgtcgtggagatctacggccccgagtcgtcgggtaagacgaccctggcgatccacgccatcgccgaggcgcagaaagccggcggcatcgcggcgttcatcgacgccgagcacgctttcgacagcttctacgcacagaaactgggcgtggacgtcgacaacctgctcatatcgcagcccgacaacggcgagcaggcgctcgaaatcgccgattcgctgatccggtcgagcgcgatcgacatcatcgtcatcgactcggtggcggcgctgacccccaaggccgagatcgaaggcgagatgggcgactcgaagatgggccttcaggcccgcctgatgtcgcaggcgctgcgcaagctgacgtcgagcatctcgaagaccaagacggtctgcatcttcatcaaccagctgcgcgacaaaatcggtgtcgtctacggtaatcccgagaccacgacgggcggcaatgccctgaaattctacgccagcgtgcgcatcgatatccgccgcatgtcggtcatcaaggacggcgaggaacagttgggaacacgcaccaaggtgaaggtcgtgaagaacaaggtggcgcctccgttcaaacgtgcggaattcgacatcatgttcggcgagggcatctcgaagatcggcgagatcatcgacctgggcgtcgactacggcgtggtcaagaaagccggctcgtggttctcgtacggcgaccgcaagatcggccagggacgcgacgccgtgaaggagctgctgaaaaacgacgacgggctccgcaacgaaatcgaggccaaggtacgcgaggccatgaagacacctaaacaataaggtatggattatactgccgaggatgaagttataatcaaggaaaagtgggacgacctgctcctctcgtgcaccaagatatgtaagaacgacgaggactggaatttcataaaaagggcatttttcctggccaaggaggcacatcagggggtaaggcgccgctccggcgagccatacctcctgcatcctattgcagtagccaagatcgtcatcgaggagatcggactgggcgtgaaatcggtcgtggcggcattgctgcacgacgtcgtggaagacacggaatacaccgtggaagacatggaacgcatcttcgggccgaaaatcgcctcgatggtcgacgggctgaccaagatgtcgggcgtgttcaacgccgaaacctcggaacaggccgaatatttccgcaaggtgttgctgaccctctcggacgacgtgcgggtcatcctcatcaaaatcgccgaccgcctgcacaacatgcgcacactgggggcgatgccgatgaacaaacagatcaagatcacgggcgaaacgatctacctcttcgcaccgctggcctaccggctggggctttattcgatcaaaagcgaactggaagacctctgcatgaagtaccggttcccgcagcaatacgccgagatcacacagaaactcaatgaaaccgaggcgtcgcgccaggagttcatcagcaagttcaacgccccgatcatcgcggggctcaaccgcgacaacatcaactacgaaatctcggggcgggtaaagagcgtctactcgatatggagcaagatgcagcgcaaacagatccccttcgaggagatatacgacctgtttgccatccgcatcgtgttcaagccgctgccgttcccctcggaaaagacccaatgctggcaggtatactccaccatcacggacatctacaccccgaaacccgaccggctgcgcgactggatctcgatgcccaaggccaacggctacgaggcgctgcattcgaccgtgatggggcccgacggcgtatgggtcgaggtacagatccgcacccagcgcatggaggacatcgccgaaaggggattcgccgcgcactggaaatacaagcatgcgaccatctcgcaggacgaggacgaattcgacaagtggctcaaacaaatccgctcggcgctgaacagcccgacggagaacgcggtagacttcctggacaacttcaagttatcgctgtatacctcggaaatagtggtgtttacacccaagggagaagcccgaaaaatgccgttcggagccacggcgcttgatttcgcatacgacatccactcgaagatcggaaacagcgccatcagcgccaagatcaaccacaagcttgaaccgatcactacgcagatcaacagtggcgaccagatcgagatcatcacggccgacaatgcgcgtcccaagcccgaatggctggagatcgtgactacggccaaagccaagcagtcgatcaagagcttcctcaaacgcgagcggcagaacaacatcgagcggggtatgcacatgctcgacgagaaaatgaagtcgctcaatatcaagctcagcggccgtgtcctgcgcaaaatagtccccatctatgagagtaacaacaaggaggaactgtacagcaagatcggggcggggatcgtcaacctcgacaacctcgaaaaagtcctgaaggtcaactccaaaagcaaaatcctcaaattctggacgctgttcatcaacaaaaaggaggaggaagacggcgacgacgccaccgccccgggcgaaaccgccccggaaaaggaaccggcggcagagcctcagttcgaaatcgccgaatgctgcaagccgatccccggagacaaggtcgtggggtaccgcgacccggcgacgggcaacatcatcgtacacaaagccaactgcgacgagctggacaggctcgcagcgcaattcggcaagaacatcgtcaaggacgaaatcaagtggtcgcagcacaaggccatgtcgtacctggtcaccatcgaactgcggggcatcgaccgcatgggcatcctgctcgacctggcgaaggtcgtgagcggcgatttcagcatcaacatccgcgaggtcggcatccacagccacgacggcatcttcgagggcagcataagcctctatgtgaaggatgcagagggcctgcacgacgtgatggacaaactgcgcaagataaaaggtattgaaagtgtcaaacgaaccctgagctgatatggaaaacttctcgaccgtcctatggatcgtagtgatcgcagcggccatgatattcaatgtggtatcgcagagccgcaaacaggcgaagaaacaggcccggcaggccggcgacaggcacgccggcagcgaggcatggccgtcatgggatccggctgcgggatcgcaaccggattcaagggaggacactcccgtccggcaggaggtgcagccggccgtggcgccgggggcaaccccgacgatggcgccgtctgccggattcgaagatgcggccccggcggccggttccgggcacactgcacccctcagcgggcgcagcgacgtgcaaaaaggccgcatgacagccacggagcatccccacgccgcgtatgacgacgcgcaggaggctgctacagccgaaataaccggggatttcgacctgcgcagggctgtcatctattcggagatactcaagccaaaattcgacgaataacgggaaggaggatttacctatgacacccgaggagactaaatggcgggcaagcgtttacgcccccgaaaaaataaggcggaagctgaagctgcaatactggctgctcggcgcctggagcgtcctggccggagcatgggtcgtagtgttatgcacggggagggacacattcggctggatgaccgccgtggtgctgctcgccggttatgccaacatactgctcggcatcgtcaaccacaggcggctcctggccgggaaaaagccgttttagagtgggtggggacaacaaacgcaaacggcagaaagaacgcaaaaaaatacggaaatcacaaaaaacgaagctatgtcatccatctttacacgcatcattgccggcgagatcccttcgtataaggtcgccgaagacgaaaactattacgcattcctcgacatcaacccgctgaccaaaggacacacgctggtggtacccaaaatggaagtggactacattttcgacctcgacgacaagacactggccggcatgatgctcttcgccaaaaaggtcgcggccaaaatcaagcaggaaatagcctgcaagagggtagcagtggtcgccttagggctcgaagtaccgcatgcacacatccatctgatccccatacaaagcgaaaacgacgtggatttccaccgcgaaaagctcaaattgacgccggaagagttccgggaaatttcagcaaaactcttcggataaggagctgtttacaaaaatataattacttatatcataagcggatagtgggttattaacactatccgcattctttttatttaacataatatttgcgaaaagcaggagtttgctgaaaaagcacttgctgttaccgggaataccgggaaaaagcgaaatttttatcgaaaaggggtagcttatttacaaatgtaaacatcaaaaagatggatactttccaattgtaattacaagtataaatcaacatcaactgtaattcctgttgatttatatttttgtaaaaacagtaggggagtgcagacaaagcctgtccacaatgcaaaatacatgagttaaattgttaaacaaccacacacatacacactaaataccagcaatttatactatttatatacaaattaagttaaacaatatcgggatggatatagagtggttgtgcaaaacagacacccaagagtaattttagcatataattatgctatttatcagcaacatacatatatttatattaactaatagtggataacaatctgcccggatgaatttaacgatattatttcttttacagatgtaaacattatcaacaattattaacattttacaaatgtagattttacttgttttacaaaagaaaaaactttatatttgtaaaaaattacgcaaatgagggaaaaattgctcgatttgatgaaaaacgaaggattgaagccgagccagcttgcagagcagctcgagatcaatcccgccggaatatcccacattctcgcaggacgcaacaaaccgggcttcgatttgctgcaaaagatcctcaggaggtttccccggatcaatccggattggctgctgctcgattccgacaaaatgtatcgggatgaatatccggcagcctcgtcgggccagcagatctcccggacaacggcggcacaaactacgccccccgaatcggacaacgaccttttcacgccgacactgccgggcggacttcgagcggatgaaaaacaaacgcaggaggccgacaggcatgacggatctgcgacgcagtttccgccggcgttgttcggcaaagcgaatgtcaaacgcgtcgtcgtgctctatgatgaccagaccttcgaaagttttacgccatcgacaaagcgttaaaataaatccatgcgggcagatgcccggaatattcgattctcggaaagataaaatcaggaagaaaaattcggacaaacccggattctgcgttgaaacggacggcacgtggtctattcccgaaacacttggcaattacttattaataggtaaggagaaattcctggcaacggtacaatcgcctgtcttcataactcgccttatttaacataatgttaatattaattcaatcgccgaaatgcgaatccccctgaaacggcgataacattacgccccaaaccctgagcgcctctatgagactggaaacgtgcgcctaacgggttactgttccgcaacgtaatagcgatccctgcgtttcaaatatcgcctgcgcaggaatcaagctacgcttcggtcgtgctccaaatcccttgcaggatatgcgcgcgcaagcacgccggagacacaaaagcacaaattttatccgcctacataccaacaccttaacaaaataccaatacggcacatggcgatcgtatgtcatttccgtgtttttttgctatttttgtaacggttaaatcaaaacaaatggctggaaatgactgctgtataaaacgctcggcaattatcctcggggctttcatgctttttttcgtgctgtggtatttcaatatagccgtgaggccgttcgaaggctgcatcggcagttcgcagacgctccattatacactgaattacctgttggcggggcttattccgacctgggcattgttcctgctgcacgcacgccgggacatcgcctcgtcgatgggcctgtcgcacggtttcggcacagggctgctcttcgccgtaacggcgacgctgccgatgatcgccgggtatgccgtcatcggcgaattcgaccgggaactgactgccgacgcagcatttacctggatattcattgccgggatattcgaggagctggtatacaggggattcgtcttcgggcagctcttccgatacgcccgttgggggtttctgcctgcagcactattgacggcactggcgttcgggtcgttgcatctctaccaagggcacgacttggcatcggcattgacggccttcggggttacggcactgggcagcatctttttcagctggctctatgtcgaatggaactacaacctctggagcgtaatctggctgcatacactgatgaacctgccttggatagtattccgcgtaagtacgagcggcgccgtcggcgacacaggggccaacgctttgcggctctgcaccataatcctggcaatcggcctgactgttgcatacaagcggaaacggggactatcctaccggatacagatcaatacattaattaccaacaagatacaaaatgcgtaaaatctacatttccctactcatagccatcctgtgcggcggctgcacatctcgccgcccggcggacggcgagccgctgtacgtctcgatcctgccgctccggagcctcgtacagggaatcgtcggcgacgatttcgacatcgaagtactcgtaccgccgggagcgagccccgaaaccttcgagccgacaccccggcagttcgtcggcctgaacaaagcccgcatggtcttcaatgtcgggcttatcgacttcgaaaccacgctgttggcaaaggtcgaagaccaagcgaaggtcgtcgatctcagccggggcatcgagctgatcgccggcacttgctcgcacggcagccacggccatacgcatacgcacggcatcgacccgcatgtctggacatcgccccgggcattgcagaagatggcggaaaacgcctatgaggcgatccggaaagcctatcccgactcggtaaagtatgaaacgaattacaggctgctgcaacaggaactgaaggcactggacgaacggacggcggcacggatcgccgcaagcgacgtggaatatttcatcatctaccaccccgccctcacctactacgcccgggactacgggttacggcagattgccatcgaagccgacgggaaggaaccgtcggcaaaacaactgacacagcttatccggcaggcgcgcgaagacggcgtgcgacgcatcctctaccaaagccagttcccggcatcggccgtggaggtcattgcccgcgacatcgacgccgagtatgcggaggtagacccgctgcgtgaggacgtgatcgcaaacatcgaggagataaccggcataatcacacggagatgaacctggtgacattacaccacgtcggcgtagcgtacgacgggtacgaggcgctgaaaaatgtcgacctcacgatcgcacaggatgatttcctgggaataataggtcccaacggaggcgggaaaacgacactcgtgaaggcgatcctcgggacggtaccccacaccggcgaggtcgtgctctccccggagttgttccgcggcaaggagcggctgatcggatatatgccccagatcagcaatttcgaccggacattcccgatctcggtgctggaggtggtattgtcggggctgcaagggcaccggggcttcgtttcccggtacacgaaggcagaccgggcgaaagccctccggctgctcgaaacatcgggaatcggggagacggcacgcagccccatcggcgaggtttcgggcgggcagatgcagcgggcgctgctgtgcagggcggtgatttcagacccgaagctgctgatactggacgagccggcgaatttcgtggacaacaaattcgaaaacgagctttaccggacgctgcgcgagttgaacagccggatggcgatcgtcatggtgtcgcacgacatcggcacgatcaccagcgtagtgaaggagatcgtctgcgtgaaccgccgcgtgcaccgccaccattcgaacgtcatcaccgaggagcagctgcgcaattacgactgccctattcagatcgtatcccacgggcatatcccgcacaccgtgctggagcaccatccgggcgactgctgctgcgatcacgactgatccggggcgggacagcgctcacgcctgcctgcagctggggcgcgatgccgaaggccggctccgccagccgccgcccaaatatacccgccgcagaccggttacacggtcttcgcattcccgggcagggtgatgaatttcgtcaggaaagccccgaaaaggtaaagtccggccagaatccacacgacgccctcgccgccgaccagccggtagaacaccccgacgatggcggggccgacgaaaaccggaagccccgcaccgaggttcagcacggaaacggctgcccctttatcctttttgacaagcgagggcatcagggccgacaacgggacatatccggcaagcagggcgccccagagcacgccgacagccatcaccacccagaaattgcccgccgaaaactgcggcgaatagtagaacagcagcgtggtgataccgcagcccacgccgccgaaccagataatggtgttgcgccaccccactttgtcgccgacgaagccgaaaatgaggttgaagacgatgttggccgtgaaaatagtgccccagatccggagccactcggtcgtcgtgaacccatagtcggccatatacatcgggaggaaaacgggaaaagcgaattgcgccgtggtgttgattacacggacgatgccgcccaggagcaccttcggttcctgcttcatgatggtgatacccttcagcaactccctcatcttctcacgggtaccgcccgcaacggcaagccgtttctgcgacttgttcatcaccaaggcgaaaaacgcccccagcaaagcccagaatacggatgtccacagcgtattgatattgccgatgcgctcgatggcccaactggaatagtaggccccgaggacattgagtcctccggtaaatacgaaccagaaccagccgacggcctttccgaggccgtccttgggcgcggcataggcgatccagaccaaaaaagaataggcgaacagcggataaccgaacccgcgcagggcataggtcgcgagcatcagcgggtaatgcagcccgggcagcgacagaccgacgaagccgcaggtacccagcaggtagagcacgagcccggcgaacatcgtccgtttgacgccgtacgcctcggccaggacgcccgagaaccacgcagaaatggcgatggtcacgccgtacatggtgaaaagcccggcggattgctccagggacaaaccccggccgatgaggtacgggctcagccatccctgctcgatgccgtcgcccatcatgaaaataagaattcccaaatacgcccaggcaaggggtctgggcaagccgatcttgtcaaaaattgtccggttcatagatagtaagtatgggtttacgctggtctggggtttcgtcgatattccggcgtcatcgccgttgcgccctaccctttccggaaaattccggataaaaatagccgcgatgctccgggtagacaaaggaacaacaaacgaaatattaattttctttttacaacccaacaaatatacttatttttcataaaaaagcaaaaataagaaaacaaaacacaataataaaaagcaatccataaaccggggtgtttaatttcagtatagaaccggcatgaaaagcgcacgcgaggatgcgagggaggacagacgggaacaggggcgaaaagggagcgcgcgaggacgcgggggggggcagggaaaggataagggaggaacagacgcggtacaggaaaatacaacggggagaatcgcggagagaagtggcgggaaggatgagagatgaagcgagtaacaggcagggaagagtgccgggagcacagcccaggaaacagatgggaaaggctatcgggaaaggctttcaggagagctgccaatgccggatgaaggcaaaaaaagcggttccgccatgcagaaccgcccctaatcggaacgaacaggctttactttttcgcctcgttgatcttgctaagcttctcgaagagtttttcgaactcacccaccatctcggcacgcagcgcagcatagtgcttgcggacaagcgaggggttatgcggctcggcgggattgttcgccttggtgaaaaggtcgttgcggacagccacggcctcctgcatcacctcgaaaatctccgtctctttcgaaggctgaaaacaaattgccatatcgcagtcgaaaaccacctcttccagacgatagtcgatctcctttttcaggtaccttaaatttgccatattatcgtgtatttaaaaatttcctggacaaaggtacgaaaaagctttggattaccaaaggtttatcgggcggggtcgattattaaaaacttttattatcatttgcagcggttcggaaaaaggccaaccggggctcccgggatcggatcatcagaaaccggagaaaaaccactgcagctggcagcggagccgtttccgcatcggcatagattgcacccgccaccgatgcacacctacgaaaaaaggattccccggtcgcggggaatcctttttatcggcggataccgggctacatcctttcgagttcccggtaggtcattttgccggctttggcggcggccttggcggcctgtgcctcctccctggcgatcttgcgcgcggcacgttcctgttcgcgggcgatgcgtcgggcttcacggagttccttcttcgaatagtgcccggcctccttcaacgcttcacctgcctcgcgccgggcttcgcgaaggtctttccggtaatcggtatccccgggcatctcgacgatgatacccgttatcgactcgtcgacaacctcgcatccgcacggctcgcagccctgcccggcaggctggggtgcgattttgggcttagggatcatcgtgcgctgctcgacaatgctgcccgcaccgtaattgatcgtcagttcgacgcggcgaagcggcggcaggatatgctttatcatatactcccaagccgcaggtatctttttcagcgccagctccttggcatcggacgactgtttcccgtcgaggattccgagcacggcctgtttgtcgggtacgggcgaccgggcgaccagcgcacggcacatctcccaatcctcggcgacggaattgagcgtgacgtcgtacttcttcgaaaaaccatacttcttgtcaacgtaactcttgaaatcgcgggcacggttccgtgcgagggtctcgttgaacgcccggggcccgtcgggcgaagaatagcccgtgatttcgaccgatttgacatgcatcagcgtatcgcgcatgaggttgtccacaaaggcgttcagtccgtcaagttcgcgcgaattgccgtcgagcgccgcggaaaggctggccaggttgatctggtaacggatcgaataatccgtgtcgccctgacgcttcacaaggaacttgcggacgatgtaatcgccgtcggtggcctccgacagcatcacggtgtcggccgcaggcgccggcaccgcgctcccggcccgggccgtcgctccggcagcggcacacaacgcaagggatagagcgaatgttgtaaagattgttttcacgcaataatggtgttggttaattcttgccacgctattcgcaagattcgtaccacgttaaatgcccggatacggagccggataaggatttttcgttatatttgtaaaaccttatttaccataaatctatcccgacatgcaaatggatctcctcgacaatcccaaaatcaagcagataaaatcccgctatctgctgctcgcactcatccccgcagtgctgttgttaatcgcattcataagctgcacgacgatcgacagcggttcggtcggcatccgcttcaagaaatggtcgtctgacgccagccaatacggaggcgttctcggaacgtgcaaaggctgggtgtggtacaaccccatcacgcaaaagatcttcgaatacccgatctacgtccagcgcaaaacctacgaaccgttccgcgtcaacgccaaggacgcctcggaattcacgatggatccgacgatcgcctaccggctcgacccggacaaggccacggccgtattcaccaaataccgcaagaccctcggggagatcgaagacggttacatccgcacctgcatctacgaggcataccgtacggcgaagcctattacaaccgcgtcgtggcacaatcgctgagcccgctgctcgtgcagcaggacgccatcgacaaatgggacggcaaactcccgacatacagcggcggcggcgcattaccgttcatcaacatcgggaaatgacccggaactgcctgccgggaaataaccccggaggcggtacatgaggggagggcgtataccctcccctttttatatataaaggtatggatcgcattcgcacgggggagggaaatgctccacgcaaacatttacgtcttttaagcacacatttaaggcctgaatcatatccctctacgccaaaattgctacttttattaaataatgggagattgccggacatatctgagacatacttctgcggaacattcgctccgtaaggtcgatcattttacccccccccacgggactgggctcatagcaaactaacaatcaacgtattacacccatattcagggatgttctcaaaagagcatccctctcttgcgtttacctgtcacttccctttaatttataatacaatcctacaaaatgaaaagaaaaaactatgagatgccctccgtggaggaggtgctcgtgctcgtcgaacaaggtttcgccgcgagccaggtggaaaaaccggatgacgacacgaatgaatactgatgtgtccgttcgggaaacttatgtgtatgactaaaaaaataagacgatgaaaattaaacagttatcgtatttattgcttggggcagccctgtgcggctgtacgacggacacaacggaagaggcggggacgaagaaaaccgatgcggacttcatcgtacgcgccaccgtcggggacgacgggcagaccagggccgatatgacggaggacgggctgaggttctcgttcagcgccgaggatgccgaccggatcggcctgtacctgaactatccggccaacgactggacggatcagaacctctgtttcgaagccgtgaactcgcagacaaaaggctgggtggatttcaagcaggtgtcttcctcgacatttgccatccaggaagggctgaatgtttacgcctactacccgtacgaagaaaacgaagcccaggtatcggggacgacggacggcacggccgattcgcgtgcggccgtgtcgagcaactgggcgggtacgcgcaacctcgaagtcccggccgaacagcagcaggttgccggcgacgacttttcgaatctggcaaaatactatgtactggcggccgtgcccaccacggtggtcaacgatacggacaatactcccacggtaaaactgagtttctcggggatattcgcgctgctccgcatccggctggtgaacgatacggacaacgacgtaacgatcggccgggtcgatttcgaggcagcccggaaccagcccctgacggggctctatacggcagacctgacggcgaacccccaattcgggaatacggactacaagaccacggccgtagcgggcagaacggacaacaaggtatcggtgacgctcgccgccccggcgaccatcgcggccggaggagacacctatatttacgccgtagtacatccgctggtggtcagctactgcgtgattacggcatggacgaccgacggctacaagttcgtggagcgcaagaccttcaacgacaataccacggtatcgttgcagcgcgacatccgcaggacgttcagatgcacgatgtcggacagcaacaagctcccggtggacgccccgtcccaggatgcagaggggtattacgagatcgactcctacgaggacatgctgtgggtttcggagaatgccaccgacgctgcgaagaaatataaaatgacgcaggacatcgacatgacgggcaaaatctacaccccgatcggattcggcaccaattacaccgaaggcgccaaggcacaggagttcgcaggcgaattcgacggcggaggccatacgatcagcaacgtcacggtcaatccgtcgtaccacacctgcgtggggattttcggggctacgaaatcgggcgccgtgatcaaaaacctgaaggtcgccaacctcacctacgagagcgacctgccgtcggagaaggcaggccagcggaaatggatcggcggactgatcgggtatgcccttcccggaacgacggtttcggacgtggcactcacgaacatcagcctgacggcgaacggaagcaaggaaagcgcctccacctcctaccgcataggcggcgtgatagggctgatggagctgggatcggcggaggtttcactctacaagaacatcacggccgacggcgtaacgctgacgggcggctacgcactgggcggtttcgcgggaacgatgcagcaaaatgcccgtatcgaggagtgctcggtgaagaacgtcaccatccggcataagaaccagatactgtacggggagacgagctatccggctaccggagggtatgtttatgcctcttcgtatttcgcgggcgacgtgaaccagggaacgatcgacatcacctgctccggggagctggtcggcgggacgaattcgcgcgaagacctcgacgggctcgggtcgatgtacgagtcgacgtgggacatacagccctatgtcggggaattgtgcatcagtacgctgaccctaaacggcgaggcgctgagccgcaaggtggaggtcgcaacaccggaagaactggccgcaacgctggcatcgcgcggcggcgagatcgccgtgaccgccgacctcgacctgaccaccgcgcaagcagtgcaggtcaactaccccaccgtgcttacgctcggcgaagggacgaagataacggtctcgtccaacaagctgaacaactactcggatctcacggtttcgggccccggaaccatcacaggcgattacggcctgatccggaattacgcgggggcaaacctgaccatcgacgggggcgcgacgctcgaaacgaccaataaccagacagggtcgggcatcctgaacaacggcggcaaggtcgtaatcgaggattgcaccgtccatgcggcattttacgccgttgcaaaccagggcggcggctcgctgactgtcaataacgggaagttctcctcgacggcgcacaacggaaacggccagtgggcatattgcatccgcacgttgggcgaaggcacgcaaaccgtcatcaactacgccgaggtatcgggcgtacagggagccgtggcggtcgactcgggcggcaaggtgacgatcaacgacggtattttctcgacctacgacctgtcaggcacgggcaacaatttccacgggctggccgtactggacgacggacatgcggtcgtgaacggcggtaaattttacagcgaagggcacgactactgcgtacgcctgggcgacgacggtgcggcggcggcttccgacccgagcacggtcgagctgaaaggcggctatttcggcgacatgggactcgacaagatcaagggcggcacgacgatcaccccggctccaggttacaaattcgaacaactggttgaaccgattgtcgagcagtccgcgacggtacccggaagaaccaacacctacaaataccggattgtggcccaataacgggcacagccaccacaaaacacctgcggcggccgggaaacccggacggcagacgatacaggaagggcagctccgcgggagctgcccttttcgaaatcctgtctgcgctttcgcagcccggcaacgggttacatccgctccgggacgtcgatgccgagcaggttcatgccgcggcggatgacacgcgccacctgcccggccagccggaggcgcatcgtgcgcatcgctgcatcctcttccctgaggatcgaatggtcatggtagtatccgttgaactgtttggccagctcgtagacataggcgccgatgaccgagggggcgaaattctcgcccgcggcggccacagccgacggatattccgtgagcgtcttcaccagatcgatctcctcgggcaggtaatcggcctgcacggcggcggaaaagtcgatccccgcttcggtagccttacgcaggatcgagcagatacgcgcatgggtatattggatgaacggccccgtattgccgttgaagtcgatagattcgcgcgggtcgaaaagcatggtcttcctggggtcgaccttgaggatgaaatacttgagcgcccccagcccgaccatcgtagacacggcattcgcttcttcttcggagcagccgtccagcttgcccagttcggcggacatctcgcgtgcggtagcgaccatgtcagcaatcaggtcgtcggcgtcgaccactgtgccctcgcgcgacttcatcttgccctcgggcaattccaccatgccgtaggagaggtgcgtgatatggtcgctccagtcggcatatcccagtttcttgagcaccagcttgagcacctggaagtggtagttctgttcgttgcccacgacatagatcatgtcgtcgagtttgttatcctcgaagcggcggtaggccgtacccagatcctgcgtcatgtagaccgaagtcccgtcgccgcgcagcagcagtttctcgtccagcccgtcggccgtgaggtcgatccagaccgaattgtcgggacggcggtaaaagacgcccttgcggagcccctcctcgacgaggctcttgcccagcaggtaagtctgcgattcgtagtaaaccttgtcgaaatcgacgcccagcgccttgtaggtcacgtcgaagccctcgtacacccagccgttcatggtttcccagagcgagtagacctcgggatcgcgggcctcccacttgcgcagcatctcctgcgcctcgagcatcacgggggcgttctttttcgcctcctcttcactctgcccctgcgccatcaactccttgatttgcgctttataatgcttgtcgaattcgacgtagtatttgcctacgaggtggtcgcccttcatgcccgacgtggcgggcgtttcaccgttgccgtagagcttccacgccagcatcgacttgcagatatggatgccgcggtcgttcaccaggttggccttgatgacgttatggccgttggccttgagtatttgcgccacggagtagcccagcaggttgttgcggatatgccccaggtgcaggggtttgttggtattgggcgacgaatattcgatcatgaccgtgcgcccggtggccggggcctgcccgaaatcggcatcggcagcgacctcgtcaaaacgcgccgcccagaaagcgccgtcgagcacgaggttcagaaaacccttgatgacattgaaagacttgatttcggggacgttggccgtcatatacccgccgatctcggtcgcagtggcttcgggcgacttgcggcttcgtcgcagcagcgggaaggtcacgagcgtataatcgccctcgaattccttgcgggtcttctgaatctgcaactgttcgccgtcgagcgtaccgtaaagcgcctccaccgagcggcggacggcatccgaaataaagttctcaatattcatatcgtgaaagaatttgtccgcaaatttagtattttttcagggaatattcaatccccggccccatattattcggacagggtgcaataccctgccccggcaccggcgggcgcacaaataaatttggcattacacacgccatgcattatctttgcagacaaacaaaccggacaccccaatggagttcctcatcattctattattaatcatcctgaacggcttcttcgccatgtcggagatcgccatgatctcggcgcgccgctccaatctggagatgcaggcacggcagggcgacgccggggcgcggcaggcgcagaagcttatcgaagacccggacaaattcctttcgaccatccagatcggcatcacgctgataggcatcctcacgggtatctactcgggcgatgcgctggccacgaaattcggccgggagctcgccgcactcggcatttccctgcgcacggccacggtcgtggcgcagatcacgatcgtcatcgtcgtaacctacctgaccctcatattcggggagctcgtgcccaaacgcatcggcatgaactcggcggaaaagatcgccaagctggcagcacggcccatgcgcctgctctcgctgctggcctcgccgttcgtatggctcctgtcgcgcagcaccgcaggcgtgacccgcctgctggggctccgcaaatcggattcgaaggtcaccgaggaggagatacgctccatcatccaggaaggcgcggaggacggcgaagtgcaggaggtagagcagaagatcatgggccgcgtattttcgctgggcgacaggacggtcgagtcgatcatgaccttccgcagcgaactggtatggatcgacaccgcgatgacgccggaacagatccgcgaacgggtcaaccgggagccccacaaccgctatcccgtcggcgaagggagcctcgacaaactcgcgggcgtcgtctacctgaaagacctgttccgacatatcgacgaccccggattcgacatccgcaaccacctttcgcccgccaagttcttccacgagggagccgaggtatacagcgcgctggaacaattgcgcagcgagcagctcggctacggcatcgtgtgcgacgaattcggcgtaacgcgcggcatcgtcaccctgaaggacatcttcgaggcgctggtcggcgagatccccgacggctacggggaacccgacatcgtacggcgcgaggacggcagcgtgctcatcgacgggcagtgtccgttttacgatttcctggccttcttcggcgcggagaacgccgttccccgcaatgcctacaatacgatcagcggactggttctcgaccagctgaaacacattcccgccacgggggagaagttccgctggaacagtttcgacctcgagatcgtcgacatggacggcgtccgcatcgacaaaatactcgtaacacacgaccaagcgggcgaatcatgaaaattgccgacatagaactcggggagaaacccctgctgctggcgccgatggaggacgtgaccgacccgtcgttccgctacatgtgcaagcgtttcggcgccgacgtggtctacacggaattcatctcctccgacgggctgatacgcgacgcggccaagtcgctcaaaaaactcgaaatcgacgacgcggagcgtccggtgggcatccagctctacggccatctggtcgaaccgatggtcgaggcggcgcgcatggccgaagcggccggcccggacatcatcgacatcaacttcggctgccccgtgaagaagatcgcggggcggggcgccgggtcgggcatgatgcgcgacgtaccgctgatggtcgaaatgacgcggaggatcgtggaggcggtcggaaaacccgtgaccgtgaaaacccgcctgggctgggacgacgagtcgaagaacatcgaggagatagccctgcgcctgcaggacgtcggcatcgcggcgctcacgatacacggccgcacacgggcccagatgtaccgcggcgaagccgactggacgctgatcggcaaggtgaagaacaatccgcagatacaaatcccgatcatcggcaacggcgatgtggattcggggccgaaagcggccgaaatgttcgaccgctacggcgtggacggcgtgatgatcggccgcgcgacctacgggcgcccgtggatattccgcgaggtgaaacactaccttgccacgggcgaagtgctgccccagccatcggtctgcgagcgggtggagatcgccaaggagcacctgcgaaaatcgctggaaatcaaaggcgaatacgtgggcatcctcgaaatgcgccgccacctgtccaactatttcaaggggttgcccgatttcaagcccacacgcctgaagctggtcacgctgctcgacatccccgagctgttcgccacgctcgactcgatcgccgagcgctggggcgatttcgacgtgagcggcacagtgcccgaaccgctgtcgcacgacctgtaatttcacggggtcacacgaaggcctgattccggtcggtggccgagacggagatggaacggggttttgcccgctctgcgcgaaacagcaaaaaatacgcctgatcccctgtggaatcaggcgtttatacgctcagatacaacggctacttcagcacacgctcgacataggctttgtaatcctttacgacgggctcgtactcctcgtcctcgaagagcggcgacgagatcaggaaatcggccgacgaacggttgatcgccgtcgggacattgtagagcgtcgccaggcgcaacaacgccttgacgtcgacgtcgtgcggctgcgccgacatgggatcccagaagaagatcagggcgttgatcttgccgtcggcgatcagcgaccccaactgctggtcaccgcccagcgggccggatttgagcagcgtgattttcaggtcggacaattcccggatcccatccgcggattcgtcttcctcgcggtgatcccgcagtgtcttttcgaccatcttaccggtcgtacccgtacaaacgagatgatggcggctcaggttcctgctgttccagtcgacccattcggccaggtcgcgtttcatattgtcgtgggcaaccagtgccagcacttttgtcattttagccatagcgatatttttatccgttgaacaaagataatacaaacacggggattacggataaaaacaaacgaatttaatcgggatacgacacaacaaaaaagccccgctcgggcggggctcaggggttattcggtttcggccggaagcttgaactcggtaaacccggctttgacgaggatgttataccacgcaaagcacttcttgatgtcggaaacgtgtacccggtcacggtcatagtcgggaagcacctcggcgaaacaagctttcagtttttcgggggcctccttggggctgacggcctcgcggccgcccgtatgggcatagatcttggtgaacacatcggccaggggaatgtcgtctccctctgtgaacatcgagatctcggtcagcgaacttactttcgacgtcgccgaagcgttcatccgcctgccgtcgagcaacgattcgacgatcacaccgtgcgtggactgcgctacatacttataaagtccgggctggcccgaaatggccagaatttctttcaattccatattaaattatagtgtggtaaattaattcgcttcggggttgggcatcggctccgggtcggtctcttcctgcacggtatactcgtacacctcggagaacgtatacacgctgtacgcagagacggcaagtatctggaaggtcactttcgtgccggccttctccttgccgatcgtacctgaatagcgtttttccgtatccgtcttgttggtactcagccatgcaccctcttccttcaccttcgtctcgtcgtcgttgagggcacgcaggatgctgatgccggtaaatccgtattcactcgtgacggtcgccgttacgcggacgtcatcgccggcatggacatcatcaaggccggggctgcaagagacattcgaaattacgggcgcaaccttatactcggggccgagttccttgttgcaagccgccaggcagcatgccgccacggccatgataagcaattttttcattttataggcagattaattgtttttcacatgcacatccatctgcgggaaggggaagttgatccccttttcgggcagctgtttgtagaatttctcgttgttttcgaagaacacgttccagtaatcggcgttcttcacccaggcgcgtgccgaaaggttgaccgagctgtcggcgagggctgctacccacaccacgggcgcaggatcgcccagcacgcggctgtcggcggcaaggatggcgaggatcgccgcacgcgccgtatccacgtcgtcgccataggaaataccgatcgtccagtccacgcggcgggtatcggacgtggaataattgtcgatgatggccgtggcgatcgagttgttcggaatgtaaattgtctggttatcgaccgtagtgatgaccgtcgagaagagtttgatctcgcgcacggtgcccgactgtccctgtgccgagatgtagtcgccgacacggtaaggcttcatcagcaggatcatcacgccgcccgcgaagttctgcgccgtaccgctcagggccataccgatggccagcgtggcggcggagaagacggcgatgagcgatgtgacgttgacgcccagcgtcgagacgacgatcagcaccagcagcagcgtgaagatcacgcgcacggtgttgcgcatgaacgaccgcagcgaaatatcgacacggcggtgttccagcgccaagtcgagcagcctgacgatgcgccgcaatatccagcggccgatgaaatagatcgccagcgcgagggttattttcagcagtatccagaccgactcggacaggaggttttgcaatacggtctcgaaatcgaggttcgcaattttatgaacggtttccgcaaaattggctttctgcacactgtcgggcagcatcagcggcgcgggcgtatcggttcctaaaaaaagaggccacatataccagaaataaagtttgtctgcaaaaataaccaaaaaaaagagaagtttactaactttgtctacgaatttacggaaaagaaaacaggaaaaacgctacaagatgcaaaacaacgtcgaaatcatccagataaatatatccggcgaagacaagccgggcatgacctcttcgctcaccgaaatactcgcgcgctacgacgccttcatcctcgacatcggccaggccaacatccaccagtcgctgacgctgggcatcctgttccggactacatcggacaaatcgggcaacatcatgaaggagctgttgttcaaggcatcggagctgggagtgatgatccgtttcactcccatttcggaacagaactacgacaactgggtcggccggcagggcaaaaaccgctacatcatcaccctcctgggacgtacggtcacggcacgccatatcgccgaagtgacacgcgtggtggcacagcacgggctgaatatcgacgccataaagcgcctgacgggccgcatcccgctcagcgaggacgaccgtgcggccaaatcgtgcatcgaactttcggtgcgcgggtcgctcaccgacgaggagcgcagtacgatgcaggaggggttcatgaatctgtcggaaatcggcctcgacgtctcgttccagaaagatgacatctaccgccgcagccgccgcctgatctgcttcgacatggattcgacgctgatcgagaccgaggtgatcgacgaactggccgagcgcgccggcgtgggcgatgcggtgcgcgagatcacggcacgcgccatgcggggcgagatcgacttccgcgaaagcttcaccgagcgcgtggccctgctcaaggggctcgacgtctcggtcatggaggaaatagcccgtaacctgcccatcaccgaagggctggagcgcatgatgacgatcctcaagcgtgtgggctataaaacggcgatcctctcgggcgggttcacctatttcggcaactacctgcgccagaaatacggattcgactacatatatgccaacgagctggagatcgaacagggcaagctcacggggcgctatgtcggcgaggtggtcgacgggcgccgcaaggccgaactgctgcgcctgctgtgccagttcgaggagatcaacatcgcccagtcggtggcagtcggcgacggcgccaacgacctgccgatgctcaacctcgcgggcctgggcatcgcattccatgccaaacccaaggtgaaggccacggcacggcagtccatctcgaccatcggcttggacggcatcctctatttcctcggtctgaaggattcacgcatcgaacaataaccctatgcgactgttgccgctgctctgcgtggccctgctcgcggcggggtgttacgactcccggttcggggaacgcggcgacgacgccacgcccgagcccgtcacggcgaccatccggcagctgcgtgagaaattcgccgggacgaccttccccgtcacgggggacatcgtggtgtcggggcgcgtaaccaccagcgattacgacgagaatttctaccgcacgttctgcatcgaagaggacggggcgggaatcgaagtcatggcgggcatagaccacctgcacaacgatttcccggagggctgccatgtcacgctcaggctcaggggcctggcgctgggcgaaagccacggggtattgcaggccgggcggatgcccgccgcaggaagcggtttcgcgaccgattacatagggtcgaaagcggcgctggacgcagcggtgacccgcaacggggaggcgctggaacccatagcccctaccctgctgtcgtccggcgaactgacgccggagcgatgcggcacgctggtgcggatcggggcgctaagctacaccccggaagaccttacgcccgggacatgggccggatacaagcgtttcacggacgacacaggcgcggcggtctacacttatgtgcgcagctacgcccggtttgcggacgacgaggtgcccgtcggccgctgtacgctcacgggaatcctgcaatacgacgccaccggggaagggcgttacatcctcaaactgcgcgatgaaaacgattgtacccgttaaccggctcccggcgatatcccgcacggcactccgcacggccgtgtgcgtcgtgctggcgctgacggccctcgccgggtgcgacaaggcgtcggggctggaattcgacgacaacacgccgcaggggacggtcacgatcgctgcgctcaaatcgcgttgcacgggagcacaggccgccgtcacggaggacatcacgatcgaaggcgtggtgacgggcaacgacctctacggagaattctacaaaacactggtcgtcgaagacacgagcggcgggatttcgatagccgtggacgctacggaactctacgtcgactacccggtcggcacggcggtcacgatccattgcaacgggctgttcctgtgcgactacggcggcaaggtaatgctcggcacgcgccccacgggcgaatatgccgggccggggaggatacctccggcggaggcggcgctgtacctgcggcggaagcaggcggaaaccaggcccctacggcctcggacgctcacgttcggggaggtagacatgcggcataccgacacctacgtgcatttcgaaggagtgcggttcgtgcagcagggcaactggtgcgaccccgatcccgagaccggacgccccgcgacgacggagcggcagatagcggatgcctcgggacgggaattcatcgtccgcacggcaggtacgtgcacctatgccacggagcccgtaccgcagggcacaggctccgtatatgggataatcgactatttcaacgggaaatacacgctccgcatcgccaaccgcgaggtggatttcgctacggttgcagcgcttcccacagcatatctttcaagcgggggatattcagccccgaaaccgacgagataaacaccgacgggacgccttcgggcaggtgggatttcatctcttcgatcagttcgtcgtccagcatgtcgcatttggtgatggccagcagccgctgtttgtcgagcagttcggggttgtactgcgtaagctcgcccagcagaaccgcataatcgcgtttgaggtcgtcgctgtcggccgggatcatgaacagcagcaccgagttgcgctcgatgtggcgcaggaagcgcgtgcccaggccgcggccctcgtgcgccccctcgatgatacccggaatatcggccatgacgaacgacttgtgatcacgcacctcgacgatgcccaggttgggttcgagcgtggtgaaagcatagttggcgatcttgggtttggcagccgagaccaccgagagcaaggtgctcttgcccgcattggggaacccgaccagcccgacgtcggccaagaccttcagttcgaggatgaaggtgccttcgtcgccctcctcgcccggctgcgcatagcgcggcgtctggttcgtggcgctcttgaaatgccagtttccgaggccgccccggccgcctttgagcagtacgagctgttcgccgtcggccgtcacctcgccgacatcttcggtgagcgtggtgccgtcctcctgttcgaccacacgccgggcgaccgtgcccagcggcacggggatgacgatgtcccgggcgtcccggcccgacgagcgggctcccgagccgcactgcccgtcctcggcgaactggtggcgctggtatttgaggtggataagcgtccagtactggctgtcgccctgcaggacgatgctaccgcccttgccgccgtcgccgccgtcggggccgccgaaagccacgaatttttcacggcggaaatgcgccgagccggcccctccgtgtcccgaacgggcaaatatcttcacgtaatctacaaagttcgaacctgccataccttgattatttaggttgcaaagatagtgcaagccgagagcaaaagcaagtttacttgcattttgccgaagcgccgcctgtctaaaacaaggttaaagatagtgcaagccggggcgatgccggatttatttggagatgcccgggcatcaaaaaagcccgtgtcggggacacgggccttgaagtagctgggtggaggcttatttcttacgcgtcagcacgatgtcggacacaccgaggtagtaacgtgcataggccccctgcttgggatgccactggaacagcgacggcgtccaggtttttccggagattacggtcgaccccacacgcagttcgtcgccggcgaccgtgacgggaagctcgcattcgcaatcggagaagctcttgtcatcggcaccgccgagcaggtaaaccgggccgagttcatcggtagtgaaccagctcaggacattgaacttggttgtagcttcgacaacgatcgaaccgtcctccaggagtttgaggaaccacttggggccgaagccttcgagcgcacgggctacggaaaagccctcttcgatcagctgttcgtaggttcgggcactgccctctttctcgaagtccccgaggccaaggcagacgagatagttctccttgcggtatttccgcgagccgacctgtgccatgatttcgacatcgaacgtccactcctcggtcgtgaagaaaaacccgcccgtagcaggatcaaatcccgtagcgtatttgacgctctgcttgccgccccactcaccgacgagggcgtcgaactcggccgactggatcattccggaagtatcctctgcgagcgtggtcaccttgatctgggctgcatcggatgcggtgtacttcgggtcggtggagagcgccttgacggtgaccgtatattccgtacccggattcaggccgctgaaacgggcggaagtttcggacgtggtcgcttcagtgccgccattgagcgaataagcatatacatttgcatgctcgacggcctgccaggtcacggagaaagcggtctcctcgaccgaactctgggcgaggaggggtgcggcgagctgcgtcccgttgttatccccgtcgtcaccggaatcggaatcgctgcaagcggcaaaacccagcaacagggaagcacacattaaaattctgctgatctttttcattgttgttcgtatttatcggttatgaaattcttacgtgatcttttattcagccttttcggtcttctgtgtcgcctcgatccagaaatcggagccgctcttactgatgcccaacacacagaccgaataggaggttccggctgccagcccggtcttacggatggtctgcgtcccggtatactcgtccttggtgggcatcacctccttcttgaacgcctccagtcccccggccattaatacttgcatgggcaacgaagaggtcttcaggacatagacataatatttctcgatggcggcatcgggcgtacagacgacatcgaacccgtcggaagcgacattctcgaacgttaccgtcacttcgcccgacgcatcgggaagggtcgtggcaggagccgatacgaggacggtcgtgagcaggtcgcccggggcgtaccaccctactgcgtagacgacatagtcggtttcgggtttcagcccggtgaactcgaagggatggtcaccctgtacgagttgtgtggccaggtactcctcgaaactaacgcccgcaatcagggccgaagcgctgagtttgcggcgcaccgacccgataaattcctccgtcgaagcgtatttgtcgaagtcggacttcagggcataaccacagtagtaggttcgcgtcttgcttttgggagatacggatacggaaatgctgttcatcccggtctcggcagccgaaagcgtaaagggattctgttccatggcggcggtgaccgtcagctcggcgaattcggaatcgaggaactgcacctgtccggaaacggctttcacacgcacggtagccggcataccggattccagcccggtcacgactgccgacagacccgtaacggtcagctcctcgccgccatcgaccgtatatacataggatgccgcatcgggaacggcttcccacacgaccgtcgcggaattctccgtggcgtcgcccgccgagaggacaggagccgccagttgcgtggccggcagggttgtcagggtgatttgggcgaattccgaatccaggtactgctcctgccccgcgacagcctttaccttgacagtatagctgcgaccgggctccagtccgtcgaagcgcaccgaaggctgtgttacggtcgtctcggcgccaccgtcgagcgtacaggcgtaggacgcggcgttctccacggcatcccaggtcacggcgaccgatacctgcgttacggcgtcttccgccaggacggggatcgccaaagcaacgggatccacgggtttttcgtcatccgagcaacctgcaaaagcggccccgaggacaaaaaaagctgagaaaagtagttttttcttcatagctgaaaaagtttaaaaatatttgctgcaaaagttcattaacctactgattcaaagtccatacagcccgaaaaagattgccagaaaaggctgtatgaacgaacgaatcggtttttgtaaatatcgctacgaatcgtccataaagttctcataccacgccaaaaaggcgaacaaggccgataatcgggaaaaacaaggcgataaaagggaatgacagaatgtgacatttttttactatttttgcctgcaacgtcaccccttcttcatacatacgaaaacacatgggctatctcgaacaggctgtgcgttcacggtgggccgtcccgatgacggctttcctgatccaactgagtcaatactggaatacgctggtaacggtcacctggtggtcgaaacgggcgaccgtatcggtcgtctggttctgcgtcctgtggctggcgaccatcctgctgctggaaatattcctgagcaggcgtttctcattcccggtacgctgcctgctgggcacgctcgtcatcgcgggagttatcctcacggccatgctggtcatctggctgcaatccgaaaaaccgtggctcacgctgggctacgacgaagtcgggtatctgatcatcacgtatacgatatgcctgctgatcggcagcatcgtactgatgatcaacaaggaacgccggcatgaaaaagagattgagatgctccggatcgagaacctcagcagccagtacaacgccattgccaaccaggtaagcccccacttctttttcaacgcactgagcaacctctcgtcgctcgtacgcggcgacaagaaacaggaaagcctcgaatacatcggcaacctgtcgggcatattccggtacatcatccgcttcaaggagtcgtcgctgacgaccctgggcgaggagctgaatttcataaattcgtacaagcaactgatggacgtacgcttcgccgaaagctacacctgcgaggtcgacatcccgcagcaggcgctgaacatgcgcatgcccagcctttcgctgctgccgctgttcgaaaatatcgtcaaacacaacgtcatcgacagcgagcaccacatgcggatcacgatctcgttcaacgacaacaacgaactggtgatcgccaatccggtctatccgaagctcacgccgcccgaatcgaacggcatcgggttgaccaacctgagcaacaggtacaggctgctgctgggtaaggaaatacgcatcgagaaaaccgagggggggggtgacgggatgttccgggtgttcctgcctatggtcaagatgaacataaagcatacgcgatgagggtactgatcatagaagacgaaatgggggccctcgacgacctgagaagcatcctcgcggaatcggccccggacatccggatagcgggcacgacggagagtgtcatgcaaggcgtcgcatggctggaaaagaaccccgtcccggatctgattttcatggacatccatctgtccgacggttcggctttcgagatattcaggcggacggccgtcgaggcgcccgtgatcttcacgaccgcctacgacgagtacgccatccatgccttcagggtcaacgccgtggactatctgctcaaaccgctcgcgatcgacgaggtgaaacgcgcactggaaaaataccggcggctcaaccggccgcaggtactcccggatatcgagaaattgtatgaaatgatttcctgccagcggacgaattcccgcaggaacattctggtggcctacaaggacaaactgctgccgatcccgacggagaaaatcgcctttttctattcgaccaaggagacgtcgagggtatacctcgccgatggcagcaactatgcctacaacaggacgctggagagcatctgcgacgacatggatccccgggcattctgccgggtcaacaaacaatacgtcgtcgccagggagcacatcacgagcatcgtcgtatggtcgaatagccgcctgctggtttcgatggatactgagacgcccgagcccgtattcctgagcaagaaccgggctgcggagttcaaaaaatggatcacgggataagtcccgtcccggaaaaaacatttacaggcgtgcgaggtatccgtagcgcaccaaatcctcttcgccgcgggtgaggtaggtctggccgtctgccagcacgtataggcggtcggcgatatccgtcacatggcggtgcatatggtcggtcacgagaatgcctttcgaggatttttcctgccggatcagcgccttgagcgtcgacacgtgcagcggggcgacctgcgaaaaaggttcgtcgagcatgacgaattgcgtcggactgcgcaggatcaggtaggattccagaatacgccgctcgccgcccgacagggcgcggatcttcgtaccgcgcagtttgccgaacaacgggaaccatgccagcaggtcatcccacggcaacccgaagtcgcgcagtgcccggtcgacggtcagccagcccgggataaatccctgctgcgcgaggtagcgcacctcgtcggcccgaaaacggtcatgccacaccccgtcgatgcgcatcgaccggaaatccgcccgcagcgaaccgcacagtatcttcatcaggcagctcttgccgcacccgttgcggccgagcaccgccgtaacgccgcccgtttcaacggcgaggtacactcccgaaaggatgcgccggtcgccgaacgacaactccacggagtcgatctcgaggatatgtttctcagaggggttcataaaggaaggcggccgtcagtttcaataacacataacacaggataaagtccacgccgcaactcacgcccagcagttcgcggcgccgcacgccgaggttgcggtagtagaaaaactcgtcaccgtaacgctggacgatccagacatagagataaagcggatagaccgccgccttgcccaacaggcaccacgggacgattgtcgggccgtggttcgagaccacccatgccaacccgatactcacggccatgcaaaaaaagaacatggccgaataataaaagcggagtatgagcagcaatttccggatcatcgtccaaatatacgaaaaaagcgggtggaatacagaccacccgctttttattcggcgtaaacgccaagtcggcatctccgcaagagaacccgctgcgggcaggaaagccggcgatggcgttacagcgccagcggctcgcagggaagcccccaggcctcggcgacgggccggtagaccactttgccctgcacgatgttgagccccagttccagttcgcggctctccttgcaggcacggcgccagcccttgtcggcgagctggacgacgtagggaagcgtggcgttggtgagcgcaagcgtcgaggaatagggcacggcgccgggaatgttggccacgcaataatggaggataccgtcgacatagtaaacggggtcttcgtgcgtcgtgggacgcgaggtctcgaagcagccgccctggtcaatggccacgtcgaccatcaccgagccgggctccatctcccggagcatgtcgcgcgtaacgagcttcggggccttggcgccggggatcagcaccgagccgatcaccaggtcggcatgtttgagctcttcgcggatattgtattccgaagacatcagggtcttgacgttcttgggcatcacgtcggccaggtaggtgaggcgttgcagcgaaatgtcgcagatcgtcacgtcggcccccgtcccggcagccgtacgcgccgcggccgtaccgaccacaccggcgccgatgacgaagaccctggcgggcttcacccccggtacgccgcccagcagcttgcctttgccaccgcggggtttttcgaggaaatagcgcccttcctgcgtggacatacggcctgcgacctcggacatcgggatcagcagcggcagcgagcggtcggcacgttcgacggtctcgtaggcgcagcataccgccccgctgtcgatcatggcgcgggtaaggggttcgctgctggcgaaatggaaaaacgtgaagaccagctggtctttgcggatcagcttgtactcgggggcgatgggctccttgaccttgacgatcatttcggcacgggcatagacatccccgatcgtgggaaggatctccgcccctaccgccgtataggcctcgtcggcaaaaccgctgttcacaccggccgtagcctgcacataaaccgtgtggccccgcttgacgagctcctgggcgcctgcgggggtaagggcaacgcgattctcgttgttcttgatctctttgggaataccgataatcataaggcttgaagtttttaggtttttttgccttttaatttacggattttatccggaacagcaaaaaaatccggcgatttttcacttgcggatcaaaatttataagagactgtaaggtagaacgaacgcggataggcataggtatagcgcgtggcgtggggtgcgaaatagagggcgtcacccgaacggatacgccggacgcgcagcgactcgtaaccgctgtaaaccgtatcggcatcgcccagcaggttgcgcagcatgagcgaagcggtcagccgcgaacggccgaaatagaaggatttgaaaagcgaggcgtcgagcgtggaggcatctccgagacgctcctggtgcgtaaaggcatcgaacgcctcctgtgtaatgccgccctgccgcgcgatgcgcgccgtacggcgcaggggcgcaggctcgacgtaacgcagccccgcatatcccgccgaggcgcggaacccccatccccgggggccgaaataagagagttcggcgcaagccgtaacttgaggtgcggcgccgagcgtacaaccgcccatgtagctttcggcacgggtgtcgacggccgaattgtcgacgtcggagatgaccgtgacgcgcgggttacggatatatttgtaccgcccgcccgaagcggcgagcgaaaggctccagcggtatgcgaggcggaggtcggcagcggcctccacgccgcaggccatgcgtccgatgcccgtaacggccatgtcgctgtatacgcctgccatatcgtcgtaataacggcgggactggatgccatcgagcgtggcgacggcgaaggccgtaatgcggagcgaaagccgttcgccggtacgggtgaaattgagctcggcggcgtagaaatgcacggcagagggggcgtcgaccgtacggttgttatacaacggctggtagaacaggtcggcggcatcgggcaccgcagccccggctgcggccgatgcttcgaggtagctgcggggcgagaaagcccaccccaccagtgccttgaccgtatagggcgtaaaccccatccgccgcgagcgcccgagggactgtgtcccggggaagagctctttctcataatacccgcggcgcagcacgacggcatcgcccagcgcgagggcgacgtcggcacgaaggcggtcggaacggtactcggccgacaggcggacggtggcctcgcgcgtcgagagcgcatagtcgtagccgaaacggtcgccctcgcggacggtgcggccgggatggcgcaggtcgttttgcaggaggttgccgtaggtgtcgtcgtccacgaggtactggtcgatgtcggtgatatgatccgcccccagcaggtcgcgcatctgtttgtagctgcgcgtgcgggcatggcggtaggaaaagccgtagcggagcgtcagccgttcgtccggcgcggtcgtaaagagggcgtcgaaaccgaagttgcggatacgttcggcgcggtcttcgagcgtatagacggcatgtccgcccgccatgcggttgcgggcgatcaactcgtcccagcaaacctgcgtatagcgcgcgtcgttcgaccgccatgccagttcggtttcccggtcgcccgtatagccgggcaggtaacggtaattgtcgggcatgggcgtacgggcgtcgtaccaccccagggcgctgtatttccgcaccccgtattcggccccggcagccatgtcgagccaggtcgcgggcgacagccgcacgcagtacgtagcggcggccagcggcacgaactcgcgccgcacgcgcgaattgcggactttgccgtcctggaaaccccaggccggattgtagaggttgtcgcccgtaaggcggaaagcctcttcgaccgaagaaaggcgtgtgccccgtaccgacggcgggacaatgaggaggaatcccagcgtatggccctcgcccaaatgcctggcggcacggaatcccgccgtcagggcattcgtgaagacgccttcgacgtgcatgtcgcgccccgtgcgggcctcgacggcggcagcgacatcccagccgtggcccgcaggccgcgcaaaggcaagtttcgccccggccaggtagttgcggtcggtgaaactgacggaggcatggcaggagggttcggccagcgccccggggaaccggaagatacgcacgccgccggcactgccgatggcctcgggcaatgccgcgatcccggcacggcgctcttcccgagccccgagcagccgcagcgaaccgaaatagcgggacgaaatccccaacccggaaaaggaggccgcctccgaggagtaatgctgcccgcggcggccgagcgcgatgtagggcagattgaaggccgaaatgctgccgtagaggtcgggcatggtctggattgcccggtagaaaagcgaggagtcggtaagcacgatgggcgtacgctgctcataacccgtgccatagggatagtattcgtcgtcggggagctgggccgcagctccgcacacgacgaacaggaaaaccacggtaagagcgtatttgcggagcatgcacagggacttttcagaatacaaatataactattttaaacatgttttaaatagcaacaataaaaaccgctgaatttcgtcctttatggcagttgtgccggcagaaaatattttttgatttttcagaatcaaataataatatgatatacaaactattacgcgcacataagcacgggggggggctaacaccgtacgcaaatttggaaaatcggaaaacaaacctcatatttgtgaactctcaacaatctcaaagcgtcctgacatgcaaaaagccctcgctctcctgctgtcggcagccatgctgctgtgtctgcatccggctgccgcgcaacaacccaacaccctgaccgggacggtcaccgattcggcttccggcaaagccgtcggctatgccaccgtctcgctccagcgcgactcggtcacggtcgtgaacgccgtagccgccgataccgacggccgcttctcgctcaaagcccccgaaacgggcgactaccagctctgcatcacgatggtaggctacacgccctacaaacaggccgtggaagtgcccgcatcgggcaaggcgctcggcaagatcgccatcacgcagggtgtcgaggtcggcgacgtggtgatcgaagtccagaaaccgctcgtaatggccgacgccgagaagaccacctactcggtagaagacgacccgcaggcttcgacgagcacgctcgacgagatcatccgcaaggttccgcagctctcgctcgacggcgacggcaacgtcctgctcaacggacagagcaattacaagatattgctcaacgggcgcaattcggcaacgatgagcaacaacttcaaggacgtgatccagagcatgcccgcctcgcagatcagccgcatagaggtcatcaccaacccctcgaccaagtacgaagccgaaggcgtgggcggcatcatcaacctcatcacccaacgcaagaagcagttccacggatacaacggcagcgtcggcgcgagcgtcacggtgttggagaacccggcctacaacggcaacgccagcctctcgatccaggccgggaagttcgcggcgagcatcatgggctatgcaggctactacgacgggggccgtaccccctcggaatcggagtcgtggcaggaaaattacgactcggagaaccgctacaaccgcagttactccgaaaacaagggcagctcgcgttacggcaacgtcggactggacatgagctaccagcccgacacgctcaacctgatcacgctcaacggatggctgtggctcggccgcagccgctacaaatcgctgggcacgaacgcgatcctcgaccccgagatgaacccgctgctggaatacggcagccgcagcatccagaaatggaactacatgggcggcagcgtctcgctcaattacgaacacaccttcggcaaggaggggcacacgctgaccatatcggatgaagtcgagatcgacccggacaaaggccatacagaccggatatacaacgacggatacgattacagggcgttgcaggatgcggacaaccgcatgacgggcaacaccgtgcaggtcgactacgccaacccgctgtcggagcaccacaagatcgaggcggggctgaaacacatctaccgcaacagcacctccgacaccgacaacaagcagagcgacgaatacggcacattcccgattgaaaaaataaaattcacgggcatggattaccgccagcacgtgctgggcatctacaccggatacggattcacctacaccaaatggtcgggacgcctcggtgcgcgcatggaacggacatggaacgacgccgacgtggaggagaccgccaaaggcacctactcgttttcgaaccgccagtttaacgtggtgccctacctgagcctgacattcatccccaaggtgagccacaacatttcgctctcctacacgcagcggctccagcgcccgggcatctacatgctttcgccggccgaggacgacaccgaccccacgcggctgtcgtacggcaacccgggactggaagcggccgtataccacacgatcaacctccagtacggccactatgccgcaaaatggagcatgaccttcgcactcaacaccttcctgtcgaacaacaacatgtcgtcgtactccttctcggacggggacggcatcacgaacaccacctacagcaacgacgtccgttcgcgcagctacggattcaacggttcgttctcgtaccgcccgtcggagaaggtcaacctctcgctgagctacaacggcaggtattcgcagaacgatttcgacgccatggacatccacaccgaccagttcacgttaagccagaacctcaacctcgacttcgcgctctggaaggaggcgcggcttatgctgggtgagaattattcgacggggtatgcgtggctcggcggcaaatcggaaagctactactactattacatgggcatcaaacagcagttcctcaagaagaagctcgacctgagcatcatgtgcaacaaccccttcgagaaataccgcaggaacaggaacacctcggacacgccgaccttcggcggctggagcgaatacaggtatgcgtgccgcagcctctatttccgcgtcagctaccgcttcggcaaacagaacgtcggggtgaaacgcactgccaagtcgatccgcaacgatgacatgagcagcggcgcacagggcggtggcggcggaagcaccggcggcgctcagggcggaggagggatgtaatcccccgccggcgatcctgccgatacgccgggcgccggcatcaccgcgtgggccatcatcgcaggagtcatcgcggaaatcattccaggaatcatcgcggaaatcatcgcggcatttacgcggccgtctttcccctgctgcaagggacgacgcatacggcttccgggcgcggcatccatatcgacgaaaagagactgccgcacaagcagccggaaacagaagtcacccctgccggagtttgttccggcaggggtgaaatcgtaaaatcggacttgccggacagcccctctgttatttgcagcctgccgtgcagcgtcctgccgggaacacccggagcggccatcggtcgcccgatccatgcggatgggggcccggatcatcgaccgcacggatttcatagcccggcaaaaatatgaataaaatgattgttttactcatattttttaattacattgtgaacaatataaaacacatgcttcacaatcatttcattaatcctttaaatttaccgccatgaaaaaactttttttactccggaaaagcctgttcatagcttttgcggcagcgacctgcggactcttttctataataggatgtgcagcgcaaaaaccggcagccggacggcaaggcgaagcggccggaggggagatccgccacgcacaagcgtcgaaggcactggaagaggggcggttcgtgatcgaggcgaatgaattttacctcccggaggacaaatccccggtcaagtcatccacgggcaactacatatccatggagggcaaacggggcgttatcagtttcacccccgacctcttcccgaaaacaccgctgggcaacctgaccataacggacgacacggcggaaataacgctggaaaagcggaaaaagaacggagacatacagttctgcatgaggatgaccgggccggcgaattcccaggacaggaaggtaataataacgctgtacaaggacacggacaaatgccatgtacaggtttcgaacgaacttctggcatatcccgtggtcaagttcacgggagtggtaaagccagcgggagaataaccgcggcaccacccgcaacggcaacggccccgcaaagacggggccgttatcgtgaaccgtgcatccggaaaccgtgcatccgtggcgggatttgccgcgttcgcgggcgggtcagacggttttgagcacttcgagcagcaaatcccagaacttgggaaccgtggcgatttcgagcctctcgtcgggcgaatgcacgccgcgcaacgtcgggccgaaggaaaccatctccagttcggggtatttctcgaggaacaggccgcactccaatccggcatggatcgcacgcaccttgggctccgtaccgaacaggcgttcgtaggctccgacggtcttttcgagcagtacggactgcgggttgggcgcccagcccggataaccgtcggaatgggcgacgtcggcaccggccagggcgaataccgattcgaccatctgcatgacataggtcttggcgctctcgaccgacgaccgctgcgacgaggtgacgacgatgcggtcgtcgccctcgaatttcaccgaagcgagattggtcgaggtctcgaccagccccggcatggcgaacgacatggcgatcacgccgttgggaacgcccaccaacgagtagaccagcccgaactgcgtccgggcatcgagcacctggtcgacctcgggcatctcgttgagcgtaatcctgaaattgggctcgcggaagcggaattcggctttcaggtcggcggcaaagaggtcgtagcgtttgacgaactcggacttgaaccgtgtcgggacgccgaagatggcgtacgcctcgcgcgggatcgcattgcgcaggttgccgccgttgaaatagctcagcttcagttcgaacgactgcatgccgtcccacaagaggcgtgcgacggtcttgttggaattgacgcgtcccttgtcgatgtcgtcgcccgagtgcccgccctgcaggtcggaaacgtcgacgcggaagaaggagtagttcttcggcgcctcctccatcgtataccggaacgtggcgatggtgtcgatgccgccggcacagccgatgaagatctcgccctcgtcctccgagtcgaggttgatgaggtatttgcccgtgagcatctcctcgcccagttcgaaagcccccgtaaggccggtctcctcgtcgaccgtaaagagcgcctcgacgggcccgtgctgcaccgcggggtcgatcatgacggccagtgcggcagccatgccgatgccgcagtcggcacccagcgtcgtaccttcggccctgacccacccgccgtcgatgtgcgtgcggatcgggtcgttgtcgaaatcgaactccacgtcggagttcttctcgcagaccatgtccatgtgggactggaggataaccgccgggcgatcctcgaagcccggcgtggcgggtttgcgcatcaccacgttgccgatggcatccttcttatactcgatgttgtgcttccgggcgaaatcgaccaggaattcgatgatcttgccctccttcttcgaggggcgcggaacccgtgtgatggcatcgaactgctcccacacgatccggggttcaaggtttactatttcagacataatctcctaatataatttacaggcacatcgccgggttgccgccggccgtacgtccctcgatttccgcccattccatgacaatatttacaacggcagaaagacgctccgaggatggggtatctacaagaattcttccggccgaagattttcaaatacaaatatacgaaaaacagcgtaattcacggtatcccgcgtccggttttttgcatttccggctggctgcgacggccgaaaatttgcttttgccccccgcttccactatctttacgggaaaatacggaactctatgacggatttcaggataggacacggatacgacgtacacgcgctggccgacgggctgcccctggtgctgggcgggatcgaaattccgcacacgaaaggattcgtggcgcattcggacggcgacgtggcgatacacgccgtatgcgacgcactgctgggcgccgcagcgctgggcgacatcgggatgcatttccccgacacgtcggacgacttcaagggcatcgactcgaaaatactgctccgaagggttgcggcgctgctgcgcgaaaaaggatatgagatcgggaatgtcgattgtacgatccggatgcaacggcccaaattgcggccgcatatcgacgccatgcgcaccgcgatggccggtgcaatgggcgtaggcgatgaccgggtatcggtcaaagctacgaccacagagcatctcggtttcgaggggcgcgaagagggagtttccgtctccgccgtggcactgatatacaaaatgcaggccaaaccgggcgaggaaaccgtcggataagaggttcgcgggctgcccgacatcagtgaaagcagccgctcagtccagccgccggaacttgggatcgccgatccgtttgtcccagagccacccgacatagcgcatgacaagatcgggagccgtcaacgtcagcaccgtttcgccggtggcggtcgaaacctcgaagccggcatggtaggccgtatcgccgtcggcaaaaccgaaggagatgcgccagccccacgccaggcgctcggcccggtaatcggacagggacggcgagtcgaaattgagcacgtaaagatactgcgtgatgccgcgctcggtcggcaggtgcaccccgacgtggtcgatgaacatgccgaaaaagtaataatcggtatagatgctacggatcatgccgcccggtacctcctgcatactgttcgggaaaaacatgtagtcgcgcgactgtaccagcgagtcgatcttctgcgcatagagcttcgcccggtaagcacggcgttcgggccgtgtcatgctgcgcatggactcctcgtagacggtcgtatgctcgacgacctgcacagggggctgctggacaggaaccacggtcgtctggggcacgctgtcgacggcggaagtgcccagcgtgaactgcgggacggtctgcgcggactgcgccacagcacccgaggccccgaaaacaagggcgcaaaggcacaaaatccggactaccacccgccgcgcaggagcaaaagcccccgccggggcgggggctcgcaatccgggaaggattatcgttgcagcggcatcccgccgcgacgggaaagacgggaagggggcgccgcatcccgtccggcgatacatcccggaactcatggtcaatagagctgtgaaatggtgcccgaatactccacggggttataccatgggttggtgatggtcaggttggcaccgcccgtgcgggagaagatctcgaaggtgaaggtataggtcgacgccgagaaaagcgaggtggagaaggttaccatccagccttcgtgggtctgctcggtggtatagccctgcacgttgggcacggtgtagttgatgattgtcgtgtaataaggcggcacatatcccttgacataaggcaggcagatgtcgaccgtgccatcccagacacccacgttgaaggccgggttgatgatctggcgcatggggccggccggctgccgctgcatggtctgggggttgaactggaagttacgcgaaaggatgaccgaatccatcgttttctcaaaatctgcgatacgttccgcacgtctcttctcacgcacctcgcggcgttcttccttgggcgacagaatctttttctgtccgatcacggtggcgcagactgcgcacagcagcacgctcacgacgataatgactgtttttttcatagcacataaaaggtttatacggccatgaaaaatgcaaatacggtgcctaactgcctaaagtcgtgactaaagacccagttttttcagaaattcgcccgtatagctgcgtggggcgcaggctatttcgtgcggagtgcccgccgcgacgatctcaccgccggccgccccgccttcggggccgatgtcgatgatgtggtcggcgaccttgatcacgtcgaggttgtgttcgatgacgatgaccgtattgccgcggtcgacgagtttgttcagcacgtcgagcagcaggcggatgtcctcgaaatgaagccccgtcgtaggttcgtcgaggatgtagagcgtacgccccgtatcgcgcttggacagctcggaggagagcttgatacgctggctctcgccgcccgagagcgtggtgcagggctgtccgagcgtgaggtagccgaggccgacctcctggatggcacggagtttctggtggatggcagggatattctcgaagaactccacggccatgttgaccgtcatgttcagcacgtcgtcgatattcttgcctttgtatttcacttcgagcgtctcgcggttgtaacggtgtcccccgcatgccttgcaacgcacgtagacgtcgggcaggaaattcatctcgatggtctggacgcccgcgccgcggcactcctcgcagcggccgcccttgacgttgaacgagaagcgccccgccttgaagccgcggatctgggcgtcgggcgtcatttcgaacagtttgcggatgtcggaaaaaacgttcgaataggtcgccgggttgctgcgcggcgtacggccgatgggcgactggtcgacgacgaccagtttgtcgatatgtccgatgccttcgacgctgtcgtattcgagcggctgcccgaaggagcggtagagctccttcgaaaggatcgggcgcagcgtctcgttgacgagcgtcgacttgccggaaccgctgacgcccgtcacgcagatgaacttgccgagcgggaattcggccgtgacgttcttgaggttgttgccccgcgccccgcggatcacgatgcgctgccccgtgcctttgcgaagcgtttcggggatcccgatacggcggcgtccggtgaggtagtcggccgtgatggaatcggaacgcaggatgtcgtcgatcgtacccgcggccatgatgtgcccgcccttgcgccccgcacgggggccgacgtcgacgatgaagtcggcggcacgcatcatgtcctcgtcgtgttcgacgacgatcaccgagttgccggcatcgcgcaactcctccaggctgcggatcaggcgccggttgtcgcgctggtgcaggccgatcgagggctcgtcgaggatataaagcacgttgaccagcttcgagccgatctgcgtggcgaggcggatacgctggctctcgccgcccgagagcgaacgcgacgaacgcgacagcgacaggtagcccaaccccacgtccatcaggaagcgcaggcgctcgcggatctccttgacgacctcctgtgcgatcttccactccttgtcgtccatataatcctcgatgtgcgccacccattccgaaaattcggagatcgacatggccgacacgtcggcgatgctcttgccgccgatgcggaactggagcgcctccttcttgaggcgcgaaccgccgcagaccgaacatttgcggtagacgaggaactgctcgcgccatttctggccgagtttggagtcctcgtcttcggtacggcctatatattcggcgacgccctcccacgagacgaggtggttgccgcccgaagaactgaactccgaaaggttgatggtcaacggctcggaatcgccgtacaacaccgcattcagccccggctcgggcagcgacccgacggggtcgtcgagcgtgaaatcgtaacgccgccccagcatttcgagaatggcgaaaagcatgttgttgcggtatttgcccagcggttcgacggcgccctcgcgcagcgaaagccccatgtcgggaatgatcttcccgacgtcgaagacggcttcctcgcccagcccgttgcaatgcgggcaggcgccctggggcgagttgaacgaaaaggtatgcggcgcggggtcttcgaacgcgatgcccgtcgaggggcacatcaggtggcgggagtagaagcgctgctgttcggtaccgtagtcgtagacggccatcgtacccttgccctggcgcagagactccctgagcgaggtcatcacccggtcgcgggcctcctcgccgacgaccaggcggtcgaccaccaggtcgatggtgtgtatcttgtaccggtcgaggcgcatgccggccgaaatctcgcggatctcgccgtcgatacgggcatagatatacccctttttggccagcgactcgaacagttcgcggtaatgccccttgcgccctttgacgatgggagccatcagggcgatcttgcgccccgtgaagcccgtcatgatgagcccggcgatctgctcgtcggtataatgcaccatctcctcgcccgtgacgggtgaataggcgcgcgacgcgcgcgcgtacagcagacgcaggaaatcgttgatctcggtcacggtacccaccgtggaacggggatttttgttggtggtcttctgctcgatggcgaccacgggactcaggcccgtaatcttgtcgacatcgggacgctccatcgtccccacgaactggcgggcataggtagaaagcgtctccatgtagcggcgctgtccctcggcatagatcgtgtcgaacgccagggacgacttgcccgaaccggaaaggccggttatgactaccagtttacggcgcgggatctccaggtctatgtttttcaggttgtgaacccgggcccccagtattttgatcgtgtcttctttcatcatcgtagtcaaatgtaccggaagccccgtttagtgtgcgggctctccggcgcgaatatcgtacaaagatagcgcataccgggggcaataccaaatttttcggaaatcagaattccagttcgaagccgtcggcatccatccacgccgggaactcctccctgaaagccgcctgcgcctcggagtcgaattcggcgacgagggtctgctcccgctcaccggcatcggccagcgtggcgccacggaagtcgacgagcgccgaatcgcccgcataggaggcatcgggatccgtgcccacgcggtttacgcccgccaggtagcactggttttcgatggcccgcgcccgcagcagcgtacgccacacctcgcggcggtcgtccgcccacgaggcgctgcacaggatggcatcgtaatcgccccggttgcggctccacaccgggaagcgcaggtcgtagcagatcagcagcaggaaccggaaccccatatattccaccaccacgcggcggtttcccggagtatagtcgcgcgcttcgccgccgggacgaaacaggtgccgcttgtcgtaccaggcaaccccgcccgaaggcttcacgaaaaacatccggttgcggaactccccgttttcggcgatgacgacgctgcccacgacggctttgccgtattgtgccgcccagcgccgcatggtcgtagcgacaagtccgtcggcaggctcggcgacacgggcggggcgcagcttgaaccccgtggcgaacatttcgggcagcacggcaatatcggcatcggccgccgcgacgacaggttccagacgttccaggttccggacggtatgttcccactccatgtcgacctggcagacagcaactcgtactttcatagaaaacttcgttttgtaaacaaatatataaaattttcttacagatcgcacctgcgagaataaaaaacatggaggcttgtaaggcagggcggcaacagagggaaccaggcatacaaaacggacacgcagggcggcacccttgcggcagtgcatacggttcggcgatgaaaagcaatgcggggaaacagggcgcgggccgccggtcgcaaccgcccaaggcgcacggccctgcgacagcctgtccagacgacctgcccgaacgaccggacgcagccggaaaaaagcagccggcaagacaaactgccttacactgacgatcgtgcgcggattgtcaacagaagaatagcggacaggcaaaacgaccggacgaagacaggcacgaacggccgacgccaaccagcacgcctcaacgcgcctccagccgccacaccgagaccgacgaggcattgccgcgctggtgcagcagcgaaatccggcagggcacgaaatccgaagcccggcagttccagacgtcgacgaactgctggggattgcgttcggcaagcgggaaccaggtgctttgcacctgcaccatgatgcggtgtccggcgcggaaggtatgggcgatgtccgtcatccggaaaggcacccgcgccggaacaccgggcgtaaacgcctcgggacgcgagaaactgcggcgatagcggccgcgcataatgtcgccccgcacgagcatccggtagcccggcagcggatcgtcctcggggaaaaggtcgatcagcttgaccacgaaatcggcatcggtcgtcgaaagcatcacctccaggtcggcatcgaccgggccgacgaaggtcatatcctcttcgaggggctccgaaacgaacgtcagcacgtcggaacgaccggacaggaaacgctggtcggcgaccatatactctttgggacggcgcaggccggaagcctcgtagtaaggcacgggatcggaaggatcggagacataggtacttgcggatattttggccgtcgggcgccgggtatcgaggataccgccgccggcgaggtacaacgtcagtttccgggccccgcgcgacagaaagcggccgaaagtatgccagcggttgtcccccgaggaaaagaccgcagcggccggcagcggagccgcttcgtccgtattgccttcgcggaggtaatggtcgaagaacggcacctcgaaatgctccatataatattcccacgaggcatcgttgccgaaatcgaacgccccgagcgtccggccgccgttacgccacgccccgtgggcccacgggcccacgaccaggtgacacggtgtcgaagggctctgccggatcagggcccggtagaggttccacgccccgaagcagtcctcggcatcgaacgtcccgccgacgacgagcaccgcgggccggacattgtaacaggcacggcgcaggtcgcgttcctgccaccacgcgtcgtaatcgggatgcgcggccatctcctcccagaaggggttgggtttcagcagcccggtaagctccgcaagcgtcgtatgctccaggaagaacgtccgctcgtcgggttcggcctgccgggacatggagggcattttcgcggcagggacacgtccgggaggggtattcatgccactcaggaagcggtaggagtcggtgagcatcagtaccccgttgtgatgcacgtcgtcacccatgaaccaatcggtgacgggggcctgcggggaaacggccttcacggcgggatggccgcaaaggccgcccatcatggcgtagaaccccggataggaacacccggcgaatcccacccggccgttgttgtgcgggatgtgcccgaccagccagtcgaccgtgtcgtagctgtcggtcgtctcgtcggtctcaccgctgccggcgggccggacatgctcgaagtcgccctcgctcatatagcgcccccggacatcctgcatgacgatgatatagccgcggtcgacgtagctgcgcagatagcctttctcaaacccctgcgggaagcgtccggcaccatagggcccgcagccgtaaggcgtacgaaaaatgatgacgggggcttcgccgggcgccttgggcgtatagaccgccgtgtagagggctacgctgtcgcgcatggcgatgcggtactcggccttgtcatacagttcggcgacgggctgcccggcaaaggccgcaacagcggcgagcaggccggcccacaggagcgcgaaaaatccacggattttcatggcaggaaggttgggttcgtttgcgaaagttaggcttttttccgcagatacccaaaaaccgccggacaaaggggacaggaacggcgaaaatacgcatccatttcccggtaccgggaaatacggccgggctgccgctgttccggttatcagacgccaggcgggttgtccgtacagcggagcggcccgtaatccgggcggaaagcatacggattccgggattgcgaccgcccgccatatgcgacgggaacttccggcaaaagttgcaatcccgcgaaaataaacgtacttttgcaggcggtcaattccgcaataacgatatgctcagagcaggacgcacccagaaacttaccgtaagccgtgtttcggactacggattataccttacggacgaggaacagaacgaggttctgctgcccaaccgttatatatccctcacagacaaacccggcgacgaaaaggaggttttcgtttaccacgactcggaagaccgcctcgttgcgactaccgaaacgccgctgctccgcgccggagaggcgggttacctgcgcgtggtggacaagaccgtgcacggggcattcctcgactggggattgcatggcaaagacctcttcctgcccaaccgcaaccagcagggcggcatcctcgcgggacggagctacatcgtatacctctatgaagacagcatcacggggcgctgcgtggcgaccaccaagctcaagggcttcatcaacaacgacctgatcacggtagaaccgcgccaggaggtagacctgctggtcgcctcggaaagcccgatcggttaccgcgtgatcgtcaacaaccgccattggggcatgctataccgcaaccaggtattccgccccgtagccatcggcgaccgcatgaagggatacgtccgcaaaatcaccgaggacaaccgtatcgacgtgagcctccaacaggaaggatatgcgcaggtcaaggattcggcagaggttttgctgcaactggtgatcggcaacggcgggcacttgccgttgaacgacgacagttccccggaggaggtgaaacgccttacggagatgagcaaaaaggtcttcaaacgctcgctgggcgtgctgatgaaacgcggcgcggtcgaagtgggcgaagacgggataaaagtcaaacggcaataatgggtaaaatgaacacggcggaacgggtttcgcgcgagatgtccgacaatttcgtcttccagcggtcgctgctggcttaccatgccgcggcgcagcgcatcggcggcgacgtattggagatcggcacgggggcgggttacggtatcgaggtggtggcaccccatgcacggagtttcatcacggtggacaaattcgccccggcagcggagcttatgcggcatccgcatgtcgaattccaccaggccgtagtgccgccgctggcattcgcagccaacagtttcgatttcgtgatctcgttccaggtgatcgagcatgtgaagcaggacatcgagttggtgcgcgaagtgaaacgggtactgaaaccgggcggcaagttcatcgtgacgacccccaatgcaccgatgtcgctcacccgcaacccgtggcacgtacgagaatatacggcagaacagctgcaaatcctgctggggcatgaattccggtcggtcgaaaccctcggggtcgcaggcaacaggaaagtcatggcctactacgaacagaaccgccgcagtgtggcacgcatcacgcgcttcgacatcctggatctccagcaccgcctgccccgccgcctgctccagctaccctacgacatcctgaaccgaatcaaccgccggaagctgctgaaggcaaataccgacctcacgtcctcgatccgtatggaggattaccgcatctgcccggtgtcggacgactgtttcgacctgttttacgtggccgagaaatagccggcgagcatctgaagcggattatcaaaaaaagacaagcagcctcatgcggggctgcttgctctttttaacggctcgtccgagcgctcgtcatgtttaatattcctcttcgttgaaaaggcttgtatatactgattatcaatatattctataataattaatgaaatttgcgcaaacaaaccgcactatttgaggcggtctggggcgatgggcaaacatattggacaaacaaattattgatgtaatgaagtgttaatcattatacataatgtcctcgacaccgacaaatattaatttgcccattctttaatgaatattgaaggcgatgttcatcatttatatgttttgaagcaactccttcttgattctttaacacttcagttttaccttttccaccaataaaggggtgctctttgacatctggaagtaaatcaagaatatctttaacgaaagaaggtttagcatttttccagtatattatgtcatcaacggcatcttgctcaaacttgtaatcagggaacaaacatctcaaatgataaactactttattattgtcacatcttaccaataattttctgtgataatgtatcttgcagtcttcataactatcaatatctgttatttgccttttttatctattccgatattttttattgaaggaaaatcaattcccataaacccaacattataggtgggaaattcttgttcaaaaacaatatcgttagttatatcaaaattataagattcacactgctcaatatattgcattatagctgtaatagcctcgttattttctgacttacataaagatatgtaatggtcatgataatatatattttcatgttttaaaatatgatcatcatgtttgcatttaaacttcacttctattctatcctcgtattcattatgttctatccccgattgttcattttctataatttcaacagcaagtaaatcaagacgactacttaaatcctctttattataggcatcaatatctatattacatttgtcaattacttcaatatgagtattttttaaaacaacaaccatttgaacagtatttgtattatctactaattcgtattgaccattactgtttcttacaggtattaataatcgctcctctcctgttgttaatttaagctctatcataattgcaaatattttgatagcaaaaaaagtgaaataaacctatttatcgaatataattcactatatttgtgcaataaaattgcgtctaagaatgaaactaaatagaataaaggcggtcttgtcggataaaggaatctcccaaacatggttggccaaacaacttgacaagagtttcagtatggttaatgcttatgcttgcaacagaatccaacctaatctggaaacattgcaggaaattgcagagattcttcaagtggacttaaaagatctgataacggacaaggacgaacgtcaatagcgtttgtgagcatccattattttttagaatgcaacttccgataatgtagagatataggaatttatgacacctgaagaaaaagcgagacaaaaaatagatcagtggtttaccgatgctggttggaaagtggttaatagagaagactacgaaccgacttgctctgccattgctatacgtgaagggttgctgaaaggtaatctcgaagccgattatttccttttcctgaatggaaaggcagttggtgtacttgaagccaaaaaggaagatatagatgcctcgtccaataaagtatgcgagcaggctgctttatatgcaagaagtgtccccaatatctatcaggcgtatcagaaaccattgcctttcatctttacttcaaatggaaaagaattatatttctgcgatttccgtaaacaagattcttctttcaaacagataactactatccccactccatacgagttagtcaagcagttagggataagtgattattttgccgggcttccgactttgcgcaagaaaggattgcgcgattgccagtacaaggctgtaaccgagttggaaaagagctttcgtagtgggcaaaatcgcgctctgatggtactggctacaggtgcaggtaagacatatacagcttgtcttgctgcatatcgtatgctgtcatataccccgatgcgaaggattctgttccttgtagataggaataatcttggcaaacaagcggagggagagttcggaactttccgattgacagagaacggagatgcgttcaatgccatatttacggtaaaccggcttcgttcagcatctataccttccgacagtaatgtgattatttcaacgatacagcgtcttttctcttttttgaaaggagaagccatcgaagataatgattacgatgacgacaatgaaccggcagaagaagttacgttgccgcccaatcccaatttgccacacgattactttgatatgattatcatagatgagtgtcaccgttccatttacgggaattggcgaaaggttctggaatatttcgacacggccagacttgtaggattgacagcaactccgattgaagaaacaaagaaattcttcaactacaatatcattgtcaactatacattgggacaaagtatagtcgacggagtaaatgtgggttgccgtgtatatagaatcaagacgcaggttaccgagaacggaggtgcaatcttggagggagaaaaggttaaggaagaaacctgctataccggagaagtgaagaccgtctgcaacaaagagacgaaaaactataccaataaagaactgaaccgaagcattatcaatccggcgcaaatcaaacttatcctatccacttatcgagatgtagtctacacagagttgttcaatgatccgcagcgagacaacaatctagactatctgccaaaaacattgatatttgctcttaacgaaactcatgcaaccaatatcgtacagatagccaaagaggtgttcgggcgcacagatgaccgctttgtccagaaaatcacctattcggcaggggacagtaacgaactgatacgtcaattccgtaacgataaggatttccgtattgcagtgacctgcacattggttgcaaccggtacggatgtgaagccgttggaagtagtgatgtttatgcgtgacatagaatcattgcctctctacatacagatgaaagggcgcggtgtgcgtacaatcggagatgaacaactgcgcaatgttaccccaaacgcattcagtaaagactgtttctatctggtagatgcagtgggtgtaacagaacatgaaaagacaattccaacagcgactgatgactcaacgacaaagacaatcacccttaaagaactgttggaacgtatcagccatggctacctcccccatgaatatttgaagcgtcttgcagcaacgctttcccgaatatacaacaaggcgaacaactcgcagagaacagagttcgctcgtttggctcatgacgacatgaaggaacttgcttccagaatttataatgcgcttgaaaacaacactctccccccgtttgtcagtgtgaatgaacctaacaatgaacgcaaaggattagtttcgccactagccaaccatgcggatgcacggcggtacttgctcatccttgctgccgggtttgtcaagactttgctgccgggagaagacacacttatctataagggattttctattgaggaagccaaaagtacgacagatgcttttgaagatttctgcaaaaagtactatgacgaaatagaggctctgtgtattattcacaacaacgacggagaaccgataacctattcaatgttaaaggatttggaaaacaagctcaaaatggcgaacaaccatttcacatccaaacaactctggaactcgtatgccattgtaaatcctaatagtgtgcgacgttctactaccaaagaggaaagcgaagctctgacgaacatcatacagcttgtacgctttgctttccgtcaaattgagcggttggacagtgtagtctatacctccaaccagtatttcaatctgtggttggggcaaaaccaacgcgaaataaccgacaagcagcgtgaagttatcagccacatagtggattatatcgctgccaacggtgcttgtaccgtcagagatattcgtgaggacgatgctacccatgccgcacaaatgattcgtgcattcggcaatatgcagaaagctgatgatgcacttcgttctctttatacatttgtagttttaagaaaagcagcataaagacaataatatggcaacaaataatacaacagaacaatcgctcaccaagaaggtctggaatctggcaaccactcttgccggacaaggtatcggattcaccgactatatcacccagctcacctatcttctctttttgaagatggatgccgagaatgtagaaatgtttggagaagaatcagctattccaatcggttaccagtgggcggatttgatttctcttgacggtttggatttggttaggcaatatgaagaaactctgaaacaactgagcgaacaggagaacttgattggcacgatttacaccaaggcacaaaacaagattgacaagcccgtttatctgaaaaaagtcattaccatgattgatgaagaacaatggctcatcatggatggtgatgtgaaaggtgctatctacgaaagtattctcgaaaagaacggacaggacaagaaaagcggtgcaggacaatattttacacctcgcccactcatccaagcaatggtggattgtattgctccacaaataggtgaaactgtttgcgacccggcttgtggaacaggtggattcctgctgacggcatacgattatatgaaagtccagtcggcaagtaaggagaaacgtgacttcttgcgtaacaatactttgcacggagtggataatacgccgttggtggtaacacttgcctccatgaacctctatttgcatggtgtaggaactgaccgcagcccgattgtttgcgaggactcattggagaaagaaccgtctacgctcgtggatgtgatacttgcaaatcctcctttcggaacacgtccggcaggctctgtagatattaaccgtcaagatttctatgtagagacaaagaataatcagttgaacttcctccagcacatgatgttaatgcttaaaactggaggtcgtgctgctgtggtattgccggacaatgtactttttgaaggcagtgccggtgaaacgatacgaaagaagttactgacagattttaacttacacacaattctccgtttgcctaccggtatattctatgcccaaggcgtaaaggctaacgtgttgttctttacaaaaggtcaacccacaaaagaggtatggttctacgactatcgtacaggcgtcaagcatacgcttgctaccaacaaacttgaacgccatcatttggatgatttcgtttcttgttataacaatcgtgtagaaacgttcgatgcagagaacaatccccaaggtcgctggcgcaaatatccggtagcagacctcctcgctcgtgacaaaacgagccttgatattacgtggataaagcaaggcggtgaagccgatgaccgctcattggcagaactgatggcagaaataaaggataaaagcctgacgataagttccgctgtggcagaacttgaaaaattgcttgcaaacataaatgaagattgagtgtatggaaaacaataagatagccatatccatggagcaacagtttggagagatcatagatattattctccaacataaaagccgtgcttcaagagccgtaaataacgaactgttgttcacagtatggcatgtgggcagctatgtatctgccaaactgaaaagcgaggaatggggaagcaaggttgtaacgcaattgtccgaatatatccgttctcaacgaccagatcttaagggttatagtcgcagaagtatttacaatatggtgatgttctatgatgaatattcatcggaaacattctatgctactgtagaaaagtatttgaactctgaatttgtgcagccaagaactgcacaaattgaagcagcccaacctacacaggagctaactgtaattgtgcagccggaaactgcacaaatgcctaaaattttagaactgactaccttaaccaaccatattgagatattatgccgatgcaaaagcaatgaagaacggatgttttatatactctatgccaataaggagcatttagtgaaacgagagcttcagcgttgcatctccaatcagacatatacggctttattgggcagcaagaataatatgtcgaaaggattgctcaatgcttatccgaatgccccgataatgttcaaggatacgctgtttgtcgattttctgaatcttccaaagaagcatagcgaaacaaaattgagaaacggtttggcggaacacatgaagcagtttattcttgaattgggcaaggatttcatcttcatggatcaggaataccgcctcaatattggtgcatctacgtttaaggcagacttgctattcttccatcgtggattgcaggcattggtggcagtggagctgaaaaagacaaaattccatccgcgcgacctcggtctgttggaattttatttggaagcactcgacagggatgtgaaacgctccaacgagaatccttctatcggcattattctctgccctgaagcagaccgggtagtagtggaatatgctatgagccgaagcatgagccctacaatgatagccgaatacaaacgcatccttattccgcaggaacgtatgcaacagcaactgaatgagttttgcaacctgttcttaaacaaagaatagctcacacatggatacaaagaaattacgtcaaaagatactcgaccttgccatccgtggcaaactcgtcccgcaagaccctgtggatgagcctgcatccgtattgctcgaacgcatcaaagcagagaaagaacagttgataaacgaggggaagatcaagcgaggcaaaaaggccgcaaagacttctgatacgccccattatgagaacgtgccgtttgaggtgccggagaattgggtgtgggcaactttgggagatatatttactttgcaagctggtaagaatattacagctaaagacatatcagagaaacaagatatggtacattgtttcccttgttatggtggtaatggactcagaggatacgtcagtagttataatagagagggacgctttccgctaattggaagacaaggagcattatgcggtaatataaatgaagccaatggacgattttatgctaccgaacatgcggtcgttgttgatacgtattgtgatactaatattgattgggctattaacgtattggtatatttaaatctaaatcaatacgcaacttctacagcacagccaggattatctgttggcacaatcagtgaagtcgtgattcctattcctccattagaagaacagcaaagaatatctcaaaaattgaatgactggttttgtctgattgaccaaatcgaacaaggtaaaacagatttacaagctaccattaagcaaactaaatccaaaatcctcgaccttgccattcatggcaaacttgtaccgcaagacccgaatgacgagccggctattgaattgttgaaacgcatcaatccgaaagcagaaatcacttgtgataacgggcattatgagaacttgccggattcttggtgtgttgtgcccatgcaaacactatgttctttgaacgatggtgaaaaacagaatggtatagaaagaataaatcttgatgtcaaatatttgcgtggagaacgcgatgccaaaacgttgactgccggaaaattcattcctgctaattcacttttaatactggtagatggtgaaaactctggagaagtattccgaacaccaatcgaaggctatcaaggcagtacattcaaacagttgacaataaacagccagatgaatgctgattatgtcttacgagttatcaatttgcaccgtaagacattgcgcgaaaacaaggtgggttctgctattcctcacttgaacaaaaaaatgtttaaggctatagaagtaccaataccaccttatcatgagcaactgcgaattgttaatgcaatgaatattgctttcagacatcttgatagaataatggagagcctataaactctccattattctatccaacttggcaaatgctgtatgaacagcatctacaattcgcttttgttctgcctttggtggtattgggatagtcagtttagaatattccgaaatccaatatcgtttatgggtatcgccaattaagcgagttatgttcataaacattgcaatatattttatttcaatatctttttttacctgcaaaatcttcatagcagatgattttactttaaaagggaaatctacatattttgaatctgtagtaaagtcatcaaaaataatacagggtaatttggaatatatccccttcacttcattagtataacctatgatgaaggatttccctgctgttaaaactggtattggatagccattattataacttgttgaattaacaatatatgctgtaggttgctcataatctacaatatcttcgaggctacatactgtccatccgatgggcaagttctcataatgcccgatacgttctattatattgctgtcatattcattaaaaatacatgtaatatgacaacgaaattcaaaaactatcttgccaagacaaacttggcaaagaataccgttacatcgtatgtatggacggtgcagtatttcctcaatcactatggtgtcgtgaacaaaaagaacctgttggcttacaaggggtatttggttgagaacttcaaacctcagacagtaaatcttcgattacagggtatcaacaagtaccttgaatttacgaaacaagagaaacttaaggtaaagttcgtcaaggtacagcaaaagaatttcttggaaaatgtaatcagtgatgcggattataaatttctcaaaacgcgcctgaaagctgacggttatgatgagtggtattttgtcgtatggttcatggcggctaccggtgcgcgtgtcagcgaactgctccacatcaaagcagagcatgtacaaatcggacatcttgacctttacagcaaaggtgggaaaatacgtcgtctgtatattccgaaaaacttacgcatagaagccactaaatggctgaaagataaagggattatttccggctatatattcctgaacagattcggagaccgaattacaacacgcggcatagcccaacaactgaaacactttgcggaaaaatacggaatgaacaaggaggtcgtttatcctcattcattccgtcataggtttgccaagaacttccttgaccgattcaatgaccttgccctgcttgccgaccttatggggcatgaaagcattgaaaccacacgcatctatcttcggaggacagctagtgaacaacagaaaatcgtggataaggtggtaaactggtaaggttgcattaacccttagaagtgtatttcgctacacttctaaggctgtttgaatatcatcaaggcatgagaatagttcttctatcttttgaactatacgttgttgttcggcaagaggaggcaaaggaacatttattttatgcaaagcgttggaagataatcctaacaagcctattccttttcctcctataagattgttttctttcagatacactaaaacgtaataataaaatgctacacacaaatctccttttgctcgaagcttatgaatatggttctgaatacaaatgtcataatcatagttccaaatagccgatcgcccaatatcaccaccttcacatactaataaatccccttttgttacagtacacttatccaattcagattctttgtatggcatttgtttaatcacagtaaaatcaaattcattccaatatacgttagatgttgtcagatagcttctcattattccttctttgtttgaggaattaagagctttacctgtattgtgattaaaaatatctcctaaaatagtgcattgcaatcctttgggataatgcccgttatcacaagtgatttctgctttcggattgatgcgtttcaacaattcaatagccggctcgtcattcgggtcttgcggtacaagtttgccatgaatggcaaggtcgaggattgtgctcttggcttgtttgattgtagtctgcaaatcatctttatcattcttgattatgtccattaacgaaatccacttagccatctctgctacaattctagcttgttcccctaatggaggaataggtatcattagctgcgacagtttttgggcattgatattagactgatttacagcatctgtttttacatcataacaccaatcacggtaataactactattcattacggtgtttaggtaatctgcagaaatcaataagggcctaacacgaataagatagcctgcatatatagctggttgttcttccttgtaaattgctgtttttccaacccactcactactatttgtgcgattaaacaataaatcgtattttttaagagagtattgtttaatatcttcatcattcgaagaatacactaaattggaataatcaattgtaccaagattcgtaatattccccattcgtaaaacagctattttacccacacttgatgatttctcagaagtaccgtattttaattcgcatacaatatcttccaacttgcaccacacccaattctccggcacctcaaacggcacgttctcataatggggcgtatatgtagtaaatagcgtgctgtaaccttttgctacagcacactaaaagggatagttaccttctccgatatccgcttctttcagacttaactattcgcgaggcatgaagtaagcacctcctccgatacacttcttcctcttcatccgatctgcgtccgtcccagcgaagatccgaatcggaattacctcctcctccggaagatacaggttcgggatatcctccaataagtgcaacggcgacggtaaaaatcagattgcggattgacagtaccgccaactgttcgagcaatgtattcagttcggattccaattcttggttgatctctgaaagggactggttctcccttttcagccggtagaactcaccgtaatctgccagaacattgcgttgggcggcttccacctgccgtgccgcatcatttctgtatagagattctatcttgctggaaaacacggtaaaatagccccagtagagacggtttaaaatgacccgttgaaaacggatgaaattgaccactataaaacggtcgaaattgacccacctaaaacggagcaaacagaccccttcggggatttgagtaaaaggtagttgttcaaaggcttaaaaggagtcggattttgttagcttgaagcaaaagcaaaccaaaatctgagagatcatgcctaacagacctttgaaaatgaacaaattacgaacgattattcgactgtacaccgaacgcgtgggcttacgggctatcgccgagatggcccgtacttcgcgtaacacggtaaaaaagtatgtcaacaagtagaacactcagagccttacctacgaggagttcctagccaagagcgatgctgagctttacaccctgttctgcattgaagaggttcctgaggaacctaatccccgctagatgcccttgaggctttcatgccatcagcgagcaaagagatgtcccgtaagggcatgaccagccataagcaatgggagcgttaccgcgtggcccatcctgacggctacagtctgacgcagttccgggtagccttgcggcgctacgaacgcatcagtaacccgtcgatgcgtatggaacataaggctggagataagttgttcgtagactatacgggcagtaaactgtggatctatccgccgggcgaaccaccccgggaggtggaagtgttcgtggctatcctcgggtgcagcctgctgacttatgtggaggcagtggagagtcaacgcaaggaagattttattacagcctgcgagaacgcattctattactatggcggcgttccccgtgctatcgttccggacaaccttaagagtgccgttaccaaagcaagccgttatgaagctatccttaacacggagttcgaacggttcggagagcattatggggtaacagcttatcccactcgggcacgcagtcccaaggataaggcccatgtggagaatgcggttaagttgacgtataaggacatctttacggtcatcgagcctctcggtcgcttaacgtagctatccgcggaactcttgaaaagcacaacaacaagaacctggatcgccgcaactactcgcgccgcagttacttcgaggacgtggaacaagaagccctcggccctctgaacccgatccgttaccagatgaagaagcatatcgtcactacggtcgacaaatatggctatgcacgcctacacgaagacatccacgactacagcgtcccgcacatctacataggcaagaaagtgcagttgtcttataccgctaccgacgtggagatccgctacaacttatagcccatcatacccgcgaccaacacaactaccgctataccaccgtcaccgaacatctttgtcccaaacaccgtgcggttatggagtggtctcccgagcggttcgtcgagcaagccgctgccatacacgaggatgtagagcattatacccgcagggtacttgaaaagacccgttatcaggatcaggccaacaagatgtgttcaggcatcctgaacttcgcgcgtaaagccgggccggaacgtcttgcggcagcctgccgtctggccgacagctatggtaagtacagtttcagggagatacaggatatactccagaacaaatcggaagcgatagaccttcccgaagagccagccgatatgcctgagcacgagaacatcaaaggtaaagagtattacaaataatccaagtcaatgaacaatcagaccttagagaaactgcgccagatgcgcctgttcggtatgcacgacgcttttaaaacctcgctggaaaacaccattaaagagaaaatgacacagaaccagttcgtctcgcacctgatccacagcgagttcgacaaccgtaagaaccgcgccgtagagcgagccgtcagggctgcccagttccgctacaacgctacgctggacgatgtcgactacaccttcgaacggggactgaaccgtaatcaggtcgaacgccttgccgccatggagttcgtgcgcgaccacaaagacctaatcattaccggtccaaccgggacaggtaagagttatctagccacctcgctcggttataaggcctgccaggacggcttccgggtaatgtacgcaagtacggcaaaactgatgagccagctcaaaatatccaaggccaaaggcacgatactggccgacctgaaacgtatcgagcgagtcgatatgctgatcctcgacgccttctgtatgcagccgctcgacgcccagtcacgcggcatactgatggacattatcgaagaccgccatcagcggcgctcgacaatgatcacatcgcagatccccgtcaagaactggtacgacgtgatcggcgagaagactatcgccgatgccgtgctcgaccgaatcgtacaccattcgctgcgtgtcgagttgttcggagagtcgataagaaaaagaaaatctaaatctgaaaatgcctatggatagatgcctgcggttgcaaaaactactctcttgttcttttaaagcgaatagttatctttgcagtgtcggtcgacacaatcccgaccgttttatgggcgagaactaagtagggttctcgcaataaaccgggataaaagacctacagaaaaatgttgtttaacccgggcaaaatcacatccttttagaccccaatccggacaacaactttttactctttttgcttcgcaactttaggggggggggcaattttaccgtgttttccacaatactataaaacctgaaaatcagattatttccatcgagttgaaatcctctcgcagtcgggcgacttccgcagacagggtttccggcaggaaccgtgcatagactttctccgtcacgtccgtacttccatggccgagcagacggctgacaaccgacattgacaaccctttgttcaatgcaaaaaccgcgaacgaatgccgggctgcctgcatcgaaagactgaacggcagtccgatctgttctcctgccacgacaagcgactggttaatacattttcgcgttgttacgggctttgtatagtgcttccgcatcatcgagatccagactttcctttaccagattgaatacataccggcaaccttcgcgtttttcctgccattgtcgcaagatgcgcaaagccggttcggtaagcggaatcacatgacgtttgttcacctttatcatgattttccgcaactcacgtctggcaaagtcgatatgcttccattgcaaggtcataacatccaccacacggagtccgcaggcatgaaacgcaaagaaaaacatctctaaaaactctttcctacgcggttcaacacaattcctgtaatattcaagcaggtcagccatctgctctttggtcaggctcttgccgtcaaattcagcctcttcttccgaaagcgaaactttcgtcacaatacgcatatcctgaatccgtgcattgacggccggatccatcatgctcatctcactggcatatgcccacgctttcaatatcggagtcagtgcatgattgatggtagcatcgctgttctgcttgatttccctgcgccattcgatatagctgtccaaaagttccggtatcatttcgccgacatagattgtatccggtttatatgttccctgtttggtagcccgtaaaaatgtctggaagatattcatgcaactctttccgttctcgtaccggcttctcccgattctgttccttgaatagtccgaggaaagacgttccaatgtgaactccacgaagtctttgccctgatcccggcgtgcaagaggcttgtcagcaagaaagccggacacgacatcagcagtaatctgattgggatgcttctcgttatactcggcaagctgcgaatctatacgctctacacgcgccagcaaaagttggttgagccgtttgtattcgccgccataacttgcccgtaactcgccacgtccttgcttgccgttctgattccagtcggcaaccttcgcaaacacatttgtcgtcttgcgtatgatctgctgttccaagtatattccaactcgacaggataggctttatctttatcgacctccttcggggtgcgaaggcgatacttacccaacggatatagtctttttggtcttcccatatattatcctcctttcagcaatattcctgaggagaagtaaagatatggaattttagacaaacaaactccgattttcgctgcaaaaaccgcaatttagacaaacaaaccacaccatacaagaccataaaacaccagcgcgacaaacaaattttcattgttcatcgcgctgggatttaagtgtttaatctattcgagtccgactaatattcctcctcgttgaagaagaaatcgtctttcgacgggtagtcgggccaaatatcttcgatagattcgtaaatctcaccctcgtcctctatttcctgcagattttcgagcacttcgagaggcgcacccgaacgcacggcatagtcaatcagttcatctttcgtagcgggccagggagcatcttccagcttcgatgccaattcaagtgtccagtacatagttccaagtttttaagttcccaaatatcagcggattaacatcaggcaataatcgctattccgctatcactgatttgcaaaagtataaaaaaaacgagaaaaacaaagaaaaaattacaaaacatccatgcgcacgcatcaataaactggaatacaaagctttatggaatccacaaggtctcctcgacgccgtaatgctctgtgagcgtgcgcccgagcagatagaaatagtcggaaaggcggttcagccacatcagcacgatggcatccgtgccgtatttttcatcggcacgcaacgcggcacgctcggcacgccggcagaccgtacggcacacgtggcacatcgaaacgacggcgttgccgcccgggatcgtgaatttgtcgatcggtttgagcgcgtcctgcatcgcgtcgatacggccttcgagccaggtgacggcctcgggagccagcggcgcgaccttcccgcatcctgttttcccgcacgccagcaatgcctcgacggtcatcaggcgtgacaggatacggttcaggtcgtcgacatagggcgacaacgcagcttccgcacgcatgttgtcgcagagcaaagccgcaaatgctgccaattcgtccaccgtgccgtaagcctcgacccgttcgtcggtcttgaaaacccgttcgccgccgacaagggaggtcgttcccttatcgccttttttcgtgtatactttcatatcctaaaattattgtgaaatcattaaacaattaatattcaaacaaataaaccaaataatgcgctaccaatagtaacaaacaagaaacaaatttataaaaacgcgctatcgacaataatgccctgccaaagataattatttttcatgaactccccgacctgttcaaccggaacgcaccagcaccctatcaaattttatagcaaattcataaaatcgttaaaagttggcttttttgaaaaaagttccgtgtgtgtaaagccgtgcccggcgaggtatgcagcgcgtaaaataataaaatatcaccccctacccccccccctctcgcctatgcgccgttgttgcccctactcgtgccttctgttcgcacttcgcgcgtgcggcgcgtgtacctccgcctcaccgcatacatgcagcgtatgggcctgtaatgcattcggccaacttgcccgcctgcgacaactgccgggccagtgcttaccgccgcacgatgcgaccagctgcacgccgtccgcattggtgccaggggaaggggcttccagctgtacgaccgcgaggcgttaccaaccatccagccaagaaccagacaaatagaacacacaaaagcgggccggcataagccgacccgccgccgtggcatatggcgccacccgtggaaggtaagagatactaattatattcgtgtatatctattcgtccaagtgcggaaacctcgacaatatagcccgtgttcgtttggtgcactgcttccacacgtaacgtaaagcggaacagaagccagcaagcgaaggcagtgagcacgacaaggcaaagagcctgtatagatttattcgtggggtattgtttcatggcttattcctcctccgattgtaaatctaaatcatccatcaatgactttacttgagccaaatcggccgcgcaagagcgtagaaactccctaatcatagagaacttctctacatgcaccaacttgtgcgcgagcggatcgacaatgcggcatatttcgtcctctatatgctcctgggctgcctttttcgatgcgaattcgcgcccgtccattgtttgatatctaacaacttctttcatgacgatttactattaggtgattgatgatattggtttattcgagtgagtagattaagacaaaacttctactcgtacaactgcgtcggctgtcgccctggcgtcgttcaagtagcccagcagttcactgttatgcgtgctgccgtacacgccgaccattgcggtgtcagcgggaatagctcccgagaccaatctggcaggggaggcggcgccccccgaacatatcaacggttacggcttcgccctccttgaacaggatgtagttcgagtatttcacctcgttcgctttcgttacggtcagaaaatcaattgctttcatgatgttattctttttggcttcttttcttgttttcatggctttcggggtttagcaaataaaagacaagacattaacattctatatgcctggaaatacgcgcgggcctgcacgtcctgccagccctcccgatcgttgggggctttgttgccgttgtcggtgcgttttaactccgagggagtgcagaggttttttgctatatccccgtcgtagatcagcgcgcacccgccataacaataggcgttccagtcgtccgcaccgtttaataatgtttcctcattgagttccggaaccggctggccgttattctcgcaatactcgcaaatgttttcgtaactttccagcagatccagcgcaaaacctttcacgcctcgatcccagcacgaccgcgttttaacggcttccagacgtgcccggatttcgtttgcttcgttcttccagttgttggagttgttcgcagcagtagccgcgttgttcgattggtttttcatgatgttgtagacattttttcgagaaacagaaaaaaacggcgtttctctaacccgctgtctacaactttgaaaaggtgttgcgccgtcattacaacaaacgcacggggtgaaacgccgcctatactggctatatgtgcataaaaaatgcaccttgattcggtgccgctgcaccttttcatattgtagacattgcaaatatacaaccatttttcgaacaaacaaatatttttcggattttttgcgaaattttttacccggatatataccaatgcaagaaaatcggcgttttatttgcgggtctcaaatattagacctatatttgttgtaaataaatgaaaaaacatgcctacaattttagaaatattcgggcttcgattctatttctattcggacgagcatttaccgatacatgtacatatagagcacggcgggaacgatgcaaaagtagaaatatcaacccgtaaaataatatacaaccgtggaataaaggcaaacgatatgcgccgggcgttggaaattatagaactatatgaggcggaaattatcgctaaatggtacgaatattttgacaaataaatattaataacatggaacgaatttcgaaaatacagtttgaaggcggccgcatatatatggcggccgatacgggcaaaatctattcgcgtcccttggaagcgtttccagcactcaaagaagccaccgacgaacagcgcgcgaaatatactataaataaatatggggacgcgatccgatggccggaaattgatgaagatatacatatatcgaatttttacgaaaccgcggaaccggaaccagacaacgcgatagcgcgggcgttcaatcggttcccgtggttgaatgtatcagaaattgcgcgacggataggtatacataaatcgttgttatctaaatacatttacggcacgaaaaagccatccaaacaacgggaagcggatatattagacgccctgcgggaaatggggcgggaattagcaaatatatgaaaaagacggcaaaactatgataacaacgaatctagaaaacttgcaaaacgacatagaaaaatattttaatactgtcgtaaacgattccgaaatagtgatcgccgcccaggccgacggcataggcgtcgtaattatgccgtttgaggagtacaacaaaatgacgttgaacgctgggcgggttattgatccaagccacaaatgaaagcataaccccaaaggaaaggacagaaaggcggggaaattccccgcttttttcatgcccggggttcgctgccgcttttgtcgcgaatatttgcaaaatttgcgacattcgcagccatgaacgtttgcagcgacattcgcaaagttgcgagcatccgcagagcctcggacattcgcaaagatattcgcagtcacattcgcaaagttttttcaccctggccacattcgcagggattcgcagccacggacattcgtaggcacattcgcagcccgcgcagctgcttttcgtactcacagcaaccctagttccgtttacctcaacattcgtagcccaatcaaagaaaaccccggctgtccttcgcaggaggccgggggtgaatgcctgcgtccaggatagatactacgttaaagaatatgggcgttactacaaaatacaactttattgtcaatatagcaaatctaaaactcccaatattatatattatatcacgggtcacgataccgccatcagcatccgcccggcaatcgactgagacgacaaaataaaaccaatagaacaatttcaagcatctttccggtgttttcccccagaataatctaaactaaaagaacaatctaaagctgtcagggaaaaacggttttgaaattttgccgcaaaaacatcttcgaaaaaacgccggagaaaaacgatttcaaaatttcgatagaaaaaacaatttggaaaaacgccggataaaaacggtttcaaaatttcgatagaaaaaacaatttggaaaaacgccggataaaaacggtttcaaaattccgacagaaaaaacggtctggaaattttcaccggcaaaaacgctttcgaaaaacgccagacacaaaaacgattctgcaataaaacgggttcaaaaaaaacgacgatgccagaagcaccgccgcaaaacgatatcctatcgccttatagcccgaaataaggcctggcgaaccgcggcctatccgggtctttcagtttttcgaccgccattttatagacgaccttcggcatgtcagcctcagacacaacttctgaaagcgatttagcatgatcggagtagatcatatttgctgtcgcccatagcgcatatttattgtaatacggcgcttcctgcatctggctacccagagacgttacgaccgcctcgaattgcggcatcggccatttggggcctttcgttccgctctggttgacaagccccgagaccacctgctccgcctcttcgggcgaaagatagttatgccactccgaggcttcgatcttatcgagccatttctgggccattttaggctgcatggttgccatctgtttgaatccccacgcgtcggcacacatgagcattctcattttgtccgggtctttcgatgcggcgatctttgccaccaattcatcgaatctgctttgcatctcttccatagtttcagcagttgtgacacccgctgttaaagcgaggtatcggtttgtaaatcgttcttgttattctcggccgggtgattttcgtcccggccggggtgttttgcttctgcccctgcttcgggggctccggtttgctctttgccatattacatcgtattttatcgaaagccacgcaagcagcaatccgaaccagttggataaatatgcgacgatgaaggatagcgcaacagcctccatgaagtcgtgaccggagagtagtaacacgacgagtgttccccacatcgaacaacacataggacacttggcaatgtcgccgcagacagcatatgccttctcgataaatcccatatgatgcgccaaagcgatcacgatcatagaaactgttgctacgactatcccggtaatcatcacgcaggggttgatgttgccacagtgatcgccagcggcgtttccgaaacgaaggcccgcgagcagacttgacacggagccgctgccacagcattcgtcgccgcgcctgcctcgattgttaccgtcggggcggaggatgcctgaatcggaatcgtgaaatcctgcgaaagcggttgctgcttggtgcaattgcaacctccgttacacggaacgtaggcaatgatgccctcaacgtgaatcgtcgccatgtactgatccgcccctacctgtgccacggatttcaatgaaaatttcggatcgaacacgggggtgctcccggcacaggtcggagtgcacagccgttgcgaaatgtttaccgccacgaaatacggcgatgcgacagccccggccgcaaggacgggagtgatgactgccgcgggaattttgttacaactcataatatgtttttttggttcaccccctactacatctgattttcttccgcgccgggagtgtaaggctcggagtcgggtatttcgagcaccatgtttttctccatggcagcgatcttttgttccatcgcagcgatacgctgttcgaaggattgcaggaacatattgttggctttgacaatctcctgcacgttcagaataagcttatatagttcgttcatcgtaaaaatgttttaacgaaaaagttgtctttgaatctactgagggcatcgatcagcttccgagcagatacgattatcccctgctgatagttggaggatacaaaagcgtgtgcagcacgttctacctcccgggcctcttcctcggattcggcatatatgtagaattcgattttatagggtttcatagcggttgttactgattatccggaattggcggaatatcaatagggggagccgaagccaatggaagcggcgcgccgccgcggatcatttggaggaaattccacccttcgatgatatcgcctttatgctcgccgatccatccgaacaaatcgtttgcacctgtttttatctgctccactacggaagcttttgcgggatcgatatcagggaggttcgaaagatcctcggcgatgaaccgatataatttctccgccttatccacatcgttcccgcatgctgccagacatgacatcttcaatgataatttcgatgttgcccgtatctgtgtaaggtcgatctgcggcttgccaaacatatagatactattttaaaagtcgataaaaagaagggaagcagagatcgtacggtctccgcctccccggcgcggtttaattaccgcacgtgttgcacgagcacggcatcgccggctgatacagtgccacaggctgcgggcatacctgcccgttgcgtccactgttggcgatgatcgacaacgcctcggcagtcgcaagggcattggccccggcacctgccccggcacctgcccgtacatcgacgtactgactgatcgtaggcgcatggttgttctgccacgtttcgcgcgactgacgctcgacaagcgtctgcgacgcgaggatgtcgatggcactcttgttgccggcggccgcagcttcagcggctttctggcgagccttcgacgcctggtttacgccccaaagtccggcaagggccagcagcagggcgcctccgcccaggccggccgcgagaccgatacccgtcgtagcggcaccgtggcgacgacagccgtagtcgtcgtaaccacggccgaatcctcgattttccaacgccaaaaaatcggcagttgttaagttggaatccataacttgttgtgaataatccgcctcttacctcttcggcgattgaggtagcatttgaactacaccacaaatatcactacttaccgactgaatgccaatcagctgtttccgatgcattttctgatattttgcaaatatattttcaccattttgttcgattttacccgatcttcgaaatgcgacaaaagatagcgtatagctgccggggtcttcctcgcctgtgttgcaatctgccccggatataacccttgttcttgtaaaagtcgaaacaaaatacatcgtgcatccacgacctccatgcttttacttcgagataaaatctgttcacgggaaacctcggtctgttgcgacacgacatccaatacccggttgaaaatttccgatttgcacatatccgatgttttttatagctttgtgatctctcttacaaacaactggtgccacaacaccgtgagaggcatatttgcccctgccgtggtgttgtggcacctttgtcacccgtggaaggtaagagagacacgggtggaggcgggggctttttacgccggcccccatgcggcatccgctacatgatatagtttcttcgccgaacattatcccggatatcgggattgtattccttgaaggggatgatgtcgttataaattatcttcatacctgtcagaattgccataaaataacacctactcctacgccgaccgtaggctggaacccttgcggtgtgtacgccgctccaaccccggccgtcagggcgaagcggctgcgccgggtgactacctgctgttgggtggtcgtgcggtcgtatgtttctatccagtcgagcgtcggccgaaggttgccgatccggggcccgctgacctgtgcccggtaggtgctgtccgagtagaggcgcgtttccatcgccactttcatctgcacgctgtctgccccgactttcacaacaacggtctccgttaccgtgtcgggcggcgcgaagagcagcaccggcaccgagatgtcggcgaagcggtacgtgccgggcagcggctccggtctcgggtagaacaccgtgtcgatgcgcgtcgtttcttcgacaaccaccgacgcggcgccccggcggtatccccagccgaagagcagcaccccggcagtaagggcggcgagcaggtagaggatcaagcgtttcatgccgtcatggggatatatttgcccgcacgcatagtcaacagctgccgccgctggccaccctggcggttcttgtagcctatatgcacccaacggggcgtgccggcggcatcctcgtcctccgagatcatctggtcgaaggcgcggcccttgagccacgtacggcaaaagcgcttgaagtcggccagccggccgttgtccggcaccaggtcgaacgcgaagccgacgcaatgcgccgaggtcgcagagcccccgacggctttgttgagcgcgaagccgcggtaaccggacgaaacccggattgcaggcgtgccccactgctcattggcgcatttcaccgcccacgcctcccgcagcgggtcgagcagctgcgcgacggacatttcgatattgacgcggtgttccgccgtcggggtattgtccaggccctttgcacgggccgtggccgagcgcgtgagctccgccattgtaaaatgcttcatcaggcaaaacgtttagtgtacaggatatgcccgacccatccggccatagcacaaacaacccccacgaggatgtaacgcgggaatacgattccgagcactacggccacggccgcaacgatgctccatacgatccatttctttttcatttgtccttttgtttttgttcgtagttttccgaatatcgctattggtttgctttccgcttttcttcgaccttatcggagcaggatttgcatttcgcggccagccgcttctggttgccccgcaataccgggcattcgttattatgcccctccttgaggaatttacactctaccgagcggctgacgatctccttgaggtattcacggtcggcctctttttcgtcaaaacgagtttcgagtttcgcatagcggatttccagctccttgtaacggcgttcgttgcgttcgtcgtcctgtttcatcttgtcgataacctcctgcgaatagcgcatggtggtctgcaacgtcttgtcgaacgcatcgcttattttgctcaccatatccgccgaatcggagcctttctgttcccgtgtccgggcaaaacggtcgataagcaggtaaccgacacccccggcaccgaatatcaccgttatccattgcagccaggtatccatgccttatccgttttgaaagtccataaccgtttcttcggcggccagctcttcggcacgccgggctttgagatccgcaagggtcttttcgttcgcgttgtactccgcgttggccgcttcgtactcctcataatccaggggataggtagcccggaagtcaaggccggacttgatgcatttggctgccctgtcgtcggatttggccatgaccgcccgtaattcgagctgccgcgattcgaggatgtcgatctgtcgttgtgtttccatatctctatatctctgttacaggccgcacgtggtaggtagagtacttggggttgcctacaatagttccggaactaccaccataacaaaaaactgcgctggctgtggcttcgcaggaggtgaacgggaaaaatccggatgcgtaaagaggcatcccgtccacacgcaacaatgttctgttaattgaatcatgctctgcatccgaagccgtcaatgcacgatcacgcattagcatatacacctcttccgacgacggcagccaccatgcacccgcctccagccccgtcgtcatcccttccacggtgatgccgtagtcgagagcggccgcagcggccgggtagcggtactgtgtcttaccataaatgtcctcgaaggtaagccgcccgatcaggtgcgtgttggtcttgccatcctgcaacatcgtcccgaacgccgtaggatattgtaccatgtgctcggcgaacaggtagtccttgtaggtgggatacacggcaaccagatcgggattgtcggcctcggtaaacacgctttcgcggataatatcactacttcccggtttaacactcgttgaagtgctgccgtttgcagtgtagtattctaaaaacagctcgtaattgcatccgcaacgatctatatttacaccgttcctgcgacgggcgtattctcgaggcccgggaataagtagcccagttaaagtggtctggtaatccacatccacggcccgatgggtcagcgtgcagcctgtcgcccggatcattttgtagccatttatatccgaccatgaattgcatgacatgataacagcggatagtgaatcaacggcgactgccttccagccataggtgttttctattgtactgttcgcgttgatctgcgcggcaatatccccaagcgttgccccggcggcataggcaaatgtaaattcaaccttgttgattgtaagcgtgaagctcccgccggcagaaaggctgaattccgaaagcttcacttcgtattcatatgcccatcgagcgcggccgctgccattatataaagcattttcgagcgacacgatcagcacccgcccgccctgccgggcatagaccactgccacggggacaagctgcggcggcaactgctctgcaacaagcgtcgcacccttgacgaagcggatagtacgcgtggtcttgtcgaagaccgcaaggtcgcccaccccggcggcaggcttatccaccaccacgttcacgccgtcgtagatgagcgccccgtcgtcctcgatgtatgataccgccgactgcgtgcccttgcggttcttgtctgccgtgtaacccgccttgtcggcgtatttattgacttgtgacatgttgtatgtagtttaagcgttcttccagtccgacaccgcaccgttacctacggagtggtagaccgcgttgttcttcgtatcgacatagaactgccccgcgcggtcgggggctttcgtcggcgcaccctcgcccgtgacgacgaggttgttgtcgccccacacacccagttttttcacctgcaactccgggatcagcactttgcccgagagcatttccatgagcagcctttcgaggtgcgtcacgcgcgcttcgagcgtgcagtccgagtgcgcgataaccgaaatttcgctgaacgaagcatccgaccacggcgtgagcttgtgcctggacaagaagtcggcatcggtgatctccggccccgtcgtgtagtaggtgttgcccagcagcgtgacgtcgacctgtgtgaagggagcgccgccctccacgtcgggcatgtagagcgctttggttccgtcgagcgacagcaggcggcagccgatgatctcgacggccatatttttcgccgcagcatcggtgcttgcgtggatggtggccgcgcccgtcgaagtgcctacgtgcgtgtcgctgacgcactcgcagccgtctaaccgaatggtctggttgtcggcaaggcccgcgccgacgggtgaatggcacgtactgaagagtttgcagttccgaatcgtcgtgaaatatcgctcagatgcggcaaagaccgaatcgacatgtacgcagtagcaggcttggtgaccgccggcgctggcgtccgtataactttcgtcgttcaggcagttgacggtcatgttggcgacggtgcattcgccgcccgcctcgatgatcttggcgcggttcacggagttgttctcatacgagacgatgacgccgtcgcggctctcgccgataagcgatatgcggttcgcccccttgttgatgatcgcatacgggtaacccatcgccacattcttcggagcctcgtgatcgtaacggccgttgcggataaacaccgtgaccgcgttgttcacgacatcgaaggcgtcccttgcgaagtcgcacgcctgcgcaaccgagaagaaatgccccgtcccgccctcgtccacggtgaaggagtccgtgtcgaagtttttcagcgtggcgcggctctcggcgtcgcaccatgcgtcatagttgttgagcgtgacgatcaaatcctcgatggtgaccttttggccgatattggtggctgcgggtatgctgatacccacattcagccgtcccactaccgacgccgccttgccgcggtagtagatttcgtaggtgcggtctgccttgagggcaaaccatcggccccgctggtcgagattgtccgaataggtgatgatccgcaaagagcactctttgtccacgcgcagcttcatgcgcacgaaaataaagtccgaagctgcgaccgggatgcggctggtcagggagaagttcgacgtaacgcctgactgcgtaggcgtaacgaccacgctccgatccgtgatgtccgagcccgtattattataatagctcttcgtaaagtccttgaggatgtaggctacgtggtctttgtagcctaattcagcattcaattcttccgaagtcacatatccggaatcattttccaggtcggacagtttcgtgggaagctccgtgcggtcggccttgccctggatcatctcctgcaatgccagtgtcaacttgtcccaggatacggtgttgttgagcagggaggcgcggatttcggagccttcgaccgtaacctgtatctcggagccgatagagccgacatacactttcacgaagtcagaaaccgggatggaggatatggagccgtcggcatttacgaactcgatagattgggtgtcctcgttgtaatgcagccccatcatctcgataggcaggtcgatgatgaacttggcaccgccctttgtcgtgaaggtcagctcgtaggttttgtcgttgaactccggcagtcctacgcaggtgttgagcagctcccggatgtcgggatgcgccgtgggggaggtgttgtgccgctcgatctggccgctgacgtccggggtgggaatttctgagatcgccttgtccgtatagtttttggcctcggtcagtgtctgcgcatccccgccggatatgttgctgttgagctcctcggacgtggcgtcaaacacatcgctgacattattccatagttctgtcgtcttggtgtccgtgtacgactttgctttagccagtgcgcccgccgcagcctccgtcagttcctgcttggacgctttgtcggacaactccttccttatctccgtgtcgtcgtagttggagagcccggccagcttctccttctcctggtcggtgtagtcgttcgtcgaaagccctttgccttcttccttgtcgaccttttcggcaaggagtttgtcaatattcccgaccttatttacagcgtcatttgccgcttttgccgcctcgttcgcggcgtttgcagcgtcgataggggcttcggcatattcttcctccgtaagttcggaattcgggttgtatttcttgaatgcctcgtaagcactctccccaggcaatccaacaacaaggcttgacgcctcaaggttgatagtttccgttataaggttgctttcgtcttcgccaccttccaagagtgtcgtaggaaccaattcgaaggccttgcagtagtcgaccgccgtttgcccgctcttctgcaaattctcccacatggtgagacggtacaccccgatggacttctgcattgtgccgctaatggtgaaaatcgcggtgttgccttcggtggtgaaatcgacgggaatgtccatatgcgaaggcaaatggacgaagagtttcaggtcgcgcccttcgagtgctacctgctgcccattggtgagtatcggccaatgtatctctatgtccttgcctatccggatgcgtttcatattcctttcgagcgtttattcttttttgagagcggacatgatactgtcatagaatactgccttgcacatctttgcggtatcgacgataatcgattcctcctcctcggaaacttcgatgccgccttcgctgtggaggatgcggaatgccaggtcatgcgctacgatgccgttcatgcccatgtatatggcgttggcaaactctttccgggcgtcgacgacaatatgcccggcgcgggaaatatcggtgaacagtttaaattcttttaaattcaatgctttcatatatcctgtttttgtgttaatattggcaccagttggccgtccacatactgttcatatgatcccacaatatgatccacaacttaccccaatccaaggtaatttcagtgttgttttgagagttggaattggtgcatatcctgtgctgggtattcccgcgcttcaacttgacattgccgctgccgacctttcggatgaaataaatctgcccttgttttggtgaagacggtaaagtcagcgtaatctcgcccgtagccgtactgaacaccacgctgtccatgtcggtcagggttctattagaagaggttcgcacattcctcagcctgaaacccgttatgaacccctcggggatatataaggcatggtttccggactgacgtgcagcggtagtggttccatccgatgatgctgctccggtgacatttatatacactccgacattgcctgccgtgccgccggctacgctgcggcttacttctgctcttataggcccatatagggcaccaccaattgattccggccaggtgttgcctccaagataaagcttggtattatcgttggtaaacctaatcagattggaagatagaagcatctcaccgaagctgtctgtggctgttaatgatgattcgtcaattttaaatccgcctattgttccgctcgaggcgttgatagtccctgtaatatcggctttggtggccacgaatgccccgtccttagcaaccctgaacggcgcattcgacggcgtgttgctcccgacgaacaggggaatatcgccgcccacgagccctgcgatgatagtattcacggaaatgtccgtcttggagttgtgcaccacgaactccataccttgcaggaagttgatgacggcattctctgcgaacaacaggggcgtatatatcggcaccatgtcgttgagttgttgccaatatgccgacgcggatcccgccgccggcatgttggaagcggacgaagtgtgcgtctggctgcactggaatttcagctgcttattgttcgcatagatcgtaactacgtctatgtatctggggccattggaaacgaggtcgaggtcattgcggtattccactcccgatgcccattccgtgaggcgggttatgcagccctgcaagccatccttgccgccttctcccgatatgcgtaccggagttgcccagcctaccgtcgggtgcaacagattgtcgtcggcgtctatttctgcctgggtcatccacagatattcacccgaagagagcgacggcggggtgtcgctccagcctgcgggggtgcgatccgtttttaccaatgccggcgccgtggtggtactgttattcttggcgtatttgaagtcagtatgcggccccggctccccatcctcgcccgttacgcggataggcgccgaccacgccccggcctttccggtcaatgcgtctatcgtagccttggacatccaccatataccgacaccagtgggcgcgtcattccatccggacggaatggggtcggaggatgtcggctttgctggctccgtatcgctatttttaaatacataggatgtccagtttcccggttcgcccgatacgcgctgaggggcagaccatgatttgacctccccgtcgacaacggtgccggtacacatccatgtaggacgttgatccgacatcgggagcgtctccgcagtccagccttcgggcggtattttaagctccgtgggtttcgccggttcgttctcggactttttgaatatgctgaccgtttcgagcaccccgtatccgcctaagtatacccactcctcggcatccttgtcgggctctgtcgtggtgccgtcgaccagacagcgccaatgtccgttgttccaatatacgtcgtcgttgcggttgtatgtttccgtggcgctccacactccgcggtctatgatcgtgggcacctcttcgccgccgggcgtgaattgctggatgacgcccgacatatagatgttgttcaggtatgccgaataccccctcatctctatcccgaatacggacaggtttgacaggtcgccatattgcgcggcgatattggacgcagtgaactcccaatcggaaactcccgttaaataacgctggtatgtccgggtttcatagcgggaggtctgccgatcctcattcgagaaggagccatagcccacgaaggtcatcgacgccgccggatgatattgggtggggtaagctcccgataccgggcgtagttgatacttgaaggtcttgtaagttgtagtgtccagctcctcggtgatgcggaaatagcaggtggcgaacccggcaaagcgcctgttgccacggccgtcgtcataatccgcggttgcattctccgaagtgttcaaattgtggaagatgcccatacatatatccccgacccgaggacttccgatctcgccttcttcgagcttgagggtgatggtttgggccgtggtgtcgacgctttcgatgatcccggcacttggagcataccacgtatcgcccatggatatttcgacacggttgtagcggagttccggtacctccaggaatccccgaagtttcaggctctgcatctctgcgtcgccatgctcgtcgatacggcccccgaggcccgtcattcccccaacgaattccggtgtgcggaagctgcctatggccgtcttgaaacgcacatcgtcgcctgtgcgcaacggctggttcatgtaatcgccaaacgcgtgtccgtcccatttgtctgcatccccggctttgattttcttgtagatgtatggttcgacattcggatcagaggctgattccgaatcttccgagccttccattgctaccgccccttccggttcctccggcttggcataatcggggttctcctctctcagcgtcaagtagccctcctgctcacgaagtttctctaaaagctcataattggagtgcgtatggaagttcaagcccgcatcatcgccgcccgaagtcgtgacgacaacccggccgcttgctgcgccctctgtattccgactcctgcgcgacgttgccggaatgtattctactgcggaataaaatttactttttgtcatattcaatccccgtaaatgaatccggcgctatttcagccatttttatctcgcttgtttctctacccaggctttgtacctcactcagcagcatatatttcgcatcgcccgatgatgcatctgacaaaacttccgccgaaggttccagggctatggtacccgagagtgtagacatacgtctggcgtagttcgaatacaccgtacccgcgagcagttgttcgagggaggctgtttctcccgcgcggtaaaacgtctggatcacgctcccggctccctcctccgcaaacccgctgtccgaggttctcaggatatagccgcggcccgaaggcagcagaatcttcgcagtccctattatcgtcgagatgtccaaagattcctttgcctgtttgttgatccatgcggatattttaacatcctcctcgttgacactgttgccgttggatttcactacttcgatcttggggtctttatacagaagccaacggactttatcccaaagtgctgcgcggtatggccgatctgcgtcgttgtcatgataccacactccggaatacaccataaacttgatgtatcccgatatcggcggagccggcaggagctccccgtcaaggctcttttgggacgacaagcccccggagtaccatccgagcgcccgcttgttcccctgccatcctccgaaacccgtattgctttttctgtcgctttggtcgtaaaaactcaaccacgaaatatgttccatcgatccgacactgcctgacagcggcttccagttaccgctgctcacatgcgagttggacaggcggatataattattgtcataatagtacttcgccgcgcctttgtcgtcatacagcaagatcataacggggatataaccatagttcacccagttcttgaagtcgtcccagttgccttcttcgttctcatatgaggcttgttcgaaaggattgtaacggacatcgaaaagtacattcaaggaaacctttattttgtacctaagcctgttggcgtcgcggacatccaagacatggacgcggggcgtttcgatgatctccacgcagttgtccggagaggcgagtgcatcgttatcgtctgcaagcgcattcgtaggccgtaagcctcgccagtaatccccggggcggaatccccacatcacaccggcggcattgctaccgctgaactccgcgtctatgcggaaggggcacgcgccccccatcagcgtcatcttgccaagctgcgatgaagcctcctgatcgtatgtaatgcgaaatccatccgtgccggagttgcgctcggtatatatcagttctccggaagctcctatcggtttttcgggaagaacctcatcgggatcgagtgttccgtcaagcaacgtcccggtagcataaggcgagaaggtgatcgtaaccttgttatacacgggttccactcccagcatagcatctgtgccgcgccagcacacaggcgtaggcgcagtgtcgtagataccattaatatcatacaaaagcagctttccgtttttctgtttcagcctcaacgcaaaaggccgcaacatctcatccaacacttcgcggatgctgctcggctcgtcgtcttcatcaaagaagttctcgcacatgagcgagcaatcctcaaggagtgtgtaggtcgatttacccggcagtcgcgtcgtgatgtgctcctcaacgcttccccgcttgaaccctgcggcatccaggcatatttccagtacctcggacatggtcttaatgcctcgctcctgccagtccaatcggtcgaggatggcgaagtcggaaaacgtcacggtcgtaatgtaacgatccttgtaagaatagggctcctcaaaaagttccgtatcgagcgtcccagaccaatacaattcccccttgcgcaggatgtccagccgtatagcgccgggctccacggcatagagatctgcaaagaaacgatccgacatggataccatattcaatgtcgcagagctgctatgcaccggctccaatttatcgacttccgcccattcgatttctacagggtcggacgaaagcacgatgcgcacaggatcgaagtccgtttcagactcctgccatatctcgatgcgatacgggatgttgtcgcggctgtaaaatccggaatagtaacgcaagtgtttcatctatttgaccctttgtttaaatctgttgttattatctatcgcggcgaccaaatcgcgtccgcgaaccttgaattcacccgagacatgcaccgcgcgtccctggttgttcagaagtccatacaacgtaccctgttggcccttgtcgagcaccatttccccggagtttaaacgcgcgagtatcttgtcgccctgcgtagagttgcctcccacgataccgccattctcgaagcggggaatcattgcgaatgccgcaagggcggcagcaatggcgcctccgatagccacgagattccacggaaacggcaggctggcggcgctcgccccggccgaagcggccccctcggcagtcttcgccgcaactttcgtttcggcattcgctaccgcggacgtcgtctccgctgcatccgctgtcatacttgccgcagcattggcgactttctttcccgtcacggtatctgatacggcggcttcggccaactccgccttggccagcatctcttttacttgcgtcagccgctcgatgatctcgatagtctgaatgaaagcatccgagaggctcgtcatggcctcccaagccgccatgatgcgctcccacgccgttgcgtcctcatcggacaagacttcgccaacgcgctcgaacgacgaagcgatgttgtccgcactcccgatgatgcttttcacaccaccataggtacccgtgcgaagctctttcgtaagctccttgacggatttcttggcctcggcgattttcagtgcgtcttcgagcgtcttgacattggacatcgcagccgaaagttcctcggaaaacatgccgcctgtttcttcggccaattggcggaatacatcccggttctgctcggcaacagaaagcgcctcctcgagaatgtcgatgtctgttttctggtagtcacgggaagtgtcgcgggttttcagcttcggcttcggggccagcccgcgggtcaaatcgcccaatccgctgaaataggcctgctcgaaatcgtcagcaccggtcatgttagaggccaggttcttgcgggtttcgcgcgtcaaatcgaacagcgcttcccggtattccttttcggtgatgactccggcttcgagttccgccttgcggcgcttgacggaatcgctgtactccttcagaatatcgattcgttgacgttccgctttatatgcctcgccgcgaggaagttccttgaaggagttttcaagggccttatagtattcgctcgccagtacccccttgtctccggaggagtaggcgtcaatataggacttctcgaccaaatctcgcaaggctttgtcgtattcgtcctgcgtgatgatgttgctgtcgagctttttctgcaaagccctcaacgactcggtgtatttctcttgctgcttttcaagctccgttttcttgcccttcttgccgccatcggaagaaaacagagacgtagagctcgaagaggaagctttgccacccaattcagcaatctcccccgcagcatcggtgatggcctgttcagccttggcaatcgctgcgcgtaggttctcggcctcacggagcggattggcttgcagtttttccgatgcggcaccgtgggcaagcctctcttgccacgatctgaaagggcgctccggtgttccgacatttgtgacgtattggtgggctgtcatgccatcccggaaaatatcctcataagcctttttgtaagctttctgatatttctcaccctcttccagtttccgcagctgttcccgggcattgttggctgcggtttgggcagtattgtagcggtcttgcgccgcgagcagccgcttgcgggcctcgatctttttgtttatctcgtcttggatcttcgagtcgagcttcgcggtgtcgtagctttcacccaacagagcgttgatctccttgagcgcccccagtcgtttcgtttcgccttgggaggggtcgttcaaaatatgctggtatttatccagactctggatttgggtgttgtcggccttttcggccaacttcttctccatgtcggagacgatattcttgatgcggttcgcctcccgcccggcttttatcaaccatccgacaagtgtcattacggcactgatggcagctgtccaaagcgtcgccatcgctgccgctttcatcgtcgccacaagcttcgcgaagttaaacttcacgatattaaacgcccgtgtccaccctgtggcgccactcgcggccgccgcttgctgtgtctcagcagtcaccttcgccgccgcagccttctcggcctcttgtgcctttacgagggccgtcgtcttggccgcaagtgccgcctcggcattcgcagttctgttgcgcagccgttgtttctttgcttcggacgcccctaccaccgctaccttttcggcttcgcgggccgccaccacagccgcggaagctttgtccacggcctcctgtgcccgggctaccgcctcctgcctatttttaagcgtgtcctgcaccttcacggacgcagcgacgaatttatcgtagttgttgccgatagacttgaatacccggtatacggcgttgcccaatcctgtcgtgataaggatttgcagtccggtaaatactgttttggcgttgttggccaatacccccagcagtcgcgaaacaacatcgacgacggatttgaatttctcctcgataccccacttcttgacaaggtcgacgaaaacattgctcagtctgttgagcgacgtcatgaggttgtcggtatcgacattgggaatcatctcatcgagcgcctcggcaaaacgcggcaggacatccgaagcatagagcttaccctgcttcatcagtttgtccatctcttccacggagcgccccgtagctttcgccatagcctggattgccacagggagtcgctcggccatctgcaggcgcagctcctcggcctggatcttgcccttgctcatcatctgcgacaaggccaggaacacgcccttctggtcttcggcactcaatccgaaagctaccgcggcccgcgaaacggactcgaagatcttatactggtcggatagcgccatgttcgaaatatccgccgcagccttgaacttggcaaacccgctcgtcagggaatttacctgtacgccgtatttcttcgacagcccgatgatgaacttctgatgatccgcatattcctcagtcgacttggaaacgtttttcagggcgatattgacacgcgaagtctccttcgccgtttccattaacttcgatacgaaattcgacagtccgatggccccgccgcccacagctgcggcaaaagacataaactgcatctgcatggagcgcagatagctcttgacggaggcggaaccctttttaaagttgtccgtcaacaattttaccgcaatcgaaaaggagagtttgctgctcatgatcaggattttttacgccattgaaccgcattcagatctattagctcgccattcatgaaccggcggaactcctgctcgctacgcacaagctcctcccgggctttgcgggcagcctcttcggcctcccacgggaatatgtggagtttctgcgggtttttgagtttcttaccgtcaacatggggaagaatcgcgtagaatgtccacaacctccgggattcctcctcatgacggagcttgtcattcaaggcctcgatatacatggggagatcctcgacaagcatttcgtgcatcacgaagtgggcatccatgcccgcagatacgatcagtttcgcagcaatggaacctatcgtgacattttgcgtcgcacaggcatcagacttacctgcaattttctgcttgcgggaaaactgcgccgcgaaagcgctgtaagcagtcagggaacgaacctccgcagcaacgatcttttcactttgcagcgtctgttcgaatacatcgaacgtaaacggctcggcagcacatgccacggtcgcgcaatacagcaatctccgcatgtcgttttcatcggaaaaatccatgtggagaaagctgcgcccggtcatttgttcccaccgaacgatagcctcgatgtcaagtctgctcttgatgtccatacgtttttaaaaggggcggcagaggccgcccctgcgtaattgtgaagttgctactctacgagcgtaccgtctgccagttcaccggtaccctggagcgtaatgctcgaagtacagatcgaaccgttgtcggcggtcatgctcagtgccgtgataatcgcctcccctttgacaaggctgtcaccctgcggaaagtcgccttcggattctgcggttttcgccagcacgaacgggatgggcatacgctctttcatcaaacgcttcaacgtattgaatgaacagtgccccgttttgagggagaggagggattcgctcgataccgtgtatccgagctggccgacaaggaattctttccagttgccggacatcttgctgctggtgtcgatcgtgtctgtgctgatctcgatactgcacgacgtaccgaacgcaatgggaagaaccgttgtgggggaagcaccttccttcccggccgcttctgtctggacaaagagcatgagcttatcgcccgtgatcatgtccttcgatgaatcatactttttttctgccataatttattgaattgaaaattgaagtacttgtaaatatttcttgtcgatataatcctcgacataatccgttaggcgaatgcgcatgtcgggatcctgccaatctccttccagtgcgtcataaattatatcggcaattttgaggcttctatcataatcatcgcttatgacgttgatatagaaataggagcgctgcaaagacggccccatcttagaccattctatatccatcccgtcgcgctgataggagacgaaatcacccggggtaccctccggtgcgacgatggggaaaatcttggtgccaaccatcgcggacagatcctcgcaagcacgaagtattttgacaacctcggtgataatcgtaaatttcttgtctgcacgtcccattacatcctgctttgaatacgttggatcgccatctcgatgccatgcaagatctcctgcatcgccgagcgttcctcgctctggcgggcatcgctccaaaagtagttggcgggcatgatgccccgattcttcccggacttggtactacgacgacgtgtccccaggtctacaaggtgagcatgatgtccgcgccccgtatatcctgccagcgacatgacatactgcttgcggtacaccacgccgaaagctccgagcagattgcctttgcctttccccttcaggcgcgaccggagattaccgcgcccccggcgcgaaaagaccttcgcggcacgaagcataccctccttgatcgccttttgctgttcaaaggcatccaggctgtgaaccaaatactcggcggcctgacgcgtttgtatatctacgacaatcattcgtttatcttgtttacgttcaccaggtaggtgttgtccgtgatattgcggtcgagcaggatgattttgtaatccacaccttggaattccacgatctgacggtcgttgatcttcgggctgtagcgcacctgcaagaccccgaaatgcccataaaactcctccttggcttcgaccttgtccttgtcggttacattggaaaagcgttttttatacgcccggcatctgtgtaccgcgacatactccttactgacggcacctgtggcggtctgaaccatacggggctccttgaacacgacaatttcacgcaacaatcccgctctcatctcgaataatccctataaagtccgataagatgtttgtaagctttggtatcttgaaccaggacaccgaaagcgacgctttcacggctggcgtaatagttcccgatcaagagtaacatggcctgacggaggggtgccgggatttccccggtttccccctcgaactccgccagaggtacgcagatatcctgcgcaacgacttcttgggcgacagcgatcagggacgaaatatactggtcgtcgtcctcgaaatcgtcctcgatgttcaggtgcctctttgcctccgccaaagtaatacaagccataccctacgatcctatttgaaggacgcggtgacgaacgagtcgtcgcgaaccttacccagattccagtacgaattcacgatgatgcgcaccatcgcctgcccggccttcgtgtacggatccgtaatgaagtccattgcgccccactgtccgatgaagaagtcggcccagttgccgaaaatagcgccggcctcgtccgtcgcctcctgaagatccgcaggaatgttgttgctgcgtaatgcacggtagccgttaagcgtgccgtcgccgttcccggtaaagatgaagccaccggcacccgaggcgtccttgaccttcgtcttcgcaaggccgataagtttcgggttgagaaggtaggccagattcccgaacagcgcgttgttcgtgtcgcacgcggtttccatcgccacgatctgagcccatgtcattgagccactgatctcgggcgtttcttggaacagtccgtcggggatcttagcatcgtgtgccgccttgctgaatgccgtcttttccagcttctgggcgatggctgtggccagcaggcggcgaaccaaggcctcaacactcgtattctcctgcaccagcagctgccggctgatctcgacgacggccgtaaggcgcttgggagagaacaccgttcctttggaaatcgtcggagctccgtccttagcttcgtcgttctcgccttcccaggataccgtcgcagcgctgacattgggccagtagatattgccccgcaggccgttcatgatacgggcgcctgcacgcgtcagaatcagattcggctccaacgggagcagcatctccatctgatcttcgtcgaccacgacacccgtcgtagcttccgtagctgcggtaagcgccgcgcgggtgttcatcggaaggataaggtttccgctatcggaattgctggccatgtatggggcgtggatacgcgtagcttcgtcgatcatccgcgcctcggcgtcatgctggggctgacgattcagctggttgacgagggcccgacggaaagagaacttcccttccggcatgtgcggctgcggcttgccgcggttctcagactcgcgggtttcgatttcgaggttgatttcagccatacgcgcctgaatctcccccagctgcgtattctccacatcggtgaactgacgcttttcgttgcgggcgccatcgatgatgccctgtgcctgcgtcgcgaggctccttttctcgtcacgcagttcggtgatactcttttcttttgccatatgtattagatgttaaaaagttgttctgccttggcgtaatactcttcgcggctgcgacgttcctgctcttccaattctttctcggcctcctccttgccgcgcaaagacacgctggtcgctgagtaagccgcacgatatacgggtgacacatcgaatatctccgcgattttgagaatacgacggctccaaataccgtcgtcgcgccgttcccacttatcctgctcgaccgtaaaagcaaaggaactctgatcgatctcgccgcgccggaggttctcttcgagttcatgaccgatcgccgtatccggccgcacgaagcggtatttcaaaccgcggtcatcgaccgtaagctccaggctgcctttaccgttcttcgaccgcgcgagaactccgcgctcgatcgaatggttcaatagtgcgaatacgtcactgcgctccaaaaccccgtccaaagctccagcttcgatagtttcgtagaagggcagcccgtcagactgcgtatcgaagagcatggcataaccctcgaccatcccctcctcgggggcgaagcgcacttcactctgggtattcctgacttctctttccattattttcaattttgattttgatcgtctgttgtattcggatccaacgcagaagcggccacgggcttccgatcggcgggaggcgtcaccactgccatatcgagcgtctgaacattaacctgcacgaatgcctgatccccattatccaggcgggagaggttattctcccggcgaacctcattcggggtaatcgcgccgatataaaacatgtctttcaagtaggcagcctgcgcagccttgtcggtacgcaggatcgcagaggtagaaaactctgcaacgatactattgcgctccgaaggcaggaaaactttgcggttgatttcctgctcaatcttcgtgattacagacagtgccgtatcggtcaggtagtccagctgcgtagcctccacagtagagtagctcgacttactcaagtcgaacgccttgacgggcgaaacagaaaagaagcggcagatatcgatgacattgaactgacgcgattcgagaagctgggaatccttcgggctgatggtaatcggctggtatgtcatatttccctccagtatcgtgacgttactgcgatcgggattctggttcatacgccgatcccacgtggcgtagatatcatccttctgctcctttgtgaggcgcgggccctccactttgagaaccccggcggcactcgcacggctatgcaggaaattgaccgcatgctcttcgctcgccgtggcgatgccaagggtctgccgggcatgtgtaagcgtagaaacacctatgatgccgtcgtagctgaaattcaggacgtgaatcatatcatttggctccacaaggcccttgaaccccgaaacctgataacgtttccgcctgattccgcggctatccataatccagacgatagacaccagctgcgccggaatgaagatcagttgcgtgacttccaatttcgaattacgctcaatataggcgtatccgttaccttgaagcaagacagaagccatcaacgttttgacgaacgtatagcgcgtcatgttttcattcggctctgaattcagcagatagtaggccgggtgcgacttatatttactcttgaagccttctttgtccaggaggtaagtttcgagcggaagcacggcaacgctgcccgagatgagatccacacaccgatagacagtggagagaagcatcggcaggctgttgctttgcaggaaacccggataacttcccgtatatgcggaaatcccggacgtttcttgcttagacgccttgcggaaatcgatagaaagcttgtagccgaaaaaattcatcgcatcctctttgctatataaccaaagagatgtctgacattttgtccgacaagtgtaaaatcaatagagttgtccgtatctcggtgtagacaaataggccgagagagccatcagacaagcaatcacgccgtcgatctttttttcttcgtactgtttcgacggttttgtatttccgttccggtcgcgggccatgacaacattgcgaaaacagtggcgcgtgatgatattattatcgaatttcgcccgatacgacaatatcaggcgttcgagttccttggtcgggcggttgaaattgccgatgctctggctgaccggctccataggcattcccttttccgtagcattgatgacgaactgcgtggcattccagtcgtcataccccaccttttggaggtagaactgttgctgaatctgcaacaggtcattcagaatgtagtcgtaatccgtaacgttgcccggagttaccgtaaggcttcccatacggcgccattcgccgtaacgctctttaaaacgcttttcttgaagggctgcctccggaagatagtatttcacaaagaagtatatagcctcctcggtgggtatcataaacgcaagagccgtgaggtcgctcgtagcagacaggtcgacacccgcaaagcaatccctgccgtagaaatccgcggcattaaggttttgcgaggctgacaaaatgtagtgatccgggatccacaccgtatcggcatcgcaccatatgttgatattcttggttttaacgcccacctcctcggacggagagttcacggctttctgcacctgctcgcggatataggcgggctttacagtaacccctaggttcgggttgctcttgatccatacgttttcatctttccaatcgtccccctcgtccagcgcataaatcaacgcaaaaagagaatcatccggcttcagcccgctcaaaacctccgtacacatcgtacgatactgatagcacgggcccagtttgtcgaagcccgctgtcgtgatgatgacaccgaggggatcgtcacgcataccctgcgatgactgcaatacgtctttcagtctggtatttttggcagcatggtattcatcgagtaagtacatcgaagcattgaatccgtcaagtttgctgtcatcggcagccaagacccgcagcgtagacagcatcttgtcgaaattgaccctatcccgatatggcttcaagtatttacctatagggtcgatgctcttcacgaaattcgaacacataccgaagctgatcttcgcctgatccttgctgttggccgcaagatagacctccgcattcatctcaccctccccgatcaggctgttaagacacagggccgccgcaagggctgatttcccttgttttcgcgccatctccatatacacggatttaaccagccggctcccatcctctttacaatagaatccgtaaatactcgcaacagcgaactcctgccacaattccaacacgaaaggcttgccggcatgacgccccgtataatgccggagcatgcgaatgaaacggatcacttcccgaacctttctttcgcggaattcgtacctgtcatcctccatgagagcaaaaaaacgctcgcaggcgagcctaacccacttgcccgcaacgatatctccggccagcacgcgctgagcgtatagtatatatcccggaacctcaaccacgggtgcgtttttctcggatatactcatcgagcggagtgtcaggaacgccatcacccggcttatgcgaatctatctgagccttgctcttaatcgtcaatccgtattgtttggccacatcgaggtattgcgcccacgcttcgcgggcgatattcacatacggatgcttgacctcctcgcctttcttgttggtggtgatcatcgaatgctccgacaaccagtatatcgccgtgaggtactggtcgaaactggtggccaggcgatgcaggttcggaatatccgacgcatctattttattctcgtcattcaacttacgaaccagatcgcggatgaagcgtttcgtctcatcgtgctggatcgatcccggtatcttaaaccttacatttcccatattattttcctgaattttcgttgtggatattctggtgacattttttgcagacagacatcagattggaataatcgtaagcaagccataggcgccgctgtgggttatccgtagacatgaacgaaacaatgtggtggatgtcctccgcaggcgtcgtgagacccttccctgcgcatacctcgcatagaggattgttcatgaacttaacttcacgcaggtgctgccaacggcggctattatagaccttatgacgctccgcatcgtaattgctgctattcttcttggttttccgaggttttaagattgtcggcataggataatgaactatattgtttttcatctttgcatgtttggtagaataccatgcggtagcgatattggaaatactcgataaactcggtgtccgtgcggaaattacgggacagcatatcgtgcgagacatgcaggatcgtatcgtggaagacatccatatcctccaccgagccgaggttatgagccctggaaacacagcacagacgcaacagcaaatcgtaattgcgggctatgatgagcgcaacatccggcaaaaaacgccctttacatctgtttctcatcctcgtaatacttcacagcatcctcgacacctcgctgcaaaaaagcccgcgcaacaaccgacacgtttacaccattaacccgggcaacctcctccaggtgatggtaaacgtacggcgtcacacggacgcagatcttgattttattttcgggtcgaaccagggcgagatccgccgatgtattgcaatattttttctgagacatcttgtttatccgaatttatcactacctttgtattgggctcaggggtgatctttcgggattgcctcttttttattttttctccagctcttcaaggagggcatcggcgaagtcgatagcctgacgagcaatcagtgtttcagctggtatgtttgcgtactcgccttttgcctgccagtcagtagagacaagcacaggaaacgcagctgccatcatctgcccggcatacacccgccgccagtactcccggtcaactgttaagttttccttaatagtcggatcagccttttcgaacttatcctcgatatggttcccgtactctccccgcgccagcttctccagatagtcgtcgtcgcgcatcatcaggtctaaatagtcagggccgccataatttcctgtcggtttatagccctttaagctttcggatgccccataatccaccaatgccaatactgaatccacgcccctacaatcagtacatataattctggcgctccttccgtccctcgtgcacaccggcgcccctgctttggcggctgctaaatcgaaattcttcatgctattcagttttattaaatttaccaccaaaataaacatccccacaaaagggtaaacaccaacgttacatttatccatgaaattgataaaagtaagccgtcaacgtcgtaatcgcgccacggccgatcgtagatatttttcgcccaaaacaatagaaggatatacaccactactgccacggtattataccaagtcattgctatcatagttagtatcttagttatttcagtttttcgagattttgcgagaatctcgctattttttttcaaaacggagcgtcgcaatctttggacgcccctctgtatctaaataattcataggggcgtccaaatagccatacctccaaatatctatggcctgcggtgtgctcgtgacaccagcatttccccatgcgtatcttaaatatattcatactcattgctattttactaattcgaaaagtgttttatccttcgctatcgtcccgattttcacccgttcagcctcttctttagtgtcgaactttaataccattccttcgcgtattgggcatccattatcccgccaaagtacataaaccataagacaccacttgtcgtcccaaaacgtgggcgtcccgtatatctcagccacgtaagcatatattttacgggtgactatttgacagatcaaatcgctcatttcaccaattcaaattcgtaagccaccacccacgggttcgatgcccaagtacctttacccgacacccggtctatcagcgaggcgaaggcttcgcggggagtgtcaaaccatacctgcctccatcgtttaatgtcgaaataataatacatcggcattccattcttcgcaaactccacgcgcaccccctctttcatgcaatccgcatccgaaatatcctgcaaccgctcgcagcggattccggtgatgcggatttggtggggcatcaggtcggcgctaacgtacattttattgcgccaacctttgtgtttggaaataatctgatagccgtcaatatcggggcgggatatgtaatgttgcgggggtacgccgatccgctcatagctctgcgccacggccacgacctcgccgaccttgtagcgcaatttcacgatgatattctccccattggcaactgcatatattttcccatctttgtcggggaggacgcgccccataaccatgttgaccggaaagtcgatcccagccataatttgcctcgccatggtcttgcgtccctcgataaccgcatctgtctgctggtatcggtcgttaaaaaatgccttctgcatggttattcagttttaagtaattccgggttgtcgtgaatattgccgatgagctttgcattatgcttccgaagtgaccagtgcaacccccaaagatggcccccgttaaagggtatgatataatacgcaccatcttcataaagaaccctaccaactatctctgcattgaagtcggtttcgggaatacacattatgtcgtccttccaaatatccttgccgttcatgtcttgcagccccgtgtactggccgacggtgttaggatctacttctaccgcagcgacgacgatacggccgtcatcgttatcttcaatcgtggtctcactcgttgcgtggtaaatgaagaacctcccttgatttccaatcaaatctccatactcccacttcctattgtcgaggcgcttgcctctgaatttaccatctcgcataactattcttgtttgaggttgttaattctgtcgatctcggcggcgatgcgggcaccagcctcggcgagtaatctgattgcttcgtccttttgggatggtctggtttgaaattcaatcagcatttctgcgcgcgcaaccatgttgcatgccccctccaacttgccgcgtgaagcaaatattttagcgcgctcctccgcaatcagttcgattcctgttttcatgggattctatttcttttttgagttcctcgattgattttctgagccgttcgtgtacctccacggcgcgatgcataagccaaacagtaacgattccgaggattgaaagcaacagccacgctataatttcattcttcattttctcttctgttttagctccgcaacgcggcggaggatgtaattcatcttttttgcttggatgcgcctgcgggttttgtcatggctccatccaacatattctgcaaatgcctgtaattcctcgcaggggcattctgtgagcgcctccttcctcagtcggcgcagtagtttggttttcatttttctggatacatttcatccactactggatggattatttcagcattaaaatcattttcctccattagttttaggcaagtatctcggtcaaatccagcatctctaatcaatgccttcactgcttgtctatccgcctgtaaatcaaaggaggcagcattttgcacggctatccaatagccacgatcataatcggttatttttttcatgtctcatagggatttgtgggtaaatcgtgaacgctgacggccagcccggcgccgattaggtctcgatagtctaaatgcaggcggtggaggaggtctaattcatcaacagacatgctctccagttccaattcatacattttccactttccccagccgcttgaatcgttttcagcgcattcgacatactttgtatcagtgataaatcgacgcgatgttaaataagggtatctcacttttgcaaactccaccagcggcacgaacggcttcctgtcgttgtaaccgcgctcggtgatctccacgtacagatcggatatcggacgcaggacgggtttatacctcgcgagcgagattccgtgctgggctataaattcaacgtctatccaacaaattgcgcccgtaggatgttgcccaagcaggggatgatccaaataccccgcaatgtcggtcagtgtgagttctcgtttcatcatcgtatgatttctattattttaagtcgtccatcaatctccggcagcagataatctatcgcatcaccatcaactaaaatatcgtaatcctgggctccatgctcgaccgcccagtcgtaaagttccttaggtgtcataatttattcgtactcgaattcctcaaccttcacactccccacattggggttattccgtagccgttcgacaaggcatcctttcgcatacattaccgcattaaatttgttgaatcctattcctacggaatcgtcctcgtcgaactcctctttggtgacgttaatggttatctgcgccactactttgattctgtatcctttcatagttcatcttggtatttaatttccacactgtcgatctgctcccgcgtgatagcgattcggtgcttatcctgaaaggccgatatccttttacataccctcttagattcggccgaggacagcatatcgtgatagtatagataactttggcaaaacaagagggtcgccaattcctttcgcctttcggccgctgttttctctgttttcataactctgtcttattcgtgaatctcccgccagccgaggatattcgcatctggaatcatataatttgtacggcttacattccaaaaacggtgacccagctcatctaaatccatgttgcaaaccgacacctttcctttatccgttttgacttcaacatctctacattcttccggcaactcctctttcgggtcgtgccagcgcgtcagctctgcatgttcggattttccgaactggataagccattcaagggcggagtaggtagaaatagagcatcccacacacccccggtcgcaattctttcgatctacgcaatctacgcagatgttattttcgcaaaaggcttttgctctttcctcaatggttttcatttcttggtcagtttttggataagataattcatgtaatagcagctatgttcgccgcattcagttgccgtatttgcgcaagtattgtctttgtaatttcgaaagaagcagacttttctatgcgcctctattgctttctcgcgcatccgctcctcggcctcctgctcggcaagttcggctgtgtgggtcattgccaatctcaaccgcatttcaacgtggtcaggcatatcaactgtaaggttgtttatgcacccgtcgataaattcccttgctttttcgcttttcatggttggttatctttgtgcttaaattttaaaacagtttatggattaaaatacaaccaccattgacgggaacggagcactatttttttggcccccgaattttagcctcccctttataaatctaatttcccgtgctttgtggtaaataaattcgtgaaaatatcgagtatctgtacgcgccggaatcaacattacaactattgtgttaattttttgtgcctccatgcagcatttacgaacccatgcgtatatatcccgaccgtatggcggattgcaaaaaacagtattcccgccccaatcttgtcggagcccgtcctgctctttggtgtagaatttaacacacttagcattatgcggggtggcgcaaggatcaagtgtaaaattaaattcactattgagtttatcatagaaatcctgtggtgtagcccataaatcggtcttagatgaaaacatcgtttctgtattcataaattagtttttttgtgtttaactttccgattcggtatgcaggaaatccagccccagaacggtatgcgccgcttcaagtagtccggatcatcctcatggttgtatgcctcggtctcaaagcaggtgtagtagtatgcgcccggataaggcgggataatcacttcgatcagccacgaaatgccgtagcaaatccatccggcgaagagaatgccgactgccgtaagcacccagccccaccaagtgaacgagtagtcgatggctacgggcaggaggattgccgcgaacagcacggccagttcgatctgctggacgcagtggattccttcatggcggcgcgtagtctcgtccatgctccacgccatcggcttccgggtaaaagaccacaaaagccatgttacccagctaaaccccttgaacgggatcaacttgttgtgaacttcgataggcagtttcatatgttcaactcatgtttagtagacacaagcaggatgattgcttcgacaaggacgttaataatactaacgtcgttagcgataaaacgatcgtagtctacaacccactcgatgccattctcgcccatatatcgcctcatgcgaaaattcccatcagatgggtcttgacatgaaattttcggaggtaacaaccccagcaggtcggcgaccgtgaaggcgggggcgtactggccggggaaatttctgcacatccatccaacatgcccctcttctgctatttgtaacttactacgccctattactgctggcatcgtatgccataccatgctcgccttatctgcgggcactcccatctcgattagccgcttcgactgctcaatgctcgttacttggttttccatagttgattgttttttattcgcataatccgtaataactcatgcagctggtcgccgtgtcgtcgtcgaacaaactgcccgtggcattctgccattcgacatagcgtacaacatcgtagatgtaggagtacttgttaccgctggtgatcgcgtgggcaggtattttgtccgggccgaaaaacgccgaacgcagttcttgttcgagggtggcaatctcgtcgatacgctccggggattgccgggcaatattgaggatgtcccgctgattcgccatcacgcacggccagcagccgacacgtttgtagcccattttgtagagcgggttcggttccaaacctgcggccagtatgtaatcaatcacctgctgcgccgaccagtcgaacacgggccgaagcaaatcgtcggcgaacttctcccggaatgcccgtacctccttgccccgataagtgtgctttttcggcttgccgtttttgtcgtaaccgtaaggctcgaaatagtacttgaagtacgtacattgcgccgacatcttcgcccggctggccgattctgccgcccggatgccctgtatcatcagcatattgtcctgcacctcgtccagcacgtagtcgatacagggcttcgtcttcaattcctgcgtgcagaaccgcgcccgcgtcgagggccaacgctttttctgccgggcaagatcgaccatcccgtcgtacttcttcgacttgagcgtcaccaaatccaagtggagtttatccgcgatccggttgatgtactcgtaggtctgcggatgctcccagcccgtatcgcaaaatacggtcgtgaagttcttggtgatatgctcgcgtgtccaaagaagcgccgcaaggctgtctttcccacccgaaaaggtgactatgactttcattttatcgttcgttaaaggttaactgaggggactggcgtgactgcaaaactttattcacgcgctccaaatgcttatcaattcagaggcattgccaagccattcgtagccttgtatttggtctcctcgaagtgttttctgcgccataaccgttgcccgttaaccatctcttgcgcgaagtgatcctctattcgtccgcccagtcggtagacttggggcatagcttcgtcgtaggtgtaatatttcactccggaacgctctttgagtgatttgtccagcttggcataagtcacgaacgtggcgtaagcattcgtgttattcaggtgagcccccttgctgtgcattgtgaatatcaatcttcggatatcttcgacgtgaaatttgcgcagcatccacacggcattcgtttcagtgataggctccgccattgaggcgatggtcggaacgttctcatgtatccactgcaccagctctgcggcgtttccccctacaacccccttcataggaattactgtgtgtgtgttatattcttctcttctggtattcttattttcttcagttgtggttatttgctggttatcagctggttgttcgttggttatttgctggttatctgttggttgataaccattgtcgcaaccatcctgcgattgctggtataagtcataattacagatagttatgatagtgtatttatgtgttcccgacttggttataaacccgcaattatccaacttgtctatcgcggtgcgtatttgcatctccgaaagtccggtctcttcggacagctgtcctctggtggttaccaattgtccgcggtcgatgattatgcctttccacttcttgggctggtaattcgccttcaaaagaaaatgaagcgcaaggcggacgcagttcgtgtcctgataccactcccagtccagaagacttcggtgtatcttaatccatccttccatcatttcacaggaataatagcgcgtgctgcgctgtaataatcgcgactgcactgatctatataaccgttgtacatccgcacgatatagttgctgccctgctttatggcatgctgcctgcggcaccagaagtactcctcgctaatgggcttctgtcctgctgcaagcagcgcttcgttgatttcgcgtcgatgctcgcagagaataagtgcctgctccatggtcgggatatgtccgccttggtcgcgcacccactgtactgccgtggcgtatttcaactgcgcttgttcgtagtagccaacgatgaatcgggagcagccctgctcgatgtagatgcccttcgagcgcagttcaaaaaaaaattccttgtactccataaccattactgaacatgaaaacaccggtagccgagttctcgccatctatgcgccatagccaggctgtcttcaaggacgaaggccacatgagagcgctcgtattcggtggtttcttgggtgaaactatctattttggaaaccacatccggacggttgtcggagttcggacgcataatcagcgtatagtctttcggcgacagcatgaggttctgctgaagccatatctgtgtcttctggcgtactgtttcgcgccgtgatgtacagaagaaaatatcgtagtgcctcgacatctggcgtacgaagtcgcacaccgtacgtatcggcaggtcattgaagtcatcgcggtagaacgattcccaatccggatcgttctgctccatgtattttcgtctgtcgccgacgacgcacagcgtcccgtcgatgtcgacaactgctatttcgcgattcatacagataatcagattaaaagggccgccagccacgaatggctgtcaaactaattcgctttatgattgcaagcggcccttgtttttagtatctttttctggtggtgtgttttaccgctttgctttccagctcatgggtagatgctattcgagtatactgcatccattcatccaaatcttttttaaggaagcgcagtttacgtcctccccgatctttatagtgaggtatctcttttctgcgagccatctccctgatggtgtatggtgcgcatcccgtatatgccgcagcttcttcggatgtcaggaggggtttgcctgcacctaacaccaaaagctccaatcgcctgatctcatccagtatctgttgttcggccatattatcattcgattaaagattcaacttcattttttgcctgtcgatcggggtgggcatattgcagtattacgaaatgcgggttacgataatcccttcttgagaagaggccacgctgtaacgctgtcccgtggagaacttcagttcactcagctgtgatttaactgccgatctgatagacggcggaaacgacaggcttttgccgatttcaagattgattaattgctgcctgcggctactcttgttcgttgttgccatatagttgaaatttgatcgtcgtaaaaaggcgccccccgcatcgataacacacccttaaacctacattactatgaaaacacacagcaggggcgccttgtttggattattttatttatatttgcttattgccttgttggcttgtgcaaatatacaaatataatttgtcacaacaagcattttgacaaatttattttgtataattttaattaaaaaaagataatactttattttacagatgaatagatgtagtatattaaatgaggcatacgagtggttgcgatacaaaaaacttgtatcttcaaaaaaagaattcgcagagcacatcgggatagacaaaacaaatttgtcatccgcgtttaatggtatggagaaatacctgacagataatctttttatcaaaatatcagaggcctttcctcagttaaatagaaactggctattgaccggaaaaggtaatgtgcaaaaagcccaatcggtttctacggattttgaaaatactaaccaacaatcagaggatatgaatgcaaacgattttttgaaggcattggcagaagaacaaagcctaacccgcgaagcacttgctcaaaatgcccggttaataggcatcatcgagcgattacacggcattgatggtgttggaacacgaatttccccccccctacaaaatcaaggccaaatacgctgaaaattagcgagaaaggaaacattttcacactacgattaggcaaaaaggagtgttgatttggagtgatataggatggaaattattaaattcagcgatgtacgcgacaaggttgtgcgacttcgcgatcaggatatcctgttggatgccgatgtagcagaactctacggagtagaaacaaaacgggtaaatgaagcagtccggaataaccccgagaagttcccggatggatatatatttgagctgcaacaatctgaaaaacagtatgtagtcgaaaatttcgaccacttgcaaggattgaaaaagtcgcccgtaacacccaaggcattcactgaaaaaggcctctatatgctagcaacaatcatgaaaagtgagcgggctacgcagacgacccttgcgattatcgagacatttgccaaactccgggagttatcccgcactattggtgaaatgtcgaccaatcccgatgaatttaagcaaaagacactaatgcagaaaagtggcgaaatcatggccgatcttttcggtgaggatatgcagacgacggacacggaaacagagatcgaattgaactttgccgtattaaaattaaagcacactataaaacgtaaaaacaaataaaaccctactgaaatgaaaaaaattgtcttattaattgcatcggtcttaattagcttatctgtttgggggcaggataaacatctattccaaaaagaatttcgcacggatattcccggaataacagaaacccgatatctagatataaaaaccgggaaatatgtcagcaaaaaagagtttaagcagatgtatggtatatctccatctagatattacgcgcttcgcggagcgaacccatccacaggcaccaatcgtctgtataaatggaaattacattccacaaacaccttggtgggctcttgtttgatcggaggatcggtaactgctgccttgttatcgaatgcaattttatcccaaaaagctgaaaatacatatgataacgactacgcagacacgcagcgaatcatatattattcgtgtgctggcgtttccctggcgggcataatcgttattttaacagggctgcataaagaatatatcgatggaataaaagttgcggagaattgggttataaaggataatggcgccggactttccctgtcttgtaaattttaggcatggcgcaaattgctcgcaaccgcctcgattttggtcgaggcggttgttataaagtggggatcaaattcacagctgcaaacttcttttcatccacgatttttgcgtagatctgggttgttttgacgtttgcgtgccccagtaatttactaaccgtataaatatctgcaccatatgtcaataacatagtagcacaggtatgcctggctacgtgaaaagtgaggtgtttggttattttcgcgcttcttgcccaatcgttcaggtatttatacatcgttatcctatggggtaacttaaataataagcccctgtcttcggttttgggaggcaataatgccagggcattctccccaagcggaatatgcacttcctcccgggtcttttcctggataatttcaatttgcatcatcccgtcactcatttcgcggatgttctcccaggaaagggcgtttatgtcagacaaacgcaatccgcaaaaacacgcaaacaaaaatgcctgcttcaacccttcatgagggcatggagcagaagacagtttgcgcacttcatctaatgtcaaaaattcgcggcccttgctttttgcctgcggcctatcttccagggaaatgttcttaacgggattcttatcgatcaggtcgtcttggacagcccggtttaaaaccacacccagcacccttaaatataggttctgggtggattcgctcaacagctccccatttttgcggcggatccggcgcaaatacgatataaaaccctctatgaatttgcggtctacatctcgaagcaaaacattgtttccggcatagtgcctgatatgcccagccattatcccaacaagatctccgtaggaacggctatccttttggtaatagtgatcttgctcattcgccaggaagtccgtcaataacaatttcgaccgggattttgcaggcgaaaatccatgcgcaatattttgcatttccacaatacgctgtgccttcaccgcgttcgccacagcgagagtctgctcatttctgacccgatctcccggacatgtttccgggataagatacaattgaagaaattcgtatttacggcgccccttctgataaatgtcgaggtatatggacttgttgccaccggccaggtttttacaccgaatctttacgggttcttttattttcgcggttttcatagttggcaattattgttgcaaagataacaaaacatattattacgagtaacaaaatagcaacaatattaataagcattaagcaatattaaccaatatatctacccacgtcaataaaaaggaagtcattgacaaccgactgattttaagaaaaaacacacacaagaagcaagtataacggactttcgagaaaaggcatcacactttatatcctgaaatgttgtttcggcaaattattattgaaaaccagcaggtaaccgcggttgtccaccgtcgtcgaacggtgcgcagcgacgatttgcaagcacatggcccggcgttcacgcccgtcgtagggggacatgaccgccaccgtattcccggcggcagccgcatcaccgaccagcgcgagcgtctccgtccgggacaggctgcgcgtcgctatacagaactccgcatccgcacgattcaggccaaaagtggcgtagccgcaatgaatcgccaggttttgcagctgcacggcgcggcgttcgggcaccccggccgcgagcagttcgcggaacagcgcccggtcgccgggaagcagcgtatcgcgcatgaagacattacgcacgacgtcgtatacgaaaggcgaatgcacgccgtgcccgcggaagaaacgggcccgagagagcctgttgcgcagctcagtgacccgcccgtaaaatttcaaaccgagtttatggccgccgattcccataaccgttattttttcaacagccccgcaaggcgccctgtcgaaaaggcgatctggaggttataaccgcccgtattggcatcgaggtcgagcacttcgcccgcgaaatagagcccccgaaccttcagcgattccatggtataggggttgacttcggcgcaggaaacgcccccagccgtcacgatggcgtattcgaacggcgcatagtccgtgatggggaacgtgaatcccttgagcgtcttgataaggcgggttatctcctcttcggtgagcttgccgatgtaattctttccgttgacaccgagttcgtgcaccaaagtcatcacgagcggcttgggcaccagcttgcgcagcaactcggcgaagaactccgtcggctccatcccggctatctcgcgggcgatacgttcgcgcagtacctcttcggtcagtgcgggtttcaggtcgacgaccagtttgacgcggcgttcgtcgatcagcgcatcgaccgcatcgcggctcatgcgcagcgccacggcaccctcgatgccgcgctcggagaagcccagttctccgaactcctcgcgcacgggttcgtcgtcgacatagagcacggccctgatatttttcagcaacagaccgtcgaggtagccgatctgcggatgcgacgaaacgagcggcgtcagcgaaggacgcaccggttcgacggtatgtcccaggtcggccgcaaaggtgtagccgtcgcccgtggaacccgtggcgggataggaaacgccacccgtggcgacaatcacctgcgggcattcctccttgcgttcgaaaccgcgcctgttgatatagcggacgccgaagaccttatcacccagggtcatgatctccgtcacgcgcgtattataaatgatcttcacgccgttctcgtagcaatattccaacagcgcattggcgatgtcccacgccttgccgctcttgggaaagacgcgctcgccgcgttcgatgtcgagcttcaccccggccttttcgaagaaacggatggcggcgcggttattgaactcggcgaaagcctgtccgagaaattccgcgttggtacgcacctgcgcggcaaactcctcggccgggcgggcgttggtgacgttgcagcgccctttgcccgtgatacggactttacggcccgacttgtccatcttttcgatcagcagcacacgcttgccgtcgcgcgccgccgtacctgcggccatcatgcccgctgccccagccccgatgacgatcacatcgtacggccggatttctttttcttcgatttgttccatacggctgcaaagatagacaataattctttctttccggaaaaatttttcctatctttgcggccgaaaaaaccgttctaaacagatatgttgagcagaagattactccgtataaaggtcgtcaaggcactgttcgcccacctcaaatcgggcgccgacaacatgatggcatcggaaaaaacgctgatggcgtccgtcgacaaggcctacgacctctatttccagatcctgaccctccccgtggagctggcgcgttatgccgagcagcggcaggaactggccaaacagaaaaaactgccgacatacgaagacctcaaccccaataccaagttcgtagacaaccgggtgacccgcgtcatcgccaacagcgatgccgtgaacgaccgcatcgccgcccgcaagctgggctggggacgacatccggagctgatccgtacgctctacacgcaactctcgggaagcgactatttcaaggactacatgctgcgcgaggagcgctcgttcgccgacgaccgcaagctgctcgaagatttcttcaaggagttgcagagctgcgaggcgctggaaaccgagctggaagagatgtcgatcctctggagcgacgacctgccctacatcgtaatgatgatcctgcgttcgctctcgggcctgaaaccgtcgcacaccgagctgaaagtccccgcgaaattcaagagcgacgaagaccccgaattcgtgaaaacgctcttcgaaaaatcgctggtcaactacgatgcctaccaggattacatcgaaaagttcaccgccaactgggacgtggaacgcatcgtgttcatggacaacctgatcatcggcacggccatggccgaactgacctcgttcccgtcgattcccgtcaaagtaacgctcgacgagtacatcgagatttcgaaatactactcgacacccggcagcagcaccttcatcaacggcgtgctggacaagatcgtcgaatcgctcaccgccgaaggccgcatcaggaaagccggccgcggcctcatctgagtcccgatgctgcgcgggttgttgtttctggcgctggccgtgacgacggcggcatgcggcacccggcaggcacgcacgggcgagaccgggcggaaaggccggattatcgccgtcacggacacgatcctcgacacgggcggcacggataccgtgcgtttcggacgcatgcactcgggggaggtggccgtgctcaggctctggatcgaaaaccgggcatcgaagcccgtagccatcacccgatacgaccgcagctgcgggtgcacgacgctcggatatgacacacagcccattacgccgggcgatgcgcagcaggtatcgctcaccttcgatgcggggggcgaatggggctggcagctcaagacgctggacatcgcattcgccggcgggcggaaacccctgaggctgttcatcgaggccgaagtggaataaacatttgtgtattcgacaatatttcgtatatttgttccgttaacggaaataaacacttaaaacataacgacgtatgattaattttcttcaggtgccgcccgtagagccccagccgggcttcatgcagcagtacagtttcatcattatgatcggcctgatggtgctggttttatggctcttcatgtggcgccccgaatccaagcgccgcaagcagatgcaggcattccgcgaaggcctgaaaaaaggtgacaagatcattaccgccggcggcatttacggtacggtaaaagagatcaaggagacgaccctgctgatcgaggtggacggcaatgtcacgctgcgcatcgacaaaaacatggtcgtagccgacaacagcgaccttcagcgccagtaaaaacctgtttcagataataaaaaagctgcaaaaatttgcagctttttatttgcaggttcaaattttttattttaaatttgtatacatgctcgggaaacccgggcatagtcccaacaacattgtcgagggggggggaatttctaagcgcctcttacagattacctctttctcggcaatgttttttttatgcccgtatcccggcaggcgatcctgcggggaattttcgcccaaatccgcagccggcagaaaaagcctcctcagaaaattccggacaaaaaatcccggacgtgcaaacaagcaggatatgcaaccggttttatcgttatatttgcatccggattcttcaacgcatacacatgacccgacacatatcctaccctaccctcggcacctgctcccggcagatcgacatcgaactggaagacggcatcatccgcaatgtgacgttcacgggcggctgccacggcaatacgcagggcatagcggcgctcgtgcgcggcatgaaagccgccgacgcgatagcccggctggaaggcatcgactgccgcggcaagggcacttcgtgccccgaccagttggccaaagccctcaggcaggcgctctgaaccgacgcagcgaccgttcgggaacggattttgcacacggagcagcaaatcaaaacagaaacactatgtatttcatatggtatctcctgctcggcctggcttccggatggatcgccaacctcattgtcaaaggcaacggctcggggctcatcgtcaacctcgtcgtagggctcataggcggcgtactcggcggctggctcttttcgttcttcgggctggttccggcaggcacgctgggcagcctggccacatcggtcatcggcgccgtggtgctgctatggattgccgcggccatctcgcacaagaaaatccgttaaacccgcaacgattatggacaacatgaaaaacggcgtacacgccgacaccgcagaagcggaaaacgcggagaccatggatctcctggccggaatgctcgatgcctcaacgcattgcggcgacaacggcgaggacagcaaggaaccggcacaggtggtcaaagaaactcccggcgaagaatccgcgcccggaaaataataaccgcagggaaaaaaccgacagttctattcaacgagcaaagtgtgcggacagtccgcacacttaccgtatccagcatactgggcagaagcaggacgaaggaggattcaggcgaataatacaacaaacataatcccgcattgatagtcaatgcgggattgttgagctgccaggactcgaacctggaacgacagaaccaaaatctgctgtgttaccattacaccacagctcaatccgttgctcgaaagcgggacaaagataagcaaaaaatcgcaatttacaaccggaaaacagaaaaatgcccgactcttgcaggggtgcaagaaagaatttcattacttttgcacgcatggagccgacaagccggacaacgggctggcaggcgccctgctgaaactgaacgattaatacgataagatatgatcctgacaatgatcctgctcttcgtggtgggctacgccttcatcgcgctggagcacaaagttaaggtcgacaaatcggccatcgcactgctgatgtgcggagccatatggacgatcttcagcctctgggggcacgatgagaatatcagccacgacatggtcgaccacctgggcgacacgtgcgagatactggtgttcctgatcggcgccatgacgatcgtcgacctgatcgactcgcacggcggtttcaacgtcatcacagaccacatcaagacccgcaacaagcacaagctgatgtggctgctggctctgatcaccttcttcatgtcggcggcgctggacaacatgaccaccacgatcatcatggtgatgctcctgcggaggatcatcgccgaccagaaggagcgctggatctacgccagcctgatcgtcatcgcggccaacagcggcggcgcctggtcaccgatcggcgacgtgacgacgatcatgctgtggatgcggggcaacgtcacctcggcggcgctgatggggacgctcttcgtaccgtgtatcgtctcggtcgtcatcccgacggcgatcgccatccggtatatccgcaacgaggacgcggcaccggtggacgagagcacgttcgaagcggaactgcccgcgggcgtgggcccgcgcctgagcaaattcatcctcatcacgggtgtattgagcctgttgttcgtacccgtgttcaagagcatcacccacttgccgccctacatgggcatgatggtctcgctgggtgtgatgtgggttctgacggagatcatctacgaccgcaagcgcggcatcgaggagtcgatcaaatgccgcgtgacgaaggtgctcaagcatatcgacatgccgacgatcctcttcttcctgggaatcctgatgtcggtggcggcgctggaaaccgcaggtgtactgaccgacgtggcgaactggctcgacaagcaggtacacgaagtgttcaccatagcgggcgtcatcggcatcctgtcgtcggtgatcgacaacgtgccgctggtcgccgcctgcatgggcatgtaccccgtgatggacacggcggcggtggccgcgagcgccgacccggcctacatgcagtcgttcgtgcaggacgggttgttctggcacctgctgacttactgcgccggggtgggcggaagcctgctgatcatcggctcggcagccggcgtggtggcgatggggctcgaaaagatcaatttcgggtggtatttcaagaagatcaccttgctggccttcgcaggctatgcgtcgggcatcctggtgatcctgctcgaacacctgctggtcgggctctgaccggcagcggaaacggaataacgggcgcgggggcaatgcccccgcgcccgttaaatataaaaatccggccagccggccgggtgtcccccacctacgtcaacggactttggccatgaatttctcacgatccacgacgtaacggacgtgcacgccctctccgatcatcccttcggcatcgcgggcgccgacgttgaaggtcagcttgcgcccctcgacaccggtcaacacggccgtggcggtgatttcggcacccaaccccgaaggcttgatgtgcgtgacgttcatctccgcccctacggtcgtagcccccgcggggagcgccgcggctacagccgtcatggcggcatgctccataagcgccaccatcgaaggcgtggcgaaaacctcgaggtcgcccgaccccatcgtcgcggcggtatttgcggccgtaaccgtcgtccggctctgcgccgacaatcctttttccagcataatatccattttgcgtaatacgtttatccgataaataattacatttgcagtggccgtgcaggctgcgtacaggaggggaggctccactccggaactgccgccggattcgtccgcggcaaagccaatgcaagccggacgcaacggcagacccgcgaactacgcgcaagacacggcctgccccgcggatgttcaccgcccgcaaagataacgattttcgccgatatgaaaaagtgtctcctgattctggtaatactggtcgccgtgtcccccggggtacgtgcgcagggaggccgcggtttctggcaccaggaatggacggtggaaaaaggagactcggtaccgttggtacatatcctgccggtctacgtgttcagccgccccgtcgacctgcgccgttaccgcaagctggtcgacgccgtgaagaaggtctaccccatcgccaaggtcgcgaaagccaggatggccgacatggaagaggaattatgccgcctgccgaccaaaaaggcgcagaaggagtacatcaggcaggtataccaccagatcaaggacgaatatacgcccgtgctgaaacacatgacccgcacgcagggcaaggtgttgctcaagctgatcgaccgcgaaaccgaatatacggcctacgaggtgctcaaggagttccggggcggattcgtagcggggttttggcagggcgtatcgcggattttcgggcagaacctcaaatcgcagtacgacaaggacaacgaagacaagatgatcgagcagatcgtaatttactacgaagccggcctgctgcggtaggcaaaccgggataaactacgatccgttactcgaatttgttgtaaaggacgacggggcgtccgcggcgtacgctcatcgcgggaaaccagatgtcgtcggccgtgagtccgcacttctccaccgcctcgagcgagtactccagacgtccgaagtcggcgtcgacgttgttggtgccgaacgtgaactttattccgcgctgcttggcccggcgaatgatgccgaagctcgggatacgatagcgggcgttgatctccagggcgatgccgtagcgttccagcacatccagtacgcggtcgacgcgcgcgtcagtccaatacctgtcgtaatcggcctgcatgtcgtcgggcaggtaggtcgggttggcgtagatgtcggccggctcgttggtgagtatcttcaccgtctggtcgaccagatgatccatgtactgttctttcgtcacgccgtcgtagtgcacctcctcgggccggtagatacgcgagttgcgccctttgtggtctatgatggtcatggcgtccgtgaacaggtagtcgaatacgccgagggcctcctgcgagaaggtcgccgtccacttgcggccctcgccctgcacgccgcacaggaagggcatccgctccacctcgtcgaagtaggcgtagacctccccgtcgtcggccagcatccggcccacaccgccttccccggcgttgggcgccaccccgtaattgatgccgtaattcatcgacatggcgtgcgcccgctccttggtcaggccgcccttcaggtgtacgtggtagtcgatgacggggaaatcgcgctgctggaagcggatcacgccgtcggtgcgttcgtccacgggcggcaatgtgtcggcctcgttgcgggcctgcgcgccgaggcgctcgattgcaaggttgcggaacgcaacttcgccctgcacgccgcgcagcgcgatcgcgccgtgtcctaacaattgccgagcgtgcgcctgggtgcggtagggatgttcgggttcggtatagcagaccacttcggtggtgtcgatgcggacgacgatgttacggccgcgcacagtgacctcgaagccgaaccactcgccgtcgtcggccagcgaacggtagaggttgcgcacggaggcgagcgaaccgctcttgcgcgtcccgtcgatggcgccgttgcggaaaaccacctcgtagcccgactcgccgtcggtatggaagcgcaacgccgcttcggcaccgggctgcgtgagggcttcccccgtaagacggaagttgccgtagtcgcctgctgccaggagcgtacggcccgccgtaacggccggggccgtcgtgcggatctcccgctcgccgtcgcgccaccagtcgagcggttcgggggctccggcctctccgcaggccgtgagtgcggccagggacaagagtgccgcggcgatcgtcgtcccgatacgcggaacagggttcaaatggcaaaagaggttcctcataacttggattttgtaataatgcggttccggttcggacaggccgcccggcctatgtgtacgtcaaacttatctcagtcgttgcttgctatcaaatatgcccatgcaaaaatacacactttgttggaaaagtacggaatgaggcacaccgttttatttcggacagcatgaatttcgggaatcccggtagcaaataggctcagaaattgaacgacaggccaacgcccagctccatgtaggaacgccccgggcggtaatccccgaaggcgaacccgaaattgtcggtcaggtaacaatggtaggtgaaatcgccgtagaggttgaaccgccagatggggatgataagccgcaccccgaggtcataggtacagctgaaacggtgcttgacgaggaaattcccggagtagggctcgcggctgagcgggcccagcatcatgcccggcgtaaaacccgtatgcgcttcgaactgcttgggaatgatcgaaagcaatgccgcggaaacccacgacccggcctcgccgtcgcccgggaaaaccagcccccggatacgttccgtgcgccaggtgaattgcatcgggatcgaataatagtcgcagacttcgtcgtcgaaaaacaggttcagccccgtgcggaaacctatattataatagttgtaccgggcgtagtcgatgctgatcgcctcgaattccgggccacggccgtcccccatgaaaagctgtgcgctgtaccgcaccccgatctcattgccggacggcagccccttgggggtatgccactcgttcgtattctgggcagccccgccgacgcaatacagaagcgtgaggagtgccgcaaaaacaggtttcttcataatttgcaggttgcttctgcccgcaaaggtaacagaataaggctgccgtccaaacatttatgcggaaaaatgcagggcacgcaaccaggcgccctgaaaatcgccgcagcccttgctctttgtgaattattcgttatctttgtgggcaaaatttcgctgagccatgtttgaaaatttaacggataaactcgaacggtcattcaaaatcctcaagggcgaggggcgcatcaccgagatcaacgtagcggagacgctcaaggagatccgtcgtgcgctgatcgacgccgacgtcaattacaaggtcgctaaatcgtttaccgaccaggtaaagcagaaagcgctgggacaggacgtgctcaaggcggtgaagcccggacagatgatgaccaagatcgtacgcgacgagctggccgaactgatgggcggcacggccacagacatcaggctggagggcaacccggccgtgatcctgatcgcgggtctgcaaggctcgggtaaaaccaccttctcgggcaagctcgcggcattcatcaaaagcaagaaaggccgccaggtactgctggtggcaggcgacgtataccgtcccgcggccatcgaccagctgaaggtgctcggcgggcagatcggagtggaggtctacaccgaagaggggaacaaaaacccggtacagatcgccgaaaacgccatcaaatacgcccgccaaaactcgttcaacgtcgtaatcgtcgatacggcgggccgtctggccgtggacgaggcgatgatgcaggagatcacggccatcaaggcggccgtgaagccttcggagacactcttcgtggtggatgccatgacgggccaggacgccgtaaacacggccaaggagttcaacgaccggctcgacttcgacggcgtagtactcaccaagctcgacggcgacacccgcggcggtgccgcgatctcgatccgctcggtggtcagcaaaccgctgaaattcatttcaagcggcgagaagatggacgccctgcaggtgtttcatcccgaacgtatggccgaccgtatcctcggcatgggtgacgtcgtatcgctggtggagcgtgcacaggagcagttcgacgaggaggaggcgcgccgcctgaagaaaaaactggtcaagaaccagttcaacttcaacgatttcatcgggcagatccagcagatcaaaaagatgggcaacctgaaagacctcgcgggaatgcttcccggcgtaggcaagatgctcaagaacgtggacatcccggacgacgtgttcaagcagaccgaggcgatcatttcgtcgatgaccccggccgagcgcgaacaccccgaaatcatcaacgcacaccgccgcgaacgcatcgccaagggcagcggcacgacgatggccgacgtgaaccgcctgatgaaacagttcgaggatacccgcaagatgatgaaggccgtagccggcggcaacatgaagatgccgaacatgcccggaagacgccgatagccaacagattgcaaataaaccacgatccctcattcggaatgggggattttttatgcggtagtttttagggcccgaaacgaatttttcatcactttttcatagcaggacagttaaaaattattaccttagtacacgcaatacttcaaatctcactttttctaatttaatcacaaccacatgatgcaattatcattttggaaaagattactctgcgcgacgctcaccctcgcgctgggagtaacactgacagcctgttcggacgacgacaccaaggacgacaagctgatccctgaaatcgaggttacccaatcgttgacgttcgattgcacgcaaacccagacgaaaaacctcgaaatcgagcttaacggaaagctcaactggcagatcaaggccgacgcatggatcgagctgtcgcagaccagcggcaaaggttctgcgacggtagccgtaaccgtacccgcgaacgccacgtcgcgtacgggtaccatcaccgtaacggcaaccggttacatgggcgccaccgacacgggcacatgctccgtaaggcagatcaaagaaggggagacgaatacgaacattgcggaaatccgcgagctcgtcatggcgaccaatccctctgccgatggaaaagaactgacggacgcgatcagagccatgacgctgtgcggtatcgtagtctcggacaaggggggggggaaaccagcagcccttcatcgtaatccttgccgacgatacgcaggatgccggtgccggcctcgcactctcgatcagccagtctaacaacaccttcgagcgcggcgacatcgtcgaagtatcgctcagcgacgcatcggcacagctcttcagcggactgctgcaggtttcgacccacaacgaacccctgctcgtggggcagaccgaaccgctggccccgatcgccatcaccgcagacaaaatcgcgcagtacgaatcgcaatacgtaaagatcgaaaacacgcagcccgaagcgtcggaatcgggcacctggaacagcgactcgaacaagggcaatgtttccatggagaccaaggacggaaagtcctacaaaatccgcaccctgcaaaccgcatcctatgcacaggatgccatcccgaccgacaagagcggttccatcgcaggtatcgcgggcatctacaacggcacactgcaaatcctgccctgcaacggtgacgacatccagcttgccgaagctcgtttcacggtacagggcaacaaggctacgctggccgaagtgctcgaagccggcgccggctcggcattcgaagttgagggcgtgagcgtcatcgccgccaacgagcagggagtactcttccagcaggacggtgcacgcatctacgcattcaagggcgaagcccacgacctggccgtcggcgacatagtcaccgtgtcgggcaaaaccgagtcgcgcaacggcctgctgcagttcggaaagggctgcagtttcaccaagaccggccatcaggatatcacccagccgcagcctgcggcattctcggcaacggaaatcgaagcctacatgaaaaaccccgaggtgaaatacgtgacctacaagggtaccgtactcgtatcgggcagctacgtcaacgtcgagatcgacggcacttcggtacagggcagcctggattacatgagcgacgatttcaaggagaagtacaacagccacaacgtgaccatcaccggctggctcttcggctcgtacaagacctatatgtataccatccccgtggaggtcagggacgagggcgaattcgaagaggaagttcccgacggggcgatcttctacagcaccttcgacaaagaactttcctcgcagtctttcgacacgagttcgggatggccgtacctcgaccagttcgagggctggatcaaccacaagggttcgggtatcgccgctgtgacctacgactacagcagcatgtccgtacgtacgaaccagtcgtcgaaaggttcgctttcgctctacgacggttcgggcaagaacaacatcttcttctcgtccgttcccacctatttcacgatccagaagatcgcggtaacgtcgcagaacctcaagctctcgttcggtgcacagcgctatgcacagggcgccaccaacacgttcatcaagtccgacttcgtggtgcgcctttcttccgacgggcagctctggtcgcaggcgctcgactacgatttcggcagcgtagcggacgaaccgggtgagtggcgcctcgcaacggcagacttcaccctgccggcaggcaccagcacgctctacatcaagttcgaagccaagatgggcagcgtaaaccgtatcgacgacgtattgctgatcccgggcaacggagggcaggcgatcgagttcggtaaggaagaggagacaccgctttcgacgatcgcccaggtgctggccggccccattgacgatgtctacaaagtcgaaggccaagtgatcggcacccactcgaagggcttcctcgtaaaggacgccacgggtacgatcctcgtattcaagaagaaccacggcatgaccgtcggcgacaaagtcaccgtcgaaggcgcaacgtcggaatacggcggcatgaagcagttcggcgaaacgtcggaactcaccaagaacggctcgggaagctatacgcagcccaccccgacggatttcggggcagcgcagttcgacgcctatgtcaacaacccgacgatccggtatgtaaaatacgaaggagacctcacctcgtaccaggacaatatctaccaatggcactataatgtcgccgtggagggtacgaacgtagtcggttcgatcgcctaccccaacagcgacctcaacatcgccggcttcatcggccgcaaggtcatcatcacgggctacaccgtcggtgtttcggggacggataccaaatacctcaatacgctgaccacgtcgatcgaattcgcagagcaggagaccatgcccgacgagagccaggccatcacggtcaaggaactcaacgccaagctcgccacgatgaatgcgggcgatgcgctgggcgaactggtcgccgtgaagggttatatcgcagccaacaacgaaggaggtgccctgcaccagctcctctcgctggtggacaacaccggcgaggccaacacgggcatcatcatcaagggcaacgactacaccgagaaagacctgcccgtgggtacgaaggtgattgtcagcctcaaatatgcgacctacgacctttacaacgggctgccgcagctgaagatggcaacggttttcgccacacaggaaaaagcgacgataaaggttccggagatcacggatgcacagtgcggggactatctgggccagtatgtcaaagtgaagaacctcaccccggcaacatcggcgaccacctgggtggtcgccggcaagaccacgacgaccaactttacaggagaaaccggcaaaaccattgcggcacgaattaccaagtatgcggtttatgccgacgaacagatcgcccaaaagacggccgacctgaagggtgtgatgcagatattcaacgggacgcatcagatctaccccaccagcatggaggacgttgcaggcttcaaagtcgagtaacacggcacaatccatccgtttgtaagaaaatccctgcgagcagcaacccgcagggattttccgtttcaaagaggggccaaggccgggggggggctgaagatttaagagcggtttacagcatggaattgaaaaataatcgctaaattgtaccgggaaacccaacccggaaaaccacatgaaaaaattactcctgctgttgctggggatcgcttcgatcccggccgccttctcccagggcgggagcggcatcgactgggccgccgacctggattacctggccagcgaactgcccgcgaaacattgcaacctctttgcgaaatacgacaaagcgcagttcgagaccgcaatcggcgcgatcaaggcttcggccggggaggccggagattttgctacggcgctcaaaacccagcagctgatcgccaggctgggcgattcgcacaccatgctatatttcaaccagctgatgaaccggcagcagatactgccgctcgggctgctctgggtttccgacgggctgtacgtcatacagacggccgaggaaaacaaagagttgctggggcaccggctcacagcggtcggcaaggcaccggtagaaaccgtaatcgacagcctgagcaccctgttcacggtcgacaacgaagcaatggtaaaatccatgattccccaattgttcccgtcgttacagctcctggaatatttcgggttcgcacacaacgggcaggcggaactcacgctggacggagacaagacctatacgctcaaaccgtccgatccgcagcgggcgggtcgggccgccttccagcccgattccctgccctttgcgatcgcggaaaggaacgtgcttttcacggatcgctatttccccgaggaaaaaatatactatatcctctacaactcctgctgggggcgtgaaagcgaggcggagttcaagagccgcgagaaagccgcgtcgctgccgtcgttcacggaattcggccaaaaggcgttcggcatattgcagggcaaccccgtcgggaagatcattttcgacatgaggaacaacggcggagggaactcggcacaggggacggcattcatcgaaaggctggcccggttcctggaacagcaccccggcataaaaacctatgtcgtcatcgggcgaagcacattctcctcggccatcctgaatacgatggatttcaagcacctgaccgatgcggtcgtagtcggcgaacagaccgccggcaaacccaaccacttcggcgaggtacggaatttccagctcccgggatcgaagctgacagtcgcctattcgaccaaatatttccggcgtacggacgaagaggcagacacgatcacccccgacgtcaggatcgaaatgagttttacggatttcacgaaaggcatcgacccggtgtacgaatggatcaaggcacaataggctgcgcgggcggtttactccgtccagccgttatgccggacgttcgccgggttccacttctgcttgggctcaggattgtccgcaggatagcccaccggaatcaggttgagcggaacgacatcggagggaagccccagcacgcgccgcacggcctctacccgttcgccgcggggataaaccccagtccatacggctcccaaccccagggcatgggccgcaaggagcaggttttccgaggccgccgaggcatccatcacccaccagtcgccggaagcccccggattgcgcgacaagtcgccgcagacgaccacggccaggggtgcccgggcggccatcttcgcaaagggcagcgccccggcgagttcgcgtaacagctcccagtcgtccacgacaacgaaagcccacggctgacggttcacggccgagggcgcggccatcgcagcccgcagcagcagttcgaccgtatcggcaccgaccgggcaatcccggtaggcccggatgctcgtccgggtcataatcacatcgagggggctccgcttgccggactccccggccggggtgcgctccccggccgacagccaccataccagcaacgcggccagcacggcaccggcgcagaaaaagaggattttcgtcctgttcataattttccgttatatcgtgtaccggcaaatatacgggaaaaatcgtaaaaagcaccgcacaccggtcaaacgaccgtatcggcgggtaaattaatcgaccgggcgtttgcaggggtctttttttatcgctacctttgtccggatcatatcccaaaaggaaaatgcacaaatcgggctttgtaaatatcatcggaaaccccaacgtcggcaaatcgacactcatgaacgcgctggtcggcgaaaagttgtcgatcatcacgtcgaaggcgcagaccacgcgccaccggatcatggggatcgtctcgggcgaggatttccagatcgtctattccgatacgccgggcattctgaaacccagctacaaattacaggagtcgatgatgaaattcgtgacgggcgccgtggccgatgccgacgtcatactctatgtcaccgacaccgtggagcggggggaacgctcggccgaaatcatcgaccgcatccgccagagcggcgttccggccatcgtggtcatcaacaagatcgacctcacgacgcccgaggcactcgaggtactggtcgacaaatggcaaggggagttgcccgaggcacgcatcgtaccggcatcggccaaggagaatttcaacatcgaagggttgttcaagaccatcctcgacctgctgcccgaaggcccggccttctatccgaaggatacactgacggacaagacgctgcggtttttcgcctcggaaatcatccgcgagaaaatcctcaggttctacgacaaggagatcccctactgctgcgaaatcgagatcgaaagctacaaggaggagccggcgatcgaccgcatcgccgcaacgatctatgtcgcccgcgactcgcagaaaggcatcctgatcgggcataagggcgagaaactcaaacgggtcgggcaggccgcgcgcgaggacatggagcagttcctcggcaagaaggttttcctgcaactgttcgtcaaagtgaacgacgactggcgcaacaacgaacgccaactgcgccgtttcgggtacgaattggaataaaccggaataataaaccgcccgaaaaggacgttaatgggacaagtgagtcggaaattgaaaaaatacatcttcgggatcgcactgggcatcgcactgatgtgcgggaaggaatcgtatgcgcagtacaaccgggaatatttcttctgggtgggacgttcgtgcatgatgaacaacgactaccaggaggccatccggacgctcaacaccctgctgcggttcgacgaggatgccttcgaaggctatttcctgcgcggcatcgccaaatacaacctcgacgacctgctgggcgccgaggccgatttctcgaccgccatccggctcaaccccgtatacacacaagcctatacctaccgcgcgatcacgcgttcgcggctgggtaattacgatgacgccctgcaggacttccgcgaggcgatcgacctgcgcccggatctgccgggcccctattacagccgcggcgtgacacggctgctgaaccagcagttcaaggaggccatcgacgatttcgacaagttcatccgccaggagaacaaagtcgccgacgccttcatctgccggggcctgagctacctgcacctgaaggatacggtacgcgcctacgacaatttcaacaccgccatccgcacgaaccgcgagaaccccggcggatacaaccgccgcggcggactctacatggagcagaaacgctttgcggaagccgaagccgatttcaacaaggccatcgaatgcgattcggcctacctgctttcgtatttcaaccgcgcactggtctactcggacaccaaccgtccgatgctggccctcgcggatttcgacaaggtgatccagctcgactcgaccaattcgctgacctacttcaaccgtgccatgctgcgcacgcagatcggcgactacaaccgtgcgctggacgactacgacaaggtggcgctctattcgcccaacaacgtgctggtctactacaaccgcgcaggggtctatgcccagctgggcgaactggagaaggcgatagacgactactcctcggccatcaagctctaccccgatttcgccaacgcctatatttaccgcggccgtctgcgcgaactgctgcgcgacccgcagggcgcgaagaaagaccgcgacacggcccagaagaagattgcggagtaccactcccgcctgagcgacagcacctactcgatctatgccgacacgacgcagcgtttcgatcgcctgttgtcgttcgacagcaaattctcgggcggcagcttcgaccgcatcacgggccacaacggcggccacgaggagatgcgcctgctgccgctgttcaagttcacgctgatgcgtcccgacaccgtgccgaccgtggaacgctaccacgtacagcgcgtcgaggacttcaggaaacgggtggacaacgaatacctcaccctttcgtggcgcgaaagcaatatcccggccgacacgctcgtgatgctcgacaagcaatacgtcgaggagctcaagtcggatcgggcatcgtggacggtgctcttcgaacggggtgtcacgcagtcgctcatcaagcagtataccaatgccgtgaacaccttctccgcggccatcgagcagaacccgagcaacccgttcctctacctgaaccgctcgacgacgcgcgccgagatgatcgacttcatctcgtcgatcgacaactcctaccagcgcatcacgatcgactcggatccggccaaccggctgaacaacaacagcaagcgcacgtacagttacgacgaggcggtggccgacctgaacaaggccatcaagctcttccccgacctggcgtacagctattacaaccgcgccaacctcaaggccctgtcgggaagcctgcccgaagcgttcgaggattactcgaaggccatcgaacagaaccccaatttcgccgaggcatattacaaccgcggcatcatacagatattcatgaaggacacgcgcaaagggtgtctcgacatttcgaaggccggcgagctgggtatcgtcgaggcttacgaggtgctgaaacgatacgcgccgttagaaaagtaagctaactcaaaaacaaataattatgacggaaattatccaacggaaactcaacgactcggcctgggtgcggtggacggcgctcatcctgatcgcactgacgatgtttttcggctacatgttcgtggacatgatgtcgcccctgcagagcatgatcgaggcacagcgcggctggacgcccgacgtgttcggcatgtacggaagttcggagttcatcttcaatgtcttcggattcctgatcctggcaggtatcatcctcgacaaaatgggtgtgcgcttcacgggaatgctctcggcatccctgatgtttatcggcgcctgcatcaaatattacggcgtgagcgacgccttcatcggcactggcgccgaggcttggctcaacagctggtgggtatcgttcccggccagtgccaaactcgcatcgctcgggttcatgatattcggatgcggtatggagatggccggcatcaccgtttcgaagacgatcgccaagtggttcgaaggcaaggaaatggccctcgcaatggggctggaaatggccattgcccgtgtgggtgtcttcgccgttttctccatctcgccgtggctcgccaacatggctcccgcaacggtcgtgcgcccggtggcattttgtaccctgctgctgctgatcggactgctcacctacacggtattcaccttcatggatcgcaagctggacaaacagctcgggctggattcccgcggcaacaacagttccgaagaggaattccgcatcagcgacctgggcaagatattcagcagcaaggtattctggatcgtagccatactctgcgtgctctactattcggcaatcttccccttccagcgcttcgccacgaacatgctggaaagcaacctcggcgtcacggcacaaacggccgccgacatcttccgctggttcccgatgggcgccgcggccatcacgccgctgctgggcagctacctcgaccacaagggcaagggcgccacgatgctgatcttcggagccgtcctgatgacggtatgtcacctgatcttcgccttcgtgctcccggcctatccgagtacgctcgtcgcttacggcgccatcatcatcctgggaatctcgttctcgctggtacccgcagcgctgtggccctcggttcccaagatcatggagacccgctacctgggttcggcctattcgctgatcttctggatccagaacatcggcctctgcctcttcccagctgtcatcggctacgccctcaaattcagtaacccggggcatgtggacggcacggcctacaactatacgctcccgatggtgattttcgccagctgcggcatcgcggcgatgctcctgggactgtggctcaaggcggaagaccggaaaaagaactacgggctcgaactgcccaatataaagaagtagccaaactacgacgaataaatgaagcggaagggctgccgtgcaatgcacggcagccctttgtaattttccagaggcaagggttcggggaaaatcccagccacgcgatccggaatcagcgtaccatttcgtacaactcggcgatgcgcgtgcacatctcctcccaggagaaacgtttgcgctcctcgatgcagttcaggcggaagcgttcgatcgtatccccgtcgtacatccgcgcaatggcatcggccacaccctgcaccgtaggctcgcagacataccctacgcgaccgtcgggcacgatctccgaaagaccgccgacgtcggtgacgaccatcggcacgcagaactggtaggcgatctgcgtcacgccgctctgcgtcgcggtcttatagggctggacgacgaaatccacagccgagaagtaatatttcacctgttcgtcgggaatgaaccggtcgtggaggatcacctcgtcctgcaggccgttgtcggcaatctgccgcaggtaacgctccttgggggtgtaaaattccccggcgacgatcagcctgcgccccgcggcaagcccccggcgacgcaactccgcccaggcgtcgagcagcaggtcgagccctttgtagtcgcggatcagcccgaagaaaagcacgtaatcgaccgtcggatccagccccagccgtacacaagcctcgttgcgggcgacccgctccccgaagttctcgaaaagcggatgcggggaaaacagcgccggggcaccgctgtatgccttcagttcgccgtgcacctgctcggacatgtagacgaacccgtccacggcacccaggtaataacggttgaagggtttgtcggtcaggtgatgttcgtggggttcgacattgtcgatctggcagagcaccttcgtatggccgttgcggcgggcgaaacgggcaatggtgccgaaacagggtgccatgaagggcgtccagtacttcatcagcacgaaatcgggacgttcgcggcatatccggcgaccgatacgcacccagttgaaagggttgaccgtattgacgcaccggcagatgtgcagatcggccggcggcggcgtggatacggtctggctcttgcccgggaagagcagcgaagggtattgcagcgtgaaagtctttatgtcgacctcgttcccacgccgctgaaaggtgcgggccatgatctccatgatcgaagccagtccgccccggtacgggtgcgcagggcctaaaatcgtaatcttcatacggcaaatataggaaaagatagcgcaaacggctgtctcttttgccgtaaatatacggacagtacaaacttttcgcaccgccgcgattccatgcgcaggggcataacggaaagatcccggcagtccggcacccgccccggcctgcccacaaaacgccccggtcggagtcccggccgggaagagttcccgtaaaaagaccgcagcaaagagcccggagggaacacacacggagaaaaaccggccgggaaagcatgccggcaagtgtccggcaggaagagcgcacaacgaagagcctgccggacggaattcgccgggaaaagcccgcacaaaaaacggggcgccgcgaacggcaccccgcagactcgggccggggacggttattcgccgtcgtcggtatgtttgaaactcctggcggtatgcttgctgcccgctgcggactgcagcgccaggtactcctcgccgtagtcgagcatatgctgcaactcggtgcggaacgtatcgaggtgttcctcctcctcaacgataatgtcctggaacatcttgtgcgtcacggcgtccttgtgttcggcggcaatgcgcgacgcttcgttataggagtcgatcgtgctctgctccaactgcatggccaggcggagcatctccttgacgtcggtcacctgcttggtgcggaacgaggcgttcatgtcgacgtcgccctgcaggaacatgatgcggtcggagaactcctcgatatggcgcatctcggcgatcgagatctcgcgcatgatcttcgaaaggtactggtagcggtcgtcttcgaaatgggtgtggaaatacatgtactggagcgatgtggcgatctccttgcctacggcatcgttcagcaggtcgatgctcacctgatacttgttctgtgtcttgactgcggtttccataatgaaaaaaggttttgcagccctaactgcaaaacccgttccacggagtgccggcaggacattccccgcaggcctatttccactcgatagaggcacgtacggccaccgtatcggcatcgctgcgtatctcgaacagcgccgtacggccgcgttgctcgtaaccgacggcaagcgtctgtccgtaacggcattcgcgcaggaaatggatgtccaaccgcacgggcgcctcctgcgtcagcatctccaggggcagcatgtcgatcatcatttctatatagcgcatcgtattgacatggcggttgaagtcgatgtcgctgtaaacgacttcgtgcagggccgtatgcgccgggttgacatcgcggatcttgcgcggcttgtcggtcggcgaaggggcatcgacgatggcttcggcatgggcgtcgcccacccacgacaggtcgagcgccgaacggctcctcaggtcgatcatcgcccactgcgtcaccgcacggccgaattcgttgcccgcggcgtcggtcagcgtgaaattacgcgtcgagagcacccgcccgtattcgttgatccacgtggcaatcgtatagtcggtatactgcccgggctggcagtcgaattccacggccatgcgcgagagcacccacgaatggttgtcggcattgagggcgtcgaccccgaaacccttgccgtgggcgtctatgcccgccgtattgaggatcgccgagcccagcgacgggatcgtggcccggagcgtgaaatccacatcctgcggttcgacacggtaattataatgcgatttttctcccatgtaattgatatttagcgttgcatggcggcaaagataagaatttttcgtatatttggttgaacattaaccctcaataaaagcgttagttatggaaatgaagaaactcgacttcgcggaacccctgaaggattcgatcgaaatcggcgtcaagaacgccccccgatcgtcgtggcagtgaccctgtggctggtaactatctggataccctacctaaacatagggacgactatcgccttcatcaccttcgtcgtgatgttcgtactcttcgtgctggccgcttcgatcgcaatggccatcgatgcctcgttctggaaacaactgaaagacaacgtggaataaatacgcgccacggcaggcgaaggacggcgctggtgccgtccttttttatccgcgaccaattattttatcgaaaaacgataaatattatttgtttttcgaaaataaatactaattttgcactatcgaaactcaaaaacgaacaagcatgcagaacaaaaaaagactgcacaggcatttactgctgatctacatcatctacttcgcggcgctgatcgtaggtttcgcagcgagcttcgtcccggatttctcgcgcggatggcgcgatgcgcaggacacgctggagatcgagatcccacaaggcggcatacgctcctattacgtctccgccccggtagtacgcaaggccgccgagccggtcgtgatcgaggggcttccggccagcatcgaaccgacaatcagccgaatagacctgcgcgtacaggtggacgaggcctacacgctcggcaacgcgttcaaggtgatgggcaacaatgtctactgctacctgctgatggtgataacgggcctctcgtacctgacgatcctcgtgctgatagccctgatcatcaattcgctccgcaagtcgatccgcgacgaacagccgctgcgccacagcaatatactgcgtacgcgcgccatcggcatcctgatcctcgtagcggaactaagcgaggctctgatgaaatacatcagcaacaccgaggcggcacgactgctcgaaggcacctctttcgaggtcgtggggacatttccgctgagctactggaatgtgatcgtcggtattttgttcctcttcatggccgaggtgctttccctcgggacacaactgagcgaagagcagaaactgactatctaaaataagtaacatagcatggcaacgatacagacaattaaagggggggggacgacattatggctataataatcaatatagacgtcatgatggccaaacgcaagatgtcactcggcgaactggccgaacgggtggatattacgcccgccaacctctcgatactcaagaacgggaaagcgaaggccatccggttctcgacgctcgaagcgatctgccgcgagctcgactgccagccgggggacatcatcgaataccgccccgacctgcccgcagaaaaagaataacacaaaaaccctaatacgatcgattatgaaaaaattaacaatgctggttgcagccgccttcgcaatgacgagcgcaatggcccagctcaacccgatggagccgatcccggcggacaaggatgtccggacgggtaaactcgaaaacggaatgacctattacatccgccacaacgaaaagccgaaaggacaggcggatttccacatcctgcacgacgtgggagccatccaggagaacgacgcacagcagggcctcgcccacttcctcgagcacatggccttcaacggcacgaaaaacctccccggcaagcagatgatcgaatacctggagaaggtaggcgtgaaattcggcgccaacctcaacgccggcaccagctgggacatgacttcgtacatgatgaaggacgtcccgacctcgcgcgaggggatcatcgacagtgcgctgctgatcctgcacgactggtcgcacttcatcgccctccagcccgaggagatcgactcggagcgcggcgtgatcatggaggagctccgcacccgcgacaacgcttcgtggcgttcgaccatgaagatgctccaggcgctgggcaagggcacgaaatacgagcaccgcaacctaatcggctatctcgacgggctgaaaggcttccagcacaaggaactggaggatttctacaacacgtggtaccgccccgactatcaggcggtcgtgatcgtgggtgacatcgacgtcgacgccgtcgaaaacaagctcaaaacgctgatgagcgatattccggccccggccgccgatgccgcacagaaagaggtgatcacggtgcccgacaacgaagagccgatcgtcagcatctacaccgatcccgaaatgcagggttcgcgcgtgcaggtcttcgtaaagcgcccggccgtacccgagcagtacaacaacctggtatacggcgagatgctcgacgtggtacaggcttacatgaccacgatggagaatgcccgtctgcaggagatttcgatgcagcccgacgccccgttcctgggcgcaggcatgaactcgggcagcatcggcgtaatcccgacgctcgaggccacaaccttcgtcgccatgacgcaggacggcaaactgacacagggtttcgaagccctctacacggagatggagaaggtgcgccgccacggcttcacgcagggtgagttcgagcgtgcacaaaacgacctgatgcgccgcgccgagcgttcgtacacgaaccgcaacgaccgtcgcaacgccgaattcgtacagacctatctggataacttccagcaaaaccgccccatgcccgacgccaaaaccgaatggcagctggacagcatgctgatcaaggcgctcaacgtcgaggctgtcaacgcattcgcacagcaggcgatctaccccaacaaccaggtaatcgtcatcacggcacctgaaaaggagggtgtcgaaaatccgacgaccgaggagattctcgccatccgcgacaaggtcgccgcagccgagatcgaggcatatgaggacaacacggtcaaggaaccgctgatccccgaaggaactaccctggaaggttcgcccgtgaagaagaccgcacagaacgccgagtacggcacgacggaatggacgctggccaacggagtgaaggttatcgtgaagcccacggcctacaaagccgacgaggttcgcatgagcgccctggccaagggcggcctgtcgatcctctcggacgaggagttctacatgggcgagatgatgcccgccttcaactcgatgtcgggcgtaggcaaattctcggccaccgacctcaagaaacagctttcgggcaaatcggcgtcggttcagccctcggtggagaactacgccagcaccatgaacggcgtatgctcgcccaaagacctggagacgatgttccagttgctctacctcaacttcacgcagccgcgtttcgacgagaacgactacaacacgcttatgaagatgctgcgcgcacagttggagaacgtcaagtcgaaccccgactacctgatggaagacaagttcatcgacgtggcatacggcaacaacccgcgccgccagatggtttcaaccgagatcatcgacaagttcagcttcgaggcgctgccggccatctacaagaaactctatccggatgccaacagcttcgtattcaagttcgtgggcaacgtagacctcgaaacgctcaaaccgctcgttgaaaaatatatcggctcaatcccgacctcgaagaaaccgatgacgttcgcggatgacaaatgcgatcccgtgaagggcgaggtgaccgagaacttcacggcctcgatgcaacagcccaaggtttcggtacgttacatgttctccggcgagatgccctacacgctcaagaacaaggctgccctgtcgttcctgacgcaggcgctcaactcgcgctacctggtttcgatccgcgaggagaagggcggcacgtacggcgtacaagtatccggttcgacggaatacatcccgagcgagacctacaacatgaccatttcgttcgacaccaacgaggagatggccgacgagctgcgcgagatcgtaatgaaggagatcgaagagatcgccgccaacggccccaagagcgaagacatcgagaaaaaccgcgagttcatgctcaagagctggaaaaacagcctcgaacagaatgccagctggatgaactacctcaacagcaaatacggctcggggctcgactacctggccgattacgaagaggtgctcaagacgctgaccgacgccgacgtacaggccatggccaagaaggtgctttccgacggtaacctcgtgaaagtcatcatgcgtcccgcaaaggaagaggcgaaataagcccccatccgacagaatgaaaggcagccgtgaaaacggctgcctttttgtttgcaacaggaggtaaaaatattacctttgcaaaaattttaaaccaaagtgctgccaccatgtctcgtagtctcaacctggtctcagacctctatcttaaaatatccattctgacgatcgtcgcggggctcgtactccgcatcgtgctgctcttcaacgggcagaccagcgacctcggtttttcaccgggcgagtggtgccaggtattcctgctgggcgccatgaacgacctttgtgccgcaacgatcggcttcggcttcctgtggctcttcatgatgagcgtctcggagacgaaataccgcaaaccgtggggctacatcatcctcggaatactcgccgcggcattttgctacgtgaccttctgcaacacgatattcgacgaatacggcagcgtcgcaccgcaggtagcctcgggcatcctcggcttctgggccgggacgttcgccctgcggctcttcttccggggattccgcagctactggacgacggtatggttcgcactgatcatcacgctctacgtgggggctatcgtcttcaacgcgatcagcgaatatttcttctggaacgaattcggagtccgctacaacttcatcgccgtggattacctggtctataccaacgaggtcgtgggcaacatcatggaatcctaccccgtactgccgatgtcgctcgggataatcgtagtgacgctgctcatcacctggtaccttttccgccgcgacctggggcaggccgaccggctgatcggatggcgctggaaggctgtcgccgggccggcctatatcgcagccatgctactggcggtttggctgctgcatttcaatacccggttccaggacagcgacaacgtctacgtgaacgaattgcaggccaacggactctacaagttctacgacgcgttcgtcaagaacgaactcgactacgaacagttctacatcaccgagcccgaagccaaggccgaggagttcgtacacggtgtgtacggcagcacgggagacaacctgcatgccgtccgcagcgagggccccgagatacggcgcaacatcgtactgataacgatcgagagcatgagcgcctcgttcatgggtcatttcggcaacaccaggcagctgacgcccgtgctcgactcgctctacgaccggagcctggcgttcgaccgcgtctatgccacgggtaaccgcacggtacgcgggctggaggccgtgacgctttcgctgccgccctgcccgggacaaagcatcatcaagcgcccgaacaatgcggggatgcattcgaccggcgccctgctgcgcgacaaaggttacaccgtgaaatatttttacggcggcaacagctatttcgacaatatggagaccttcttctcgggcaacggctatgagatcgtcgaccaacggcagtacgagcccggggaaatcaccttcgccaacatctggggcgtatgcgacgaagacgcctaccgcaaggtcatccgcacgctcaacgaagacgccggcgacggcaagccgttcttcgcacatgtcatgacggtgagcaaccaccgcccgttcacctacccggccgggaaggtcagcataccgcacgacgccaagtcgcgcaacggaggcgtgatgtataccgactatgcactggggcggttcttcgccgaagcgtcgaaacaaccctggttcgccaatacgattttcctcatcacggccgaccactgcgcatcgagcgcgggccgcacggaaatcccgctcgaaaaataccatatcccggcactgatctacgccccgggcttcgtcgagccgcagcatgtcgggggcatcgtttcgcagatcgacctgatgcctaccctgctttcgctgctcaacatgagttacgactcgcatttctacggccgcagcatttacgacgagggctatgtcaaccgcgcgttcatcgcaacctaccaggatctgggctacctcgaaggcgacgtgttcacgatcctttcgcccgtgcgccgcttcgaacagtaccgggtcgttcccacggaggacaatccccacaacctcgaaccgatggaaacggaaaaccccgaacaggtctcgcgcgccatcggctattaccagacttcgagcgcgtggaacaaacgctgagtgccggtatctgaaaaaaggctgtctgagatttgtcagacagccttttttcgtatgcgtttcccggatacgctccccggtttgcgcagggtatgaacgcttatcgggacaccgcctcgtcccggggagggcggtatcacttcaccaccacgtcccggtcggtgttgagcgtcagctggtaggtcgcataattgcccgagccgttggtaaacttggtatagatggccgtcaggtcaacgaccgaaccggatacggggattttgttgtcgcggaactggctgtaaccgctcgtacgcaccacatagttacccggagcggcattcgtgccggtaccggcggcctgcgcatcgtaggtgaaccaggccgagccgtagaaaaacgtgtcggcattcgtaccgggcaacatgcgcatcgtcgcccaggtagcccactggtcgatatcctcccacccgggggaattcacgtcgtaggagacggaattggcgaaataattgggaaaggtgttcttatagccccacggcgccgtgccgaagcggctctcgaccccttcgaaacgaaccaggcgccccaggtcgtcgtccgacagcacagtccggtagttgtcgcgcgtaacgaccagcgtatcggacttcagcatcggctgctgttcgcccgaaaagatgtgctcgtcctgcatgatcttgctctcgatattgtcgttcgaatagctcgcattgtaggaggtcgtaccgatgctgaccatgccgcggtagttccccagcacgagcccttcgaggtcgacgtagacgatctgcccgacgggatggaacaggtagttgcccgtattgagcttgagctcgatggctgactcggaggcctcgtcgtagaggtataccgacttgtagacattgccgaagcggtcggtcgaaataaccttgcccgaggtgaacagcggctcgtcgaccgtccacgacgccacggtaccgtcgttcatacccgcattctcggcccggaagcgcgccttcagctccccgacggaaatgtattccagtcccttcgcctcgaaatcggcgcgggtgtagaccctggccggccccggattcaggtaatcgctgtaacagcctgtgaaaaacagggctgcggcagccgccagtaacaatttgaataatttatccatagcattcatgttttattcgtccagccgtcagaaacggaaatagagattgaggtaataggtcgtaccgaacatgtagaaatacttcgagtcgaaagcctggtaggtcgtcacggtggtctcggtattcttcgagaggcgtgtctgctcatagccgccggtcttgatgtcctgattgttcagaatgttcttgacgtcgaggctgaatcccagcgtgtacttgcggtggatataccagttcttgccgatgctggcattgagcgtataggccgagtcgaacttctcctggcgtcgcaggtgttcgatgtcgccgggcgccataccgcccgtgattacggcgtcggtacggtagatcgggctcatcgagagatacatgttgttgtaatagttgaagtcggccgagaggtagatgttgttgttcgagcgccacgacaggccgacgttgacggccgtctggggtgtgctctcgacccggaaatccttccagtagacataaccgtcggagacgatatcgccgctgttgtcctgcgtttgcaggtaataggggttcgaatcgtaggtatattgtccccagctcacggcgccgttcagggcgagcgtgtggtagatcgggatcgagacggccgcctcgaggccgaaatgcaccttgtcgatgccgctcatggcgaaattggtaaaggtggccgccacgtcgtcgtaataggaaatcaccttcgactggtcgtagatgcgggtataatagcccgaaatgcgagccttgaaatcgccgtaacgcaggttgtacgacgcatccacgccgaggacgcgctcggccgaaagccccggtgtcgtggtgttgcgcgtacggggcgaaacgaacgaggactgaaactcgggcgcttcctgcatgtagacgacgttcacctcgacggcatgcgccgcggagaagcggtacgagaagttacccttggccttgtaggtcaggtaatccagtttccgggagtcgcccttcgaattgtcggggaagagccccttgcgccacaaaccctcgcgccacagcttcgcatagcccacttcgccgcccacggtgatgcccaagccgccgacgttgaagccgtacgatgcccacgcccgggtgctgagcacgtgggcatagtaatcgtagctgtatttatcgcccaccttggcggcatgcgcatgaccgtacttgttgtaatagtcgaggttgttctggtaggcctctgtattcgaaccgaaatcgcgttcggcgaatttgtcgatgtcggcccaatattcgccccccaggagatctttcacctgcgaatagtactccgtacggttacggcgcagcgaaagtccgccgttgatcctggaatcgtcgcggaagatatgcgaaaaactggccacgaggttccagtccagttggtcggtatggcgctcctcgaccatgtagttcgaccgccggccggggccgtagatctgctcgtcgaggggatcgttctggttatagttggtctggtacatctgctcccagtcgaaatggcggatgtcccggtagttggcctgccagtagacctgctgccatgcggcaccgacatagttcttgtcgagtgcgaaatagctcggcaggtaacggtagtagtcggggcgcgggtcggggccgttctgccacgtcagtgccgagtaaccgttcttgccgaagcgcagcgccgtggccagctccaacttcgaacggtcggagatgtcgaacgtgtagttgagcatcacgatgggttcgtggttattacgcacgcgggcattgcgcttcttgccgtcctgccagccccagttggggttgtaatagttgttgcctaccaggtcgtaggcctcctgcgtggcggcctgctgcgcaccgcgttcggtgggggcacccaacagggtcagcgccaggcggtggcgctggccgaactgcttttcgacggcggcgaaataaccgaacgcattgtagtaaacgccgtcgacataggagttgccgccctggcgggtcgaaaccgaaaaggcatacgaccagccgttgtcctgatagcccgaggcataggtgaccatcgcacggaaacggtacatagaattgccgttcacgaggctggcacgcaaccccttgcgcatctgcgacgggctggtgatgatgttggtcgtaccgccgatgccgcccagcccgacatccgaggccacgatccccgaagtgacttcctggttacgtgtggcatcgttcaggccgctccacagcgaccagggcgtatagcccgtgagggcgtcgttgagccggatgccgttcatgtagacgtcctggtactgcgaatcgtaaccgcggacgttgaagcgcatctcgctgaacttgtaggaagcgatgttgttgaagatgtccttggaggccgagagcgatgtaggcaatgcctgcgcatcgtcgacggtctccatgtcgaactcggcgaacacggcgtcgtcgatcatctgccggggtacgtcgggcaccaacacgaccgcattgatgtcgcgcacctgcgaccccacgcgcacggcgatggtgaggggttcgaactcgggggtctcgaactgcagcgagtattcgcccgcagggacattctcgatgaggaaattaccccgctcatcggacatcacggtaacgtcgcccggcgtcatcgtaaccttcacgccgtcgagggccacacgccccgcacgcgaaacgaccctgcccctgacgccgccgtcctgtgcaaaggcggtcagcgtggtgacggagagtactaaaatcagtagaattttgactttcatagactatgtagctaaattatttggcaaaatagatatacaccgggaagtggtcgctgtaaccgccctggaagttgtttcccacataggtacgcagcggataacctttgtactgcccctcacgctgcaccatgtaatgcctgcggaagatgttgccgtagtacttcgaaccgggagccttgcgcagttgcatgccgtcgtcgcccgagaccatgttccccgagaccacgatgttgtcgaaaaggttccaggcgtcgccgtaggcgagcgtaccgatccccgcacgcagcatgtctccgaagggattgtagaaatcgccgggttcgagctccttcatgcgcgttcgggcacccaggccttcggccatgctcggatccgtagggtcgtcgttaaagtcgcccatggcaacgatccgggtcgcggggtcggctttcagcaccgaatcggcgatccggcgcatctgctccccgacggcgatgcgtttgaattccgaagcgtccttgccgcccagccgcgaaggccagtgcgccaccatgaagaagaagggttcgtcgtcgatccttccccacatcgtcaggatgtcacgggtcttgaaattggggagcgacggcacgacggttttcaccggatagctgccctccagtttgaagacttcggggcggtagagaaaagccacgtcgacgccgcgcgcctcgggcgaatcgtagtgcacgatacgataatcggctggcgccagtttgggcgccgccacgatatcctcgagcacggagcggttttcgacctccgacacgccgatcacggccggatagaccttgtcggcagccgcaaggtcgaacaatacccgttcgatgttgcccagcttgcggttgtatttggccgagttccactgtttgggcccttcgggggtgaactcgtcgtcgagcacctcggggtcgttgatcgtatcgaagaaattctccaggttgtagaacatcaccttgtagggcttctgcgcgaagcacgccacaatgaatgccgccagcaacagggtgaatatcaatcgttttttcatcattctgaaattttaaggttttacagtccccacgaggcggcgtctttctgcgccttgacggcggcgggcaccgaagggaagaattcgaaacccgtgaggctttcgacctccgaaacgcttttcacccagctccttgcagtcccctgtccgcccgcattttcgacccagaacccgatggacttcagctggtcggccggatagtcgcccagccggtcgcccgcctggcggacattgcccttgaccgtgcggacgaacaccttgaaatagtagttcggcacgggacactgcttgccgtcgatatcgggcgtggcaaaggtgctgccgggattccaataggcgcccgtgacgacatagagcgtatcggagcacatccagttgtcgcgcgccatcttctcgagcgccgcccagggattctggttcaggctgtaattctggggcgtcatgttcgagaaatagaaggtctgtgcctgcatcatggcattcccgctgcggtcggcgttggggatctggtgcccgcggtcgaaattccgtgctggatagcttttggtcagattggcctggtactcggcggcgatcttggggtcgtatgcccaggtttcgacacgccccgaacccgtgtaagcgctgtggagcggataggccacccaccaggcggcgaacttggtcttgtcgaagcacatcgtaaagttacgggcattgtaggttgcacccgtattctggttgcgcagcagggcgaaatgcgtcacgtagacatacgcatcgtcggatttccgagccgggatttccggccagacaaggttatggcccgtctggtagacatcgtcggctcccgaggtgctgtattgtgtgagttccagctcgaggggcgcctgcccgtcgaacgtgaagcggatcatggcatgccgctcgtccttcgtgtcgttcggccagtaatagacatactggttgcgggctgcgaggctcgtaccggcaacaccggtcttgacggtctgcccgcccggagccgtacggttgaacgaaacccagtcggcgcccgccgtgatctcggccctccacgacatcccctcgcggccgtccacgaccagcacggcggcgccctcctggtcggggtgcacggtcttggtgggatcccactccacgcggaataccccggaacccgaatcggaatcgtcgctgcaggaggtggcgacgacacccgccgccacgaccgcagcaaccccgaggagcgttcgtatcagatatttacgcatccccttcatatcaatagacctgtacgcccagcacgatggcacgccccgtattgcgatccgatgccgccgtgaagtcgggcgacgtggagatcgtcacggtcgatgcggcggtcagccccgtgagctggaaggtgtaataatcggaatcggtcacgtcggtgaaggtgaagtcgttgcccgaccccgtggcaccggcgctggccgtgatcgcatggctgccgtcaccgctcaccgcaccgccgttgttgacccggatgtagaccgtggcggccttgcccgtccatgccacagcatagaacgacagtttcttgtcacccgtgagcgatgcccccagcgcctcggaggtgaatacgccggcaaggctgctcgtcccgagcttgaaacccgtagcgggctggccgtcgatcgtcgagttggaaggatagtaacggtcggtcgtgctggtggaagccgggatgaactggctcatggaggtatagatgcccttggtatcgccgcccgacccggccgcgaactgcgtgagcgtaacctcgcggctgttaccgcccgcaaccgagacggtcatcgtgcgtacgatgtcgtcggaagtcgtattgggagccggaggcgtgacggtaacggtgataccgttgacgacggccgtgaagggcgcaatcgcatcgttatcgaccgtcagggcgttcgacccgaggttgacgaccgtaaccgcgacattcttggttaccgtctcctcggcaccccaggtcagcgatgcggggtcgacctccgtaatcacgggcgtcgaagcatcgaccttgaagtcggcgacatccgccgcggactgcgggtagagctgcgccgcaccgtcgtagacttcggccacgccggtcagcgaaccggccgtcacggtcgacgagatcaactcgccgccccatgcgacggtcttgtaggtacgcacagccaggtcgccgctcccatcggtaaacaggcgggtcgaatagttggccgtaccgctgtaccacatctcgccggcctcgcccttgaatgcgagccccgtgaccttcacgttcatacccatataatcgttcgaattgaactgcgcgagggtgacggacggcacgaccatctgcacgggcgacgagttgtcgaccgcggtcgttaccttattgatcttatacaggccataggagttgtagaccgtactcgtcgcatcgagggtcagcgtgatccgggcgccgaccgggtagtcggcgacggtttcgtacgccgcatcggcgagcagaatacccgaaccggcatccccggtgttatccacgacggagatcatctggtaaaggttgccgcccgcgtcgttggcggcgatatatccctgaacggtctgtcccgtccactctccgagcgaagcctcggcacctgaagcaggcgccagccccttgacgaaggcaacgaattcggcaaccgtcttgggctcggcactcggcttggcggcctgcgcgacacgcagggtcagcggcgtgacgccctcgcccgagaaggtgatgctacccaggtctttcgatgcggaggtttcattggctgcggtcgccgtgacggtgaccgtaccgttgttatccccgccctggggtgagatcgtgaagccgtcgccgctcatggtggccgtccacgcgatgttggccgtgacggtcacggtcgccgtggcacccgacgccgagcccagcacgaggttatcctcgggcgagatgctgagcgaagcccccgaagcgacgaatgcggccacgtccgaaggcatggtcgggatgacctgtatgttcttgaaattctgttcggcggtaccgagcagggcgcccgtcttgtcggcgatcgtaaggtcggcgaacccggcggcatcggtagccgtagccatatagctctgaactgtctcgcctccggcggcatcgaaacgcacgacgcgcttggcggaagtcgcccacgcctcgccgacgaacgacgactgcggcatgaggttcgtaacccggacatactgcccctggtaattgccctcgttgagcgtcgcggccgaaagcgtcggcacggccacctcgacggcgggatcgtcggagacggtcaccacgacgttcttcagctcgcgcagattgccgtagggcgaatactgggcggccgacaagtcgagcgtaaccttcttgccgaccggatatttcgcgctgttatcgcgggtaaactcggtcgtgctgtaaaggatgatggccgagttgggcagcgtgatgttgtcgccgacatagagcttgccgaaattattgccgccctcgttgttggcgaggatcacggcaggaatcgtcttttggctgtaattcagctcttcggtaccgctttcgaggctcggccacgtgttcttgatgtaggccaccagcgcgctcacctcgccggccttgggcgcctcgccctgctcgatggtgacctctttcgtccaataggcgccatatgcgttcttcaggttgaacgagagcttggcgatacggcccacgttgctcgcggggatggtgaattcgacggtgccgtcgcccgagccctgagtcgcggagggcgtaacccagtcgctgccctccagcacttcgagcgtccaggggcggttgctctttacggtgaatgcggaggcgccttccggggcaccgtcggcattgaacgtgagcgcgtcgggggtgacttcgagataaggcatccccttgtcgtcgttatcgtccacacatgaggccagggccacggtggcaaagaacgccgtgccggacaataacttccaaaagttcgattttttcatagaagcgtttattttagacaggaatgaatgaatttcctaatttcctgtatatccgcttcaaatcgaatgccaaggaatgcctttcaaccgccggacggctccggcaggcacaaaaaaatatatcccgcaagcgggatatattcagcggacgggccgattgatgccacgtccggtcgtagggcgcgcgtcagcgtattctatcggcggcacgcaccatcagttcgtcgcggaaaatagcccgtgcagcgaggtaggcgaacagcaggcacacgagcggcagtgcgatggcgggccggaaaccctgcgtatggaacgaaagttcggaaaagacccgccaactgagaaaataataggccgcttccataaccgcagaaccgatcagcagcacgatctccacgacacagagccggatctggagcaggcggcgtttgaacaggaagatcgtaatgaaaggcagcacgcaggccagtgccagcacgacgcccatgtagacggtcgactgtacggcctctccggccgaggtctgcagggaaaaggcatagagccggaactcacccgcatcgcccgcgaaccaagccagcggggcaaagagcgtaacggccatgagcgccgtgacgatgagcagatggagtgtttggattcgttgtatcataattatttacaaagttttatcaatcagatacttattcctgtccgacgaaccccggttgatgagctcgcccaggaaccccgccaggaacaactgcacgccgaggatcacggcgaggatcgccaggtaaaagagcggctgatcggtgaccgggcgcagcgacagcccgtgcacctgtttccagatctttgcggcaatgatccacaccgtagtcccgccgccgataaggaacatcagcgtccccagactgccgaagaaatacatcggcgagcggccgaaatgcgtcatgaacagcacagtgatcagatccaggtagcctttcacggtacgttcgaggccgaacttcgagcagccgtatttgcgggcgtggtgctcgacgaccttttcgccgatacggcggaacccggcctgcttcgccagaatcggaatgaaacggtgcatctcgccgtagacctcgatcgacttgacaaccttgcggcggtaggccttcagcccgcagttgaaatcgtggagtttgatgccggagacccggcgcgccgtccagttgaagaatttgctcggccagcgtttgccgaccgggtcgcggcgcttcttcttccagccggataccaggtcgtacccttcttcgaggatcatgcggcgcagttcgggaatctcgtcgggcgaatcctgcaggtcggcatccatcgtgatgacgacctcgccttcggctgcggcgaaaccgcagtacagggctgccgacttgccgtaattgcgggcgaagccgatgccgcggatcgccgggtacttctcccggagcgattcgacaacctcccaggagccgtctgacgaaccgtcgtccacgaggatcacctcgtaggcatagccatgcgacacggcaacgcggtcgatccatgctaccagttcgggcagggactcggcctcattgtagagtggtactacgacggatatgtccagtttattattcacggtatgtccctattcgcttagcggggtatcgaacggtttgggcgcacgcgacaacacgcctgcaatgataaggccgaaaacggcaccgaacagaatactcacgaaagttacggcccacagggttcttaaaaaagaaggttcgggggtattctgtatttggtcgaacatctgcgacagcatggattccatgttggccggcaccccgccgttccgccctataaaatcggataatgcggctgtggtacgctccgtatagttggcgtaaccgatgaaaaagtgcaggtaaaggtattgcacgataccgacgatgagccccgcaacggtcgaaacggagaggatgtaagcatacccctgcccgaaggagaaaccctcctcggcggtatacatcatcgaataccggcgcgtgaaacggtgcagcagatagtaatgcagcacgacgacggcaatccattcgattgcgtacaggccgaaactggccgaaatctgcaatcgggtttccaacatgaacgagacggccagcagggcgcctatgatcgcgccgtacttggcgacatctttccagaaattcgttttttccatatactgtttatattaatctcattgcagttcccctttgccctcgcgcagcacttcgggctcgtcgcccgtaaggtctacgaccgtcgtgggaacattgtcccccatgccgccgtcgatcacaagcgccacgtcgcggccatagcgctcatggatcagttcgggatctgtggtatactccacgacctggtcgtcgtccttcaccgatgtggtgacgagcgggcagcccagcgcggcgacgatggcgcgggatatggcgttgtccggaatgcggatgccgatcgtacggcgcttttcaagcgccttgtcgggcacgcgcgaggatgccgtgagcacgaacgtgaagggccccggcaggttccgtttcaggatccggaacgcagtgttgtccacacggcaatactccgccacctgggccatatccccgaagaccaccgaaaaagcctcggcatccttacccttcatccgccgtaggcgttcgatggccttgggcgaatggagcgaacagccgaaagcatagacgctgtcggtcggatagatgacgatcccgtcgtggacgagcacgtcgaccaccttctgcaattcccgctccgaggggttctgttcgtagatcttcgtaagcatcaggacaaatgtacgaaaaattatttaatcttgcgccggttcagttcggcgctgtaagcccgggcattggcattgtgctcgcggagcgtccgtgcgaagttgtggtaaccgtcgaacgtcgcacgcgcacagaagaaaagatagtcatgcacctcgtagttgagcacggcgtcgatggcgtcgatgccgggcatgcagatcggcgaaggcggcagccccttgttccggtaggtattgtagggcgactcgtatttcaggtgtttgtgcaggatgcgccgcagcccgaagtcctgcatggcatacttgaccgtcggatcggcctgcaggggcatccccttgcgcaggcggttgacgtacacccctgcgatacggggcatctcgtcggtcttgcgggtctcctcgtagacgatcgatgcgagggtcatgacctcgagccggctcagaccgctgcgttcgcgcagggcatcgcgcccgggcgtccagaaacggtcgtactcgcgcttcatgcgctgcacgaactcttcgggcgtcaccgtccagtagaactcgtaggtgttgggaatgaacatcgaaaagagcgtcacgctgtcgaaccccacgccacgcgccacttcgggcgaggtcagcacctgcatgatcgccgtggagtcggcgtcgatctgccgggcgagtttctgcgcgagctgcgccggaatgcgggcattgttgatcgaaacccgtacaggggtttgaagccccagtttgagcatccgcgctacccggatcacgctcatcccgggctccagcacatagtggccgggcttgaacgtctccggcaggttgatgcgccgggcatagacaccaaaagcccaatggtgcctgagccggggcagcaaggaatcggtgaggctttggtagtcggcacggctgccgatatagaggtcgcgccccgcgcgcacggcattcccataaaattgctgccgcaggacaaaacccgcgacaagcaggcacgcaaggcaggcgaaaaagatatagcgaaaagtttttttacgcatcgggccgaaaatttttgcaaagatataaaaaattcctacttttgtgcccgggtgagtcttatacgaccagctcccacagaatcccccaggcgaggaatcgagcaagggtatgtggtcgtagcggtgcgatataaggagctcaccctttttttgttatacggtgcccgggtcacatagccccgggcaccgcttttttgctccatcgcggcatgaaaaaacgtcaacgaacaaacctgccgccggcataaaatccaatcgtattgtgttgccggcaaaaaaatgcataccggatgcagcagccggccagtgcattccagtaaaggcataaaaaacgggacgaagacgtcccgcgcggcatgattccggtattttatttcgaataggcgatcagcaactggttgacgacgctgacgaagacatagcagatgacaaagatggaaaccccgcgccaccctttcatattggccgagacgaggtaggcgaaacagccccagaccatcgaccagaccatcgagaccgacaacaggatcacgatcaggttatagcctgcgagcttcatcacttcgcagacgctccggggctcgcagacaagcccgcccagccatttcgagggtacgctcagcaccccgagtatgacgatcgtaggcagcatagcgaaaagattcgtggcgaagatatcgactgcgcggatacgcgacggcgagaagagcagggccagcacgtagagcaacagcgaaaggggaatccacaacagcaggttcgaagagaggatcgtgacgatcttcgacaggtcgtcaccgacaggccagctcaccgccgtcagcaggcagatggaaaaaatagtcccggcaaggccccagccgagagctttcccggtagagaggtattcaaacgggttaagaatcctgttcatcgccttcgaattgattaagttgagcaattatgtcgtccaaacggttgcgtaccgtggggtaactgagccctaatttctgcgccatctccttcagggagccgctgctttttacgaaatcgagcacgaattgctggtcgggagccgaaagctgcatcatcaccgggaggttgtagtcgccttcgatatgcgtatcgcatccgttgcaatgcatcgcttgtacgctcaatcgtttaccgcaggagggacatatcttggggaggttcttcagtgccatataagttcaaaaagttgtatttataccatgtcaggcttcacaaaattaatatattttttgaatatgtcacataaatgtgcaaattccggcaaaaaaccatggcaataccccgcgtcacagaccggaggtgggatttcagaaattggccttcaccccgaccgtgaaatttgccccgtattccggataccacgggtattggtacaggcggcggttgatcaggttacggccctcggcgaagagcgtaatgcgtcccgaaaccttccagtcgaaattgacccgcaggtcggcggcaaagggcacttcgacactgccgaaactctccgccccggatgctgcatccagctgatagtcggaccattttcgggtgctttgcagccagatacccgcgccgaacgaaatcttgcggccgtcgtagtgggcggaaaaattgctatcgaaagccggggcaccgttatggagtttggtctcgtcgtcgttatagatatagccgtgcacgcccaattccgtccggaaactgctcgcgggacgccacgtcacctcgccgttgaacgacaagacggtttggcgggccatcgacggcagcatggtcagcccggcggcaagaatatcgctcccctgcacgacatcggcactataccagtaaaggtggttgtcacggatcgagaacccggcataggcccggtagtcgaacttcccgcgccagatactgcccccgataccgaagcggccgttgtaatcgaccgaactcttagtcccgaatacgggattcagcaaatagggattcagcttcgtaagcgagcggtagctgttgtcgtcgacgctcccgtccatctcgaagaacgggcacaacccgtccgtaccgaggttcaggttcagccgcacgaaggggaggatgtagttctccgcctcgacggatttaatcttgtcgtggtaatagtccgcacccgcttcgaggcgtactaccccgccctcgataccgtaacgcagcgcagcatgtatccgttgctggttatattcgtcgagggccttctgccccgcaaggcgctcgtagcccacttcggcagccaggcggtgacgcccgaaaccgcgggcgatcttcgcatgggtttccagcgtggtctggcgggccttgtcgttatagtccggccactcggaatggtcgaaaaacatgccgccccggatggcgatttcgaaattcacgcggctcagatcctggaaatcgtcgccgaagcgcaccgcgatgttcgcatcgccgtaatcggccatcgaaccgggtacggcatcggcagagaagtccggcgcgaggtacataccgtagcggtgatacatacggttctcgtaggagaggtcgccctcgagcacgtggcggccgaaatatttacctgcagcggcgccgatacggttgagcatccgcgtcgaattgttcttgacgccaaagtcgttcccgatcttggaatagcgcccctcgtggttgacatagcccaccacataccccgtcccggggttctggctcgaagcatagaaatccaacaccgaattgaacgggtagcccatcccggccttgaggtagaaaggcagcgggcggttgaattcccagtaggttaccgtcgcagggcggatcggccgcgtggcgagggtcgtctgcaacgacagcggtgtgatcgtatagtcgatctcgggacgcatcttcactgtatcggtcatgtcgggcacgacggcgagtttcgacgccccttccacactcggcacataggccttggtcacttcgacccgtttctcgacctgcgcgctcgcgccccagggcaatgccgccatcagcgcggctacaaacaacatgcgtttcatcgtcagttcagttttgcgatccgttccttggcttcgtccacgatcccgtcgtcggcaggcgaatagccgtccgcgacgctctggtaggtcgcccgcgcctggaaattgtctcccttgcggacatagacgtcgcccagcaggatgaaagccttggccagccagtaggcctggggttcccgttcggaataggcgaatatcgccttctcggtcttgtccatatcgcccttttcgaaggtgtcctccagcacgtaataggcagcggcggaaccctccttcgagcggacgtccgcggccagttccctgtaaagcttcacggcatcggcacggcgatcctgctgccgcagcaactccgcccatgcgaatttcgattcgcgcagcgccacggccccggcatcgggatgcgcggcgacatcggcagccatcgcctcgattttcgaagcgtcgcccccggacagcgtggcgcgcacgtagcccgtcatagcatcctcgcgcccagccaccgtcgtcgtgacgtcgtacaacttgcggaatgcggcggcggcctcgtcgtaacgcttgtcctcataggtcagctccgaaagtttctcgagcaccgtgaccgaatactggttcgtaccctgcccggccagttcggtgagggtttcgatggcatcgccgcgctcgcccgtgcggaggtaacagtcgctcaggaaatagagggcatcgttcaggtaataccccttggggtagctcctgacataactgcgcagcgatttggcggcagcgtcggtctgcccggccaggtaaagtttctgggcggcggcgaacgacagcgagtcgcgcgacacggctgtcaggtcgctctccatgcccaccctggcggcataatcgaaatagtcgtcgaccttgccgtccgagacatagatctcgcggataccctgcatggcccctttggcttcggacgactgcggggccgtctcgaccaccatgtcgtaatatttcagcgacttttccttgtcccccaggttgaggtaggcgagccccaggtcggcaagcgcctgtgcacggcgcggcgacgagggatagtcggcaatgaaccgttccaattgtccggcaccttcggcatagcgttcctgcgcgatataggaacggccgagctcgtacgaggcggcatcgacatagtcgccctgccctgcagtaacgatctgccgcagcgcctgcagcttgggctccgtgcgcccgaggatgccgagcgtcacggcgcgtttatactgtgcgtaatagcgttcgggggtgttcagcgcaacggcacggtcgtaatcccctacggccgcttcgaattcgcggtcggaatagcggatgtcgcccagccggttgtaggcatcggcgcggtagcggtcgcgggccggataggcttcgaggaacttctcgaacgaactgcgcgccccggccatgtccttgcgcgagaaatcgcagtagccgaggttgtagagcgccatggcatattcgtcctcgctgcggggggcacgcttcaggtaggcattgtatttggccgcagcgaccgtatagtcgccctgtgcgaaggcgatttcgccctgccagaaggagttgagcgcactgtatttggggctgacattgatggccgcggattcggccaggtaacgctgcgcggcacgcatgtcgccggcgctgtacgcctccaggccgcggaaataggtgatcttctgcaatgcggctcggatgtcggcatcctgtgtcgggaaggatttgatggcccggtaagccgcgtcgtaatcgttcgaattgtagtaggccgcgatcagcagcgaacgggcttcgcccacgcgcggagaatcgggatactgcgcgacatagcgcgtcagcacgttgatcgcgccgttgaaggcaccgccgcccagctcgtattgcagtttgccgtagttgaacagcgcgtcttcggcgatcaccggatcgagcttgtcgtccgctgccatggcgaacgcctgcatggcggcctgcttgtcacccgcacgcagatagcagtcggccaggtggtacgaggcattctgcgtcaacgcatcctcggcaccgcaggccttgcgcaggaactccgcagcctcgggatagcgtgccgtgcggtaaagcgagaagcccatcagatagctgccgtcacggtcgagttcgccgccggcagccgtaaaagcgtccagatgcccgatggtcttgttatagtcgcccaggtgaaaccacgattcggcgatgacgcgctccagttcctgccggcgttcgggcacggcgcggcgcaccagttcgtcgccgttctcgacgacataacggtagtttccgtcgcggaattcgatctgcaggaggtaatacggcaccacggcacggtaggcatcgctgcgctgcaaggccgtgaagccctgtttcgcacgcccgtagcgcccttcggcatagtcgatataggatttgtaatagagtgcatggtcggcatattcgctctgggggccgatgcggtcaaaataaccgaaagccttgtcgtaattgccgtcggtgaattcgacatagcccatgcggatgtcgtactgctccttgcgtgagcggctcagcgccttgtaatcggtctttgcgaaggcctcgcgggcacgcctcatatcgccctcggcgcaatagagcgaccccagcgaaaaccgcacgtcgttggcgtagaccgaaccgggataacgtgcctcgaaatcgcggagcgccccttcggcatcgcggctgcccagctcgacggcacaggccgccaggtagaaatcgaccgtctgcgccgcgacacggtcggaaggcgcgagcacgtcccgggcccggaggaactcatgccgggcatcgctccagcggccgtagtcgaacaacgaccgtccccgctcgataaaggtctcactttcgggctccccggcctgcacccgcagggtgcataccgcgcacagcgcgagggtcagcaacaagctcagttttttccgcatacgcacataaattcttacaaagggcaaatatacgaaaatttgcctttcccgcatacccccgcaccaaatataccggtataaaaccggaaccgacaccccggcggcgaccgggacggtttgcatctgttgaaaattatccataccttagccagaccgttacgcccttaacccagtcaacatgaaattgcgtctcttccatcgtaacaagcccgccctcgcgccggggatacaggccccggccgtgcgcgacacgctcagccgggtttccgttgcctgcatcgagctgacgcccgaaggggaattaacggatatcaacatgcaggcattcaaggcactccgcctcgggggggggattttccgcatccgctgaacatctccggcctgttctctgtctgtcatgataaaaaagaccttctgcccgctattttcaaagggctggaacggcacaaaacctacggcgacctgccgccgtggagctatatacagctatccggcagggacaatctgaaattctatatcgaaggccgcttcgtcggccattacgaccggcatagaaaactgcgccggatagtattcctgttccgggacatcgaagaggaagtctgccgcaggttcattctcgacatggcgatggcgcaaacgaaaattttcccgtggttcttcgacctggacaacggcagaatggtcatcgacgcccgctggttcgaccacgtcggcatcccgcgcggcgactgttcgatgagtcccgggatctttttcgacatgctccatcccgacgaccgggaaaccctttccgcagcattcgcaaagcagctatccgggatactcacccccgaggcatacgcctaccgcgtccgccgctgcgacgggacatgggaatggttcgagggacaatccgtatacctgggacaggcacacgacggctcgccctatcgcgtggtgggtatctgccagagcatccagccccacaaggagatcgaaggacatctgcgcgaagcccgcgacaaggcccgcgaaaacgaccggctcaaatcggcgttcctggccaacatgagccatgaaatccggacgccgctcaacgccatcatcggcttcgccaacctcttgacgtgcgacgacgtccccttcagcgaaacggaaagacaggagtacagccgcctgatcacggccaacggcgaccagttgctgcgtctgatatcggacatcctcgacctttcgaagatcgagtcgaacaccatggagttctgtttcggggagcattcgctgcacacgctgctgtcggacatctaccagtcccaactgctcaccatgcccccacaggtcgaactgaggctcgaactcccgcaggcagacacgacaatccgcaccgatgcctcgcggctgaaacaggtcgtcaacaacctgataaacaacgccgcgaaatttaccggcaagggcaacattacgttcgggtaccgcacggccgacggtgcgggagaggtcgaactgttcgtcagggatacggggaaaggcatttcgcaagagcacctgagccggatcttcgagcgattctacaaggccgattcctatgtaaaaggcgtcgggctggggctttccatctgccgtacgatcaccgaactactcggcggcgagatatcggtcgtctccgcgccgggcgagggcacctgctttaagatcgtgcaccccgtccgccgcacggaaacggcaggggaaacagcggaggcataccggtaaggtacgattcttgccccgcttcgggcgttcaacattaattctgtgacttatgatcgaaaaagtaacgctgcaactctccggggatgcggacttcacgtccgaaggcgggccccgctgcgaggagatgaatcccaaggcactgctactctatgccgcggcgaaatgcgtcggcaagacggccctgatgattatggataaggaacgtttccgccccaagcgcttcgagatcggcatttcgggcgagctctcggacgaaacgccccaatccgaaagcaccttcaaatcgttccacgtagtctacaacatcgaatgcgacaccgaggacgaccaggccaaagtgagccgtgcggtgatgctggcgcacgaaaagtactgcggtatgatgcagatgctgcgcaaggtcgcacccgtatcgcacgaaatcgcggtggtcagcaccgagcctgcgaaagcctgaaacgacaggcaagggatacgaaaaacggggattttttgaaaaaatccccgttttttgtgccccgccggcaggaaaccggcggcggcgtcccgaagaggcggtctcggccatgcggtttccgcagccggaacaggcatccccgccgcgacggcctgccgggcagggcctgcctgccgccgctcactgcgccgtgatgcgcaggtagtccgacaccgccacggcatagttgtaatgagcctttatcgcattggtgtaaagctgtatccagctcagctgcgcctgcaacacatcgaggatcgtagagagcccctcgccgtaggaataggtgctgatgtcgaggttttcgccggcgatgcgcaggctctgctccgtggcatcgacctgtgcccggctgttgaccagcgccgtccagccgttcatctcgtcgcgcacgatattgtcgtgcagcagcgcggtgttccactcactctgccgctggacggcgcgtgccgcacccgtggcgcggcggcgttcgccccagtggaaaatcgggagcgtgagtttcacgaacgcagagccgtcgaccgtcgtggcgcccgtccggttgggataatacggctgccacgagccgccgatgcccacgctcacctgcggattgaacggcgcgcgcgccacccggatacccgcgtcggcctgttcgctgcgcaaccgggccgccatatagtccggacggcgccccagcacctcgtcgggcagcaggcgcgcaggctgcggcagcgaatcgcggatgccctgggcaagttccaccgcaaggtcgggatccgtgccgcgcaggatgttgaaattgtgcagcgcgacggtatagttccgctcggcactcaccagcccgtactgcgcttcgctcagacgggcatcgatcatcagcacgtcgcccttggcaatgtagccctcggcgaaacggcggtcgacgacctccttgagcgagcggattatgttgacatactggcgcatggatgcggcatacaactccatggcggagaggttccagtaggtatactcggccgcataacgcacatcgagctgcgtgaattcctcgtcgcagagggcgatgtcgtagcccagctcggcctgtttgtaggccgcacgtacggccccgccgccgtagacggtctgcacgagttgcggaaggacgctgaaattccaccgctccaacccgtcgtagtggtgtaccgtggcggtgaaactgccgtcgagcgacagccgtggcaggtatcccgtacgagcctgtcccatggtctcggaagccgcatcgctcttcgatgcggcgaccttcagttcccagctgtattcggtcacggcctgccggtagtcgccgagcgaggtctgggcggcgacgggcacgaaggccaacagtgcggataggatcagataattcttcatgacttgcggatattgtagaaaatggcatagacgaccggcagcacgcagaccgtcagcagcgtggcgacgagcaggccgcccatgatcgtggcggccatggcgccgaacatcgagtcgaacaacaggggcagcataccgaggatcgtggtacccgaagccatcgccacggggacgattcggctgcgcgtagccgccgtgagggcttcgtaggcacccttgccttcggagcgcagcacgccgatctgctcgaccagcaccacggcgttcttgatgttcatgcccaccaaccccagcagtcccagcagggagaagaagttgaaaaccttgcccgtgacggccagtccgagcaccacgccgatgaagatcagcgggatcatcagcaggataacggtcggctcgcggtagttgcggaaaagcaggagcagcacgatgaagatgagcaccatcgtcaggggcatatacctggccagggccgagttggattcctgctggctctcctgttcgccgaaaaccttcatcgaatacccttcggggagcaccacgccgcgcagaaccgaatcccgcagcgcagcgtagagccgcatggtgttgaccccgcggccggggtcgcactgcgccttcatgacccgctgacggttgtagcgtttcaccactccgacgcggtattcgaaacggaagccgtcggtcgcctgctcgatggagtagaccttgccggcgggggtgaagatcggcagagcctgcaggttggtgaggttgtaggtgtcgatattctcgtccttcagaaggatcggcatgaactggtcgccctcgcggtattcgccgaggcggtaaccctgcgtggcgatggtgatgccctgcgccatctggctgcgggtgacgccgatacgctgccccttcatctgcgagtaaagcggcagccacgtcgggacacggttgccccagctgttgcggatgttgaccgtgcctgtcgtgtgccacatgatctcttcggcggcctgcgtcaggcggcggagcgtgtcgatatcgtcgccgatgaagccgaattcgatcgccgcatcgggcacgggcgagagtttgaagagcgacgagcgcagccacacgtcggggcacatcgcccggacataggcgttgaaccgtgcctcgacagcttcggtctgccctttgtcgtgcagttcgacgaggatgttcccgaaattggggtgcagcgaaacgctgctgctggccaggtagtagcgcggcggcgtggaacccatcgtcaccgagacggtcttcacctcgggctgcgcatggagccactcttccatcgtgcgcaggttgcgttccgtgtcccggatattgtatccctcgggcaacagcacgtcggcacggaaatagggcttgtcgagcgacggaaagaaattctgaggcatgagacccattaccgccaatgccgccgcaaagagcgccgcgacacccgcgaccacaccccacctccatcgcagcagggcagccaggatgcggtcgaaagtgcggtagaatttcgtatcgtagggatcgtgcgcgacgggtttgacacgaagcatgaagtcgccgaagagcggcgtctgcgtcagggccagcacccagctcagcaacagcgacaaggccagcacgacgaacagcggcttgacgatctcggccacggacgacggcgccaggtagagcggcaggaacgagaaaatggcgatcagcgtcgcgccgagcaggctccagcgcggggcattcgccccgtcgacgaccgcacggcgccgcgcgacaccccgcagcatggcctgctgcgcgttgtcggtcaccacgatggcattgtccacgagcatccccatggcgatgatgaacccggcgagcgacgtacggttgagcccctcgcccaggaactgcatcagcagcagcgtacccccgatagagaacagcagcgagctgccgatgagcaccccggcgcggaaacccatgacgagcatgatgatcaggatgacgatcgccaccgactcggcgaggttcagcacgaaggtcgcattggcctgctgcgcgatgcggttctcgggataaagcaccgtaagatccatgccgacgggcatctggcgcatgaggccgtcaagcacgcggatgatcttctccccggttttcaccacgtcgacctgcgcctcggttgaaatgccgatgcccacggcacggcggccgtcgacgcgcatgagcgtctgcggcgggtcggcatagccccgttcgacgcgggcgatgtcgcccaggcggtattgcttgccagaggcggcggtcagcatctggttcgaaatatcgtcgaggcccttgtaggttccggcctcgagaatctgtatctggagcgccccggcctgtttctcgccgctgttgacgatggtgttctgctggccgatggtcgccacgatcgtctcggggcggatagcgaagttggcaagcgctgcaaggttgacatagacgttcacgacgggcgtctgctcgccgaaaagactcaccttctgcacgccgtcgaccgtcacgagcgccgtcttgatccgctgtgcccagtcgcgcaactccgcccaggtgaaacccccgtcgaccgacaggccgtaatagataccgtagacgtcgccgaaatcgtcggccacggtcacgggcgaagccccggtaggcagccggggctggatgttgagtaccttgcgccgcagttcatcccacaactggggtatctcggaagcacgggtcgcagggtctaattcgaccaggatcttcgacagtccgtaataggattcggacgtgattttatgcacgaggcgcatcgactgcacctcgcgctcgatcggttcggtcacaagctgttcgacttcgagcggcgtggcgcccgggtaggagcagaccagcgacgcactcttgatgacgaataccgagtcctccttttttcccagcgtaacgaagcccaaggctccgcccgccagcaggatgaaaaggaaaaaccaaacgacttttctgttcttcaatgaatattcgggcaggctcatcgtcgcatcagtttaagattctcacccgttcgccctgccgcaactggtaaaccccggccgtgacgacccgctcacccggttccaccccgctgtcgaccacgacccggtcacggccgtacaactcgcccagggtcacggcccggcgctcgacacggtcgccgccgatcaccacccagacgtaagtgccgccttcggccggggcataaacggccgagacgggcagggataccgcatccgtgacgggatcggcgctctgcatcgtgaccatgcacgacatgccgggcgaaatcgaataacgcccggtgtcgacatccgtaaggcgcagcgacacggggaaccccgaagcatcggacgatgtcttggcatagtccttcagcacggcggggaacttgacgccccggtagttgtcgaactcgacctcgaagcgggtcgaaggcgacgacaggagcgacaggccgctttcgggcatggtgaattgcactttggtcgtcaccgggttcacgacgcgaacgatggactgcccggcctgcacgcgttcgtagttgtcgacgaacttgcgttccacgacgctggcgaaaggcgcacggagcttggtctccttgagcaggtcgagggaattttcataggctgacttggcttgtgcgaaacgggtctgggcgctttcgaactcctggcgggatacggcttcgtgctccaacaaccgctgcatacgctgcatctgcgaacgggcctcctcgaaagccgaccggtcggccgaaacctgcaattcgatatcccggggatcgagttcggccagcagcgcccctttcttgacgctttcaccctgcgcgacggggacatcgagcacctgccccgggagcttgaaggcgaggttcacggcgtcatcgggcgtcgccagccctgcgaagtccttgtcgatgaccgccgcaccggctgccgtggtgactttgacgggacgcacggtctggggcacaggctggcgccgggcgcaagcgcccaggagaaagactacgattaaaacatggaaagttcgcataataagaaagttgactccgttcccggggtcaactttcataccacatgccgcaaaatgtccctacggacgaatatcgcgacaattctttttagcacggatcacgccgtcctccagcaccaccatgccgttgttggcgcgcagcatggtcttcatggtcgaagcgtctatgttatagcaccgtacatcccccgaaccgaaatcgtggtaagtgaccccgtacaacggctgcggggtaaggcagacgacgcgggccccctcctccgcggcccgccgcacgaccttggcgaaccgcttggcgcaaccgcgcggcaggcggtcgaacgacgtaacgcagagcatatacacgcgcccgggagcggtcacgatctcctcggtcgcatccccttcggcatcgcgcagggagaattcgctcatgagcgggcggatggcgggcatctcgtccgtagtccgggtatcgacccactcccatttttcggcatcctgccaggccgtgtcgtcgagcgaaaactcgcgcagcttgcccgtcttgatgttgcggtagaccagtacggtctccgtttcgccgggctcgacgaccggggcgtgcatcccctcccagatattgaccccgaccttatagggcaggaagtcgatcagcggcaggtggcggtagcaatagtatcccagatacatcgtgaggaagaaaaaggtgacggtaagcacgatttccagggggttgaaggcgaagatcttgtcggggcggtaacgccaccagaccaccagggccatcggcagcagcgccagattcttgtagaaagtctgccacggcgtcagcttcagcgcctcgccgaaacaaccgcagtcctcgacggggatcaccgtagcgctgagcagggtgagggcggtaaaaaagagcatggaaagcacggcgaagatcgagatcaggcggatacgcaccttgaacaagagcatacagcccatcatcatctcggcaccgcacaaccagatcgaaaaggccatgctcgccccctggagggattccatgccgtagatcgagaggtactcgttgaccttcatagcggtgccccacggatcgatgaccttcgtgaagcccgacacgatgaacgtgcaggcaaggatcagccggcagacattggccagcagtttaaaggccctggacttccgcatcggcttcgagtattggtgccagctgggcacatattttagcaaaaataccctccggggaatccatcgcccccgcaggatcgctgcaatcgacgacccgtagcgcggggtctttggccgcggcttcgaggtatacgctgcgcacggcctgttgcaaggcgagcgacgcctcgtggatgtcctgtccgccctgcaggtactcgcggtcatcgccctcgcgcagctcggaaagtttgcgctcggtaaaggtgaacggcacgtcgaggaacaaggacacgtcgggacgcggcaggccgttatgacagaattcgaggtataggatccagtcggccaatcggttgcgttcttctccggcgggcagcttggcgcactggaaacccacgttcgaatagacatagcggtcgaggatgaccgccttgccctgcgcgagccactccctgatccggggggcggcatcggcacggtcgcccgcgaagagcagcgccacgagataggggtcgacctcacccacgccgccaaactcgccgcgcaggaaacgggctatcagctcgccgtagacgggcgaatcgaaacgcgggaagtgcacatactcgctctcgacgcccctgtcggcaaaaaaacggcgcaacatgcggatttgggtcgatttaccggccccgtccaatccttcgagtactatgaacataggttaattcctgattatttaagtttttatccttcaataagtcgcccggcccgctatccgcgcagcatccgcaccgcgcgttccacgccgccggccagcgcatcggcctcggccagcgtattgtagagcgcgaacgaagcgcggcacatccccgtcgtggagaaatgcgtcatggtgggttcggcacagtgctgcccggtacggacggctatgcccagcttgtcgaggatcatgcccatgtcgtagggatgcacaccttcgacgttgaacgacacgatggcacatttgccgggcgtcgtaccgtaaatccgcagcccgtcgacggccgaaagccgttcggtcgcacggtgcagcagtgccgcctcgtgcgcctcgacctcggccgggtcgaaacgcccgacgaatttcacggcttcgcccagggcgatggccccggtgaaattggccgtaccggcttcgaacttgagcggcacgggggcataggtggtcttggcgaaggtcacggtatcgaccatatcgcccccgccgaggaacggcggcatggcttcgagcagcgcacgtttgccatacagcacgccgatgcccgtcgggccgaagagcttatgccccgagaaggcatagaagtcgcaatccaaagcctgcacgtcgacaccgccgtgcacgacaccctggcatccgtccaccacggcgatcgcccccacggcatgtgccgcgtcgatgacgggccgcaggtcgggacgcgttccgagcgtattcgaagcctgcgtaacggcgacgatgcgggtcttgtcatccagcagcgacggcagcagttcggtgcacaggcgcccctcgtcgtcgaagggcaggacgcagatttccgcccccttgcgttcggcgagcatctgccagggcacgatgttggagtgatgctccatctcgctgacaaggatattgtcgcccgcacggacgaacttttcaccccaggcataggccaccgtattgagcgaagccgtagcgccggccgtaaaaatgacctcttccttttcggcagcgccgataaaggcgccgatccgttcgcgtgccgcctcgtaaagcgtggtggcctcttccgaaagatagtgcaccccgcggtgtatattggcgttgagtccgcgctgcaggtaatcgaccatctcgatcacggccagcggtttctgcgccgtggcgccgctgtcgaggtaaaccagcggcttgccgtagacctcgcgccccagaatcgggaactccccgcgtattttttcaacgtcgaacatcgttatgatttttccagtttggcaaccaccgcctccatcgccgcctcgcacagcggttcgatgccgcagcggcgtacgacatcgcccacgaagccctcgatctgcaaccgccgcgcctgggcttcgctcaggccgcgctgccgcatatagagaatcgcctcggaatccatttgtcccaccgtcgcgccgtgcgagcatttcacgtcatcggcatagatctccagctggggctgggtcgtaatacgcgccgtctcgctgagcaggatgttacggttctgctgctgcgcatcggtgcgctgggcgtcgggcgccacatagaccagcccacagaactcccctacggccgtgccgcccgcgacaccttttatataagagttgctgcggcagtcgggcacgttgtggttcgtccgcagcctgacgacgcaatgctcctgcccggcggcgaggaacgctccgcccaacaggctttcggcacccggcccgtcgagatcgaccgtataggaggcattggcgctcgaaagctgcaccgccgtgatatggcaaaggctgcgggcagcctgtttcacggtcacctccgcaaaggcttcggaaacgaataactcggtcaatacgaagcgtgcgccctcctccagcacgatctccagggccgacacctcgggcgaagtatggagcacggccagccgcagcgaagcccccgccgcaacctcgacacgcatacgccggggatcgaccgcagcgaaaggctcgctctccgccccggcaacccggaacacttcaccctcggccgtgcggaacccgcgaattatatcgtaaagcgccgtcattccctgtaatcgttaatcagccagtcgtagccctccttttcgagcttgagggccagcgtcttgtcgcccgtatggataatgcgccccttgtagagcacatgcaccacgtcgggcacgatgtaatccagcaggcgttggtagtgcgtgatgaccaccgtggcattctggggcgtatggagtttcgtaacgcccgtggcgacgatgcgaagggcgtcgatgtcgagtcccgagtcggtctcgtcgaggatcgccagtttcgggtcgagcatcgccatctggaaaatctcgtttttcttcttctcaccgcccgagaagccttcgttcacggcacgcgacgtgagcttcgcatcgagctccacgacagcgctcttctcgcgcatcaggcgcaggaactcggcggccgtcagcggctcctcgccgcggaacttgcgctgttcgttcacggccagcttcatgaaattggccatcgtgacgcccggtatctcgaccgggtactggaagccgaggaacaggccgaggcgcgcccggtcttcgatcggcatgtccagcagatcctgccccaggaacgtcgccgaaccttcagtgacggtgaacttttcattgcccgcgagcaccgccgcgagcgtcgacttgcccgaaccgttggggcccatgatggcatgcacctcgccggctccgacctcgaggtcgatgccccgcaggatctccttgccgtcgacggacgcatgcagattttttacgcttaacatatctttccttttttatatccggttatccgaccgaaccctcgaggcttatcgaaagcagtttctgcgcctcgacggcaaattccatcggcagtttggccagcacctcgcgggcgtagccgttgacgatcagccccacggcgtcctcggtcgaaagcccgcgctggttgcagtagaaaagctggtcgtcggaaatcttcgacgtggtggcttcgtgttcgaccacggccgtgcggttgcggctgtcgatcaccgggaaggtgtgtgcgccgcacttgtcgccgatcagcaacgagtcgcactgcgaatagttgcgggcgttctccgcccccttggccatgcgcaccagcccgcggtaggagttctcgctccgccctgccgagatacctttcgagacgatgcggctgcgggtgttgcggccgatgtggatcatcttcgtaccggtatcggcctgctggaagttgttggtcatggccaccgagtaaaactcaccgaccgaattgtcgcccgcgaggatgcagctcgggtatttccaggtgatggccgagccggtctccacctgcgtccacgacaggcgggcgttttcgcggcagatgccgcgtttggtcacgaaattatagatgccgccccgcccctgcttgtcgccgggataccagttctgcaccgtggagtatttgacctcggcgtccttctcgacgatgatctcgaccacggcggcatgcaactggttctcgtcgcggcgcggggccgtacagccttcgaggtagctcacgtaagccccttcgtcggccacgatcagcgtacgttcgaactgtcccgtccccgccgcattgatccggaaataggtcgacagctccatcgggcagcggacaccccgggggatgtagcaaaacgatccgtcggagaagaccgcggcattgagcgccgcatagaaattgtcggtataggggacgacgctgcccaggtatttcttcaccaggtcggggaagtcgcgcagcgcctcggagatcgaacagaagatgatgcccttttcggccagcacctccttgaacgtcgtcttgaccgacaccgagtccatcacggcgtcgaccgccacgcccgccagcgccatctgctcttcgagggggatgcccagtttgtcgaacgtgcgtttgagctcggggtcgacctcgtccatcgaattgagttttttctgcggcttgggggcggcgtaatagatgatgtcctgaaaatctatttcaggaatcgtcaggtgcgcccacgtcgggggttccaacgtcagccagtggcggtaagccgccacgcgccgctcggtcatccacgcgggctcgcctttcttggcggagatcagacgtaccacctcctcgttcagacccttaccgatggtttcggtctcgatgtccgtggtgaagccgtacttgtattcctgctctcctatattctccagtatgtctttatctttctctgccattatgagcgaaatatcacacaaaggtacaaaatctaaatgcaatttcataatacggcaaagcaaatccgacaccagagcaggcaaaacggcaaaaaagagatgtgaattttcgacgcccgtgcaacggatgccgccgccgacaggccgtatcggcgggacgcagccttcggccacgggggctccatgccgcggggcctcccccggcagaatgcagggcgaaaacttttctccggtttttatttggtaattccccttttttgatttacttttgtcccgcttaacgatagcaatatttagttttagctgcccggagagttgggtgagtggctgaaaccaccagtttgctaaactgacgtacgggattactgtaccgggggttcgaatcccccactctccgcgaaatcgagcgaaacccctgcaaattaacatttgcaggggtttccatttccggggtgccgtccaacggaaaaaaaggaaaaaacctcggacaaaccccgatatgccgggcttggatgccttcagcaacgcccttccccatcgcggtacgacctttgcagcacactttccaaaaaagaaccgatgaaaaacaccgaccaacaccatccgtcctgccggcaagaggcagcgcaggccgacgtaagacaatcgcaaggcatgcaggaaatccccgtcacccagatcaccccggacgacatactcgccgacggcggccccatcacccctgccaccgaagacggaacgcctacgcagcggcaaatagagcaggacgtggtgagcgtcaatccctcggctgacagcatggaaagccggggttgaatttcccgtccgggttttccccgtcgttcttacaggtttccggcggtgctttccggacggaaaccggattgaaacatctatccccgaggccgaaaaatttgagaaaacgggcgtaatttgttatatttgtgatgacaacccatatattcggaagattcagtcgcaaatatacaacattcagtccgcaaatgcggcatcggggatatgacaatcgaaaaactggacggaacttcgcctcgcctctacacactcgtcgcacctctggtcatgcggcgcagcgtattgcgccagaacaacaactatccgttctggacttcgcgttcgcatacgtggttcgtcgcctgggaaggtgaaaatgtttacggattcgtgccggtggagattaccgacggcgggatcgcaaggatcaacaactactatgtctcgggcgacaacccgcaactgctcgcacggttcctgcgggaggtcgtccagtattacggccgcgactatacgatacgttccgtcacgctgatccgccatgcggagatattctgcaccgagggattcgccgcaatccgggaatggaagcaatacgtcgcgatgcagtacgacaataaacggccgcagccatgaatgtctacgagcggacacagcaacggctgaaaaccgtcttcgagctcttcgacgacatctatgtctccttctcgggcggcaaggacagcggcgtgctgctcaacctgtgcatcgactacatacggcggcaccatctgaaacgccgcatcggggtattccacatggactacgagatacagtaccgcgacacggtcgactatgtcgaccggacgctggccgcgaacgccgacatactcgacgtctaccgggtctgcgtgccgttcaaggtacaaacctgcacatcgatgttccggcattactggcgcccgtgggaagagtccaagcgggagctgtgggtgcgtgagatgcctgcgggctgcctcacgcaccgcgacttcccgttcttcagggacgacatgtgggactacgaattccagaattgctttgccgagtggctccacgcccgcaaccgggcggcacgcacgtgctgcctgatcggcatccgcacgcaggagagtttcaaccgctggcgcaccatatacagcgaccgcaaccaccaccgattttcgggcaagcggtggatacgccaatgggtcggcggcggaatctgcaacgcctacccgctctacgactggctcacgaccgacatctggacggccaacggtcggttcggctggccctacaaccgtatttacgacctcttctacatggccggcgtaccgctggagagccaacgcgtagccagccctttcatctcgcaggcgatttcgagcctgcatctctacaaggccatcgacccggacacgtggggccgcatgatcggccgggtcaacggcgccaacttcgcggcgctgtacggccggacggctgccaccggctggcaatcggtcaagctgccgaaagggatgacctgggaaggttacatgcatttcctgctctcgacgcttccggagcggacacggaataactacctcgaaaagctctccgtaagcatccgtttctggcgcgaaaaaggcgggtgcctccccgacgaaaccatcgcaaagctgcaaaaggcgggtatccggattgaaatcggcggcaagagcgcctaccggacggacaaacgtccggtgcgcatggaatacctcgacgacatagaccttccggaattcagccggctgccgacgttcaagcggatctgcatttgcatcctgaagaacgaccatgcctgcaaatacatgggattctcgccgaacaaaagcgagacgcagcgccgaaataaaatcatggaaaaatatgaatcgttactgcaaccctccgacaaaagcaacgtaccggagccctgtctatgacgtcaaagccgtgccggtggagaaagtcgtggcgaacagctacaaccccaacgtcgtagccccgcccgaaatgaaactgctggagctgtcgatctgggaggacggctacacgatgccgtgcgtttgttattacgatgccgaaaaggatctctacgaactggtggacggctaccaccgctacctggtgctcaagcggtcgaaacgcatctacgaacgggagaggggcctgctgcccgtggcggtgatcgaaaaggacatctcgaaccgcatggcctcgaccatccgccacaaccgggcgcgcggcacacacaacgtagagctgatgagcgaaatcgtcgccgagctgacgcgggcacagatgtccgaccagtggatcatgcgccacatcggcatggatcgcgacgaactgctgcgcctgaaacagatcacggggctcgccgaactcttcgcagacaaggagttcagccccggcgataccgaggacgaggccgtggagcccgccaggatcatgcgctgagcaccgcgtcacgacgtgttcgggacggatgcggagaaccggcacgggatacagtccctaacgatcaccccggggaaaacgacgtcgcacggcccgttgatttgtcccccgggcatattatattatgcggacaagccggaggtttggaatagttattgataattttcgcaccacaatacgaaattccgaaccccaagatgttaaaggaaggatttcttttcacgttcatatccgccttcatggcgttgtttccggtggcgaaccccgtcggtgcgggcttcctggtcaacgggctgctgtcggggctggacgatgaagaccgcaagtcaatcatccggaggatcatcaccgactatctgctcgtcgggctgggcagcctggccgtcgggcatttcgtgctgacgctcttcgggctctcgctgccggtgatccagctgggcggcgggttgctgatctgccgtaccgccctgcaatggctcagcgactcggactcctcggtggggcacgcgcagggcaaggatgtcaacccgctccacaaaatagccctcgaatcgcaggtcttctacccgatcaccttcccgatcagcatcggcccgggcagcgtctcggtcatcctgacgctgatggcctcggtgagcatgaaggacggctgggccaaagggctgctctcctatgcgatcatcgcgctggtaatcgtgctgatctgcctgatcctctacctgttcctgtcgcagggcgagcgcatcatacggaaaatcggcaccagcggcagcatcgtcatcaacaagatggtcgccttcttcaccttctgcgtcggcgtgcagatcgtcgtgacgggcatcgccaaattattccacctgcacatataaccgaaaaccgagccggcaattgacgcgcccgcacgaagttgtccggcaggcaacccgtaaaaacgatttatttttcttattttgcgggccgaaataaactatgtaactatgtcattctggtctcgactcttcggcccggatcacaagccccggatgggcgggttggagattttcaaatacatcggcccgggactgctcgtcaccgtggggttcatcgaccccggcaactgggcttcaaacctggccgcaggcgcacaatacggatacacgctgctatggatggtgacgctctcaaccgtgatgctgatcgtattgcagcacaacgtcgcacacctcggcatcgccacgggcctctgcctgtcggaagcggcatctgcatacctcaaacccgcatggtcgcgcccgttgctgggttcggccgtgctggcgtcgatctccacctcgctggccgaaatcctgggcggggcgatcgcattgcaaatgctgttcggcgtaccggtgcgcatcggcgcgctgctggtactcgtgttcgtggtcgtcatgctcttcaccaacagctaccggctgatcgaaaaatggatcatcgccttcgtctcggtcatcgggctgtcgttcatctacgaactgtcgctggtgacgatcgactggccgcaagccgcccgggcatgggtgacgccctcgtttcccgaaggttcgatggtcatcgtcatgagcgtattgggcgcagtggtaatgccccacaacctgttccttcattcggaggtgatccagagccgccagtggaacctgagcgacgacgcggtcatccgcagacaactgcgctacgaatacgcagacacgatcttctcgatgctggtgggctgggcgatcaacagcgcgatgatcctgctggccgcagcgaccttcttcgcgacgaaaacccccgtagaggagttgcagcaggccgattcgctcctgcaaccgctcctggggcgaagcgcgacgcagatctttgccgtcgccctgctcttcgcggggatctcctcgacgatcacctcggggatggccgcgggctcgatcttcgccgggatattcaaagagccctacgacatcagggacaaccactcccggacgggcgtgatggtttcgctggtcgccgcattcctgatcatcctgctgatcggcgacccgttcaaagggcttatctactcccagatgatactcagcatccagctgcccttcacggtcttcctgcaggtacacctgacctcttcggagcgtgtgatgggcaaataccggaactcgcggttcaccaaatacctgctctacgggatcggggccgtagtgaccgtcctgaatgtaatgctgctcgtcagtttcttccggtaggcgcagcacggcgtccggcggggatatgcgatatatgtcccccggcaacggctgtggcagccgcttaggcaccgcccgggcagctgggtgaaatcaaaaaaagacgattgagacctcgaataagcccgtttatcgggggaattgctgttgtgcaattatcggatttttagtaacttgccacgattttacgggctgcacgtaaaaccaagagcgctttcacgcaccaacacattgtattatacgtcgttacaatacacgacactatattttaatgctgaaaaagatcatcaaatatacgctacgcgcgctgctcgtcgtcctcgtcgtcctgatactggttcccaccctgctctacataccggccgtacaggatttcgttcggaagcacgcggtcggctatgcctcgcgggcgctcgggatggatttgtccgtcgaacgtctccggctctcctttccgctccggttgtcggtggacaacacgctgctggtcgacaaggccgatacgctcctcagctgcggcaggctctcgctggatgtcgccctgtggcccctggttcggaaagaggtcgtcatccggagcttcgggctggagcgggtcgccgcccgctacaaggattcgctggcgggcatggacatgcgcctttcggcgggtctgttgtccctggatgcggccaaggccgacctctcggcaaatacggcaggcatcgccagcctcgtcctgtcggatgccgatgtccggctggacataacgcaagcggctccgaaagaggaagcggacagcacggccgcactgccgtggacgatcggcatcgggaaactctcggtgggaaacctggctttcgggatgcggacggcacctgccgtatcggaactctccgtccgcctggccgaaggcacggtggatgaatgccgggtacggctcgacagccagcaggtatccgtgaaaagcgtactgctgaaccggggcggctactcctacctgacagggccggcagtgcccggaaaagagaaacaggaggcagctcccgtccccggcggcagcacgccgtcgctcccctggacggttcgggtcggcagcgtcgtgctgaccggcaaccgggcggaatacgggctgctgaaccatcgtcccgcagcgggattcgacccgtcgttcatcgccctctcgacgctcgacctggcggtcgattcgatctacaaccggggtgcggacatagccctgcaaatccgccgcatggcgttcaccgagcgcagcgggctcacggtgagcgacatgaccggggacatcggcatggacgcctcgggcatatcccttgccggcgtcaccctgaaaacgcccttttcccggatcgaggccaacatctccgccggggaggggattctggcactggctccggattcgccgctcaaggcagcgctcacggccgacgtgaacaccaaagacctaaaatacctctatccggcgctgataccgcccgtgctcgacggacgtatcgtcagcctggcgctcaccgcagcggggacgctgggcgacatcggaaaagccgggctggacatctcctcgcccggacacgtcgcattcacggcggacggggcggcgagaaacgtgctcgatcccggccgcatggaggcttccgcacggttcgaaggcgatttcagggatatggcgttcctcgaagcgctgttgcccgactccgccctgcggcggcgcatagcgattcccgaccgcatccggctccgcggaacggccggcgcagacaaaggggcgttctcggccgcttcgacgctctcggccgacggcggggagatagccctgcaaggccggctggatacccgcagcgaggcctatggcatcgaattacggtgcgacagcttcccgttgaacagttttttgccggccgattcgctgggccttatagacctggcgctgcaggccgggggcagcggattcgatccgctccgggcgcagacccgggggaacatccgcctgcaggttgaccgggcggagttccgcggcagggatttcggaggcgtggagctgaacgcaaacctcgaaggagggcagctttccggccgcctgtccgaccgtgacgaggcgctgcggctgttgctgctggtctcgggcacgctgaccgaacggaaacaggaagtcaggctcacgggcaacgtctttgatttcgacctggcagagctgggaatctccccgcagaaaatcggcgggtcgttcgcgctggaggccggggcgtccgcctcggacgccggcagctatacggcccggatagccctggacagcatcgaggtcagaacccggcaccgcacagaccgcatccgtccgacgagcctgtcattgagctccgacacgacggcgacgcgggccaaactggcatccggcgacctgtcgctggcattcgtctcccccgggcccgtggactcgctggttccggccctgacgcggagcgccgacatactcgcacagcaaatacggacacaaagcgtcgacatggagaccctgaaacccgcattgcccgatttcagcctgagtgtcacggccggacgcgaaaatatcctgaataattttctgaaaacaaaaaaggtgtcgttcggcgcgctggacatcgaaggcgtgaattgcgactcactgccggtatccctccggataaaggcggagaggctggcctggggaggcgtcgtcctcgacacgctgacggcaggcatcgcgcaggacggccgccggctggattatttcctccgcacggcgaacgtcccggggaacctggacaacgtagccctcgcagggctgtacggccatgtggccggaaataggggccaggtaaacctctgccagaaaaaccgggcgggacgcgaggggttccgcttcgggctggatgtcgaatggaacgacagcctggtcagggcgggtgtaacgccgcccgacccggtattcgggtacgaaccctggacggtaaaccccggcaattacctcgtttacaggtatggcaaaagcatcgacgccgacctcgacatgaggcacggcgaccagcggttcgcaatccaaacggtttccggagagggggcgtccgacgacatccggctggacatcgcgggcctgaacatcggttccgcactggggctgctgccctccgccccgcccgtcgacggcgtattgggtacggaaatgacgctgggcatgacgcccgacagcctgaccctgcgcggcgacctgtccatcgcggaactgtcgtacgacaaacggcgcttcggcaacatcgacttcggactctattacaagcaggatcagggacatgtggccgatgcgcggctgacgctcgacggcgccgaggtactgaccgtccggggagattaccgcgcagagcgcgaaagcccgctcgacctcacggcgacgatccccggattcccgttacagcaggccaacgtgttcctgcccgacgacctcatccgcctctccggccggttgcaggcgaaaatccacgcaggaggcaccgctaaccggccgaggctggacgggggcgtgcacttcgcacagaccgaaatccgcgtaccgatgatcggcacgtcgttccggttgtcgtccgacacgatccgcatcgacgacagccgcgtcatattcgacgactacacgctcctcgccccgaacagcaagccgctgacgatcggcggcgaggccgacctggccgatttcagccgcatgacggccgacatcgcgctccgggcgtcggatttccaggtagtcgacgtagcccggaaggatggtacggccgtctacggaaaggcctacctcgacctggacgcgacggccaaaggccccctggacgaactcgtcgtccgcggcaacgtggccctgctgggcggaacggacatcaactacgtcatgcaggactccccgatggacgtgaaggagcgtccgcaaaacatcgtgacgttcgtctcgttccgggaactggactcccagggacaggaagagacatcgcaggcaatacgcatcggaggcatggacgtgctggtgaatgtcgacatcaacaacgacgtacaggcggccgtagacctttcggcggacggcaacaaccggatcgacctgaagggaggcggcaacctgacctataccatgaatccgctgggcgacgtccgcctgtcggggaaatacgtgctttcgggcggaagcgtacgctacaatccgcccgtcatctcccaaaaaatcttcaagatcacgccggacagctatgtcgaatggatagggaacatcgccgacccggctttcaacatcacggccgtggagaccgtacgtgccaatgtctcctcggacgggcaggacaaccgtacggtgaatttcgatatctccatcaacatccgcaattcgctcgacaacctggaggtcagcttcggactttctgcccccgaagacctcaccatgcagaaccagttgaattcgctcacggccgagcaacgcgccaaccaggctatgaacctgctgatatacaacacctacacgggccccggaaccacggcgaaggtcaactctgagaacccgctcaactcgtttatccagaaggagctgaaccagtgggcgcagaacaacctgaagggcgtagacctgagcttcggcatcaactcctacggcgaggacgaccccaacggccagcgcaccgactactcctaccggttgtccaaaaacctgttcagcaaccgcgtgcgcgccgtcatcggaggcaagttcagcacggacgccgacccgtcgcagaacctcaaggagaacctgatcgacgatatttcgctggaatacatgctgaccaagcgcgacaacatgtacctgaaagtattccgccataccgggtacgaaagcatcctcgaaggcgaaatcaccgaaacgggcgtgggcttcgtgattcggaaaaaactgctgaggctgggcgacctgttcaagtcgacgaaacccaaagcgaaaaaacagaaacgagatgaggccggcacacattagaaatacctgcatcctggtttgcgccgtgctgtcggtagcggcctgctccaccacccgccggctggggtcggacgaggtgttgtatacgggcgtgaagaaaatccggatcgaacccgactcgggcgtcgtgctctccgccgcagccgaatcggccgtgaaggaaccgctgtcggtcgccccgaacaacccgctttacagcccctatatccgcaccccgctgccgatcgggctgtgggcttacaactatctctacacgcccagggaaaagggattcaaatactggttattcaaacggctggccaaacagcccgtgctgatctcgaaggtgcagccccggctccggacgaaggtcgcggaacaggtgctcgaaaattacggctatttcggctcgcacgccgcagactccctgctctaccgcaaacacgggcggaaggcaaaggtgtactatacgctcggcatagcgccgccctggcactattcgaagatcgcctacccggaggtggacagcggcatggagtatctcatggacagcctccgggccacgtccctgctccgcgtgggggcgcagtacaacatggacagcctcacactcgaacgcaaacgcatctcccaagtgctgcgcaacaggggatattactatttccgtcccgaatacctggaatacctggccgatacgacctccggtctgcggcaggtcgacctgcgcctgaacctcaagcccaacctgccggaggtggcgctcaagccctaccgggtgggcggcatcacggtgcggctgacgaacatcaaacccggcccgacggacacgctccgcctgcgcaatgcgacggtcatcgcccagaagccggtgaaaatccgccccaggatcctgtccagggccctcacgctccgaagcgggcagctcttcacggtagatgcccagaaccgcacgcagaccgacctcaacaagctgggcattttccgttccgtcaacctgagcgtcacgccgctcgactcgctgcggggctccgacacgctggacgtcgctatcgacgcgcagttcgactatccgctggaagccgccctggaaacggacgtaacctcgaagtcgaacagcttcatcggccccggcatcaccttcaaggtcagcaacaacaacctgttccggggcggcgaagtcctcgccctgaaactgaacggctcgtacgaatggcagacgggcaacaaaaactccggcggccgttcctcacggctcaactcctatgaactgggactgaatgcgaacctcagcattccgcggctgttgctgccgtcgttcatcacgcgcaggctgaaataccccgggagcacgacgttccaactcggggtcgacctgatgaaccgccccagcttcttccggctgatcgcgttcagcggctcggcgggatacaatttccagacctcgccttacagccgccattcgctgaccgtattcaaactcacctacaacaagctgctgcacacgaccgaagccttcgacaagacgatggacgagaacccggccatcgccatgagtttccgcaaccagttcgtaccgtcgatcaactatacctatacgttcgacaagacctacggcagcaccggcaaccgccgcttctactggcagaacagcgtcacctcggccgggaacctcctctcgggcatcctgagcctgttcggcgaaaaacagccccagcatctgttcggaaaccgcttttcgcagtttgtcaaggaggtgagcgaagtgaagttctaccaccgcatcgggcgccggaacaactggctggcgacgcggctgctcgtcggcgtgggatatgcctacgggaattccgaggtgatgccgtacagcgaacagttctacatcgggggcgccaacagcatccgcgccttcacgatccggtcgctcgggccgggcagctaccgtcccccggtggacgaccgcaacggctatctcgaccagacgggcgatttcaagctggaggccaacgtcgaataccgcttcggcatcatgggacgcctgaacggcgccgttttcctcgacgccgggaatatctggctgctgaaaaaagaccccaaacgccccggtgcggaactgaaatggaaagggctgctcaatgaaatcgcgctgggcaccggattcgggttgcgttacgacatcagctacctggtcatccgtgccgacctcggaatcggcatccacaccccttaccccaatcccgacaagacggggtattacaacatctccagtttcaaggacgggctcgggttccacctggcgatcggctatccgttctaaagtgcgggcaggtcatccttacgaatacgaacaggccggctggtaataccagccggcctgttccatatctgtccttctttctgtcgggaacggatttcccgccgcatggacaccgaatcagaagacgaacttttcgagtttcatctcgccgagctggtgcaggcgcggtacgagggtcgtgaaatgcgacgcctgctcgtgcgcggccagcgccttggcgtcgctccacgtctcgcagatcatcagcacatccttgcgcgtagtgctctcgaacaggtcataggccacgcagccttcgtccttgagcgaagccgccaccagttccttggccgtatttaccacttcctcgcggttggaatccgtcgtacggataaaaacattcaatcgtatcatttcgttctatttaattaagtttaaaaggctttcacggcctcgacggccgcatcgtaatcgggttcctcggtaatttcgggcacgagctgggtgtagaccaccttccccgccttgtcgatcaccaccacggcacgggcgagcaacccagccagcgggccgtcggccatcagcacgccataggcgccggcaaaacccgcagcacggaaatccgacgcgggaacaacgttagcgatgccctcggtcgtacagaaccgggactgcgcgaaaggcaggtctttcgacacggccacgacgaccgtgtcgggcagcgaagatgccagcttattgaattttcgcaccgaagtcgcacagacgcccgtatcgaggctgggaaatatgttcagcacgacgcgcttgcctttcaggtcgctgagtttcagcggggagaggtcgccccttaccaattcaaaatcgggagcctgggcgccggcccggatgaattcgccgtcgatatgcacgggcgtgcccttgaattttgtcgttgtcatcgtctttttatttttctgtcgtttcataaaacgtaaaaccggcaggtttattgtccggcaggcgacatgccgccaacggaaaccgtgcacggatgccgcaccacaaatttaattccttttcgggaagattccaacggctatttcatattcttttcaggtttaccgcccaactttgcagcgacttaaccgggtaagagcatattttttgtatttttgcccgaacccggccgaaacgaaacaaacagacagacaagaccgacatgaaaaagacactccttctgctcctgctgacatgtggttgtgcaatcgccgcagcacaggaacgctcgccgctgaggcaaaccgaattcatctccgccgattcgctcgaagacgaacacgaactgttggagcgcgtacgcaacatgcccaacctcgaagtcggcaagggcatcacgttccgccccaaaagcaactggttctcgctgacgatgcgcttccggatgcagaacatggtgggactctcgttcgacaaggatttcacgctcaccaagaccgatgcgcaggtcaagcgcctgcgcctgcgcttcgacgggtacatctattccccgaaactggtctattcggttcagctgggattcacctcctacgacacggaaccgctgcccaacggcaatatgaacattgtgcgcgacgcaatcgtctactacatccccagccccaagtggaacatcgggttcgggcagaccaagatcaaggccaaccgggcgcgcattaactcttcgagcgccctgcaattcgtcgaccgcagcatcgtcaacagcgagttcaacctcgaccgcgatttcgggttcttcggcgaatacaacatgcgcgggggcgagggcttcaacctctcggccaaaggttcggtgacgctgggcgaaggccgcaactggggcagttcgtccaacggcgggctcgcctacacgggacgtctggagctctacccgctggggcggttcaagtcgaaaggcgacgtgatggagggagatttcgaaggcgaggagcaggtcaagatactcgtggccggagcctactcctacaaccacaaggcatcgcgcctgaaaggccagcgcggcgccgtcatgccggacgacgcgacccgcaacatcggctcctatttcgcggatttcatcctcaaataccggagcttcgcattctataccgatttcatgggacgcagctgcgaccgaccgctgttcgacccccagagcaatgctttcgtatacagcgggcaggggctcaacatacagaccagctacctgttcgacaagaaatgggaggtcgccctgcgtaattcgacgctcttccccgagcacgaggtacaaccctttgcggggtacaagcgctggaaccagacgaccgtaggcatcacccgttacatcatcggccacagcctgaaagtacaggccgacatgtcgtacaaccaccgcagcgaatcgttcgaccccgactacaaccgctgggaaatccgcttccagctggagctggggctctgacccggcaacaggaaaataagaaaactcccggctgttgccgggagtttctgtttcgggacaggaaccccgttacaggattttcagcgcgatccgcgcgcacgcctcggcatcggccagggcatggtggtggttggcaaggtcgaaaccgcacgccgccgacacggtatggagctggtggttggacaggctgctgccgaacgtcctgcgcgaggcacggcacgtacaatagaaccggtagccgggataaggcatcccgtacaactcaaacacggcgcgcaggcacccctcgtcgaagggcgagttgtgcgccacgagcggcaacccctcgatgcggggtgcgatctgcttccacacgtcggcgaaatcgggcgcctgggccgtatcctcgtagctgaggccgtggatggccgtggtgaaacggctgtaaaaattaggacgcgggcggatcaggctgtaaagcgtgtcgaccacctcgccgccacgcaccacgacgacgcccaccgaacagatgctcgtacgccggccgttggccgtctcgaaatctatggctgcaaaatctttcatcggtcaggagtgaatatccttcgcaaagatacggattttaacgcttcccggtatcgccggcaacgaaaaaacggccgcctttcgagggcggccgtcgtttctgccggagcgggttattcggtatactcgtcgtccgacgtgtcgggcgtaacccatgaatcggccggggtcagctcctcgacctccgcctccgtcaggaaggcgtctttgtcgaacatgatgtcgtcgaaatagttgaccgtgcactggtaagcgccgtagttgtatgtccagtccttggagtagatgccgaagatggccatgatatcgcctttcgcgccgtcgcggacgacgggatactgggcgaaacgcgaataaccgctcgtgcgcaccgtatagacccccttcttgttggtcgtcgaaggcagggtgctgtcataggtgaaaagcaccgaaccgtaaaggttcgtaccgtcgttgctgaacgcccagcggtaccagaccttgttcatcaccggacggatgtcggtatacatccacgcgggatagatgttcgaccccaccgtcccgtaacggcacgtaacgccgcgcaggatcaccagacgcccgaaatactgctgcccgttctggccgaagaaatcgtcgcagttggcctcggtgacctcgaggatctccttgcccagctccagctgcgtctcctcgccgaggaacacgcgcttgcggatctccgtcgggtcttcgatgttcgagttggcatagaatttatgttcgcccaccttgttgtaggaatcggtaggcccctcgcccagcgacagcatcatgcggtagttgccgatatagagacccgagatcttgacatagacccagttcgaggggatcgtacccgtggccttgtcgaaacgccccatcggataggtaaaatagagccccgtagtgagcttcacctcgatggcacccgaatcgtccaccaggtagagcgacttgtagacgttaccctcctcgtcgctcgactgcaccttgcccttgatgtagtaatccagcccgtcgggcgactggccgatctgtacgtatttcgtatcgacccagcccgtgttgctgcccgtcttttcgagggtgtactttttgagaaaaatctgtttcacatcggcgatggagatatgcttcatccccgcgaaatcctcgtcggtatagactttggcaggcttcggcgcatcgaaatcattatagcaccccgtaaccgcaaacatcacggccagcacggcacataactgaaatatctttttcataatcgtcatatcgtattagaagcggaaatatacattcaggtaataggtcgtccccagcaggtaaaagtacttcgaatcgaacggcacgtaatactggatcggctgggcggccgcaccctccttgttcacataggtacggcgcgaaaggcgcatctgttcgtaaccgcccgtgcggatcgtctggtcgttgaggatattcttcacctcgaggctgaagcccagctggtagatgtggtggatataccagttcttgccgacgctcaggttgagcgtataggccgagtcgaatttctcctgatcgcgcaggttcatcagcgccgtgtatttcacggcgccgggaagctgtgccgcttcgtcgggacgcagtaccgtggcgtaagcggcacgggtacggcgcgcggggttcatcgagaggtagatacggtcgtaatagttgaaatcgaccgaggcgaaccagttgcgcgggccgcggtagctcaggccgaggttgagcgccgtctggggcgtgctttcgacgtagaggtcgtcccagagcaccttgtcgccgcggagcacctcctcgctgttgtcgcgcgtctgcgtgaagttggcgtccgacgtatagcggtagtcgcccaggctcagggcgccgttgaacgagatgccgccccagatgggaaccacgacgcccacttcgaggccgtagtaacgcttgtcgatgccgctcatggcgaagttggtgaacgacgactgcgtatcgtcatagtacgagatgaccttcgactggtcggcgaccgaggtatagtaacccgaaacgcgcgccgtgatccacggcaggttgaggttgtacgacaggtcgacgccgagtaccttctcggaatcgaggcccggcgtagtcgtattgcgggtacgcgccgaaacgaaagcgtcgcggaactgcgggggattgaccatgtaggccacattggcgtcgatggcatgcgcacccgagaaacggtacgagaactcgcccttgagcttgtaggtcaggtagtcgagcgtcttcgatttaccgagcgagttgttcgcgaagagtcccttgcgcagccggccgtcgcgccacatggccgtatagccgacctcgccgccgaggctcatcgtgaaaccgccgaacgaggcgtaatactgcgcccagacctgtgcctggcgcaggttggcgtagtaatcgtagctgaacttgtcgccttccccgacgcggcgggcctcgccgtgcttgaggtaataatccaggtcgttctgcgaaagcaacgggttgtagttgccgttgtcgcgcagagcgaacttatccacgtcgagccagtagtcggcgccgagcaggtctttcacctggtcatagtactccgtgcggttgatacgcgccgtcaggcctccgcgcagcacggactggttgcggaacgtatgggcgatgttggccgcgaagttgaaatcgcgctggtcggtatggcgctcctcgatcatgtagatgcccgaagccccggacttgttgcggttgtagttcatgcggaacatgttgtcgtaatccatcaggctcttgctggggtcggtgatccactcgcgcatcgaacgcagcgcaaggtcgttgtacgtccccagatccgaactctcgatgccctcggacaactggaggatacggttcgtgtagaaaacggtagtagtcggggcgcgggtcggggccatccgtccacgtcagggccgaatagccgttcttgccgaagcggaacgaagctgcggcggcaagtttggtattcgacgaaatgtcgaacccgtagttgagcatcacgatcggctcgtggtaatcgcgcacgcgcgagttgcgcagcttgccgtcctgcttgcccacattggggttgtaatagttgttactcaacaggtcgtaggcttcctgcgtcgacgcctgctgcgctccgcgctcggtcggtgcgcccaggatggtcagcgccaggttgtggcgatcgccgccgaaacgcttttcgaccgatgcgaagtaaccgtaggcattgtagtacaccccgtcgacataggagttgccgccctggcgggtcgagaacgagaaggcgtacgaccatccgttgtcgagcaggcccgaagcgtaggaaaccatcgcgcggaagcggtacatcgagttgccgttcacgacgctggcacggaagcccttgcgcatctgcgaagcgcgcgcattgacattggtcgtgccgccgatgccgtcgatgccgtagcccgacgagcgcagcccggcggtattctcctggttacgcgtggcgtcgttcaggccgctccacaacgaccaggggccatagcccgtcatggcatcgttgaaccggatgccgttcaggtagatgctcgaatactgcgagtcgtaaccgcgcacgttgaaacgcatctcgctgaatttatacgaggcgatgttgttgaagacatccttcgacgacgaaagcgacgaaggcagcgactgcccgtcggccgccgtatcggagtcgaactccgcgaacacggcatcgtcgatgacatactgcacatcgggggacatcaccaccgaattgaggttcttgaccatcttgtcgacacgaaccgccaggtcgaggttctcgaactcgggggcttcgaatttcaactggtattcccctttgggcaactggtcgatattgaaattaccgtggttgtcggtcatgacggtgacgccaagcggttcgacgaccaccttgacattgctcagtgcgacacggccgtcacgcgagacgaccttgcctttgacgcccccgtcctgggcatacgccccggcacaggccagcgtgagcaggataacaagtaaagctctgatcttcataattactttgttgggttatttaccgatgtaaatgaatacgggaaggtggtcgctgtatcccccctggaaattgttgcccacgaacgtacgcagcgggtagcccttgtactggccttcctgctggaacagataggggacacggaaaatattgccgtaatatttccccttgggggcacgctccagcttgagcgaacccgtcgagccggtagcgaggttctccgacacgacgatattgtcgaacaggttccactggtcgcggtaggcaagcgaaccgatgcccgccttcagcatgtcgataaagggattgtagtatccgcccggttggagcttgcggatgttgccttcggcgccgagcacctcggtgatgctcttgtcggtggcgtcgtcgttgaagtcacccatcatcacgaccttggtcgcggggttgatcgccagcaccgagtcggcggcatggcgcatgatctcggcggcgcgctcgcgcttgggcgccgaagcctccttgccgcccaggcgcgaaggccagtgggccaccatgaaatagaacggttccccgtcgatcgtcccccacatcgtcaccacgtcgcgcgtgcggaaattcggcaggctctccatcgtaaacgggatcggggcgctgccctcgagcttgaacacgtcgggacggtaatagaacgccacgtccacgccgcgggcatcgggcgaatcgtagtgcacgatgcggtaattggccggggcgagtttgggcgtagcgatcacgtcttccatgacattgcggttctcgatctccgaaacgccgatcaccaccgggtagtccttgttgatagcggcgatgtcgaacaacacgcgcgaaaggttattgatctttttggtgtacttgggcgtattccacttcttgggcccttcgggcgtaaactcctcgtcgtaaatctccgggttgcggatcgtatcgaagaggttttcgaagttgtagaaaacgaccttgtagggtttctgggcgaagcaggcgacgatcagcgctgcgaaaagcccggtaaaaagcagtttcttcatatagttcagattaatttataccccagtccgagggattgttctgtgccttcacgtcggcggcaatgtcctcgtcgagcatcgtaaagaatttatagcccgttttctcttcgatgtcggcgacgctcgtgatatattgttttatattcccggtcgtggttgaggaattttcagcccaataaccgattgccgccaattgcgatgcatcggtaatctggtcgatccgcttccccgtcctgccgcttttggtacgtagcagcaccttccagcaatactgtggaatcgcgacccgattcccccctttatccgtcgtatatccctgtaccccataagttcccgtaacattgtacaaggtatcgggatatgaaatatatttcagggtaagatcttccaaatccccccacgacccgctattaaaatcaggatcctgaggcataatattggtcgaatagaacgtctgctcattcaatagcgaagaatagctgacataacgatggtaggacatacactgatgcccgcggataggccgcccattatatgaaccgcggctcaaatcgacctgaaattcctccggcacttcaggatcgtatttccatgcattagaacgctcatattttccaacccggtaacaggaatggatcggataggcgacccagttggcgatacgtttcttcgtgtcgtagcaaatcgtaaagttacgtgccgtcacggtcgaagagagcggcgcataatgtgttacgtaacggtagtcgggagcttcgacataggcgggcaattccgcccacgcatgatccatcgatgccggaaccgagtagtccgcctggtcgatcgtcaacgtgaattcgtgtccgccgtcgaaaacgacatcgaccgcagcccggcgcgaagcgcccgtttcattatcgtccaggtagaggtaaatgacctcgcttgcggcgaccagctgcgccgatttggtcgtggcttgcgtcctgcgcgacgtccagcaccaactgccgccttcggtcacggtgacggtataagccgtacccacgggccccgtcagtacgagccggggatcggtcgcataacctttggcgtcgagcgtggtcgtctcggtttccatgaacaccgcggaaatattcgccggggtgccgtcgtcggaggaaccgcaccgcccgaaaaccagcaggagcgccccgagcaccatagcccgcccgaaaagtttcaataacccgtttgtcaaaatcatgtgggaatttgcagataaaaatgtcaggcagaaaaaccgacaatcatccccggcggaagccaatccgccggggatggattatcggaatcagagagttgctattcgctcaattcataaagggcgacagtaatataccctttacctatatttgaagttgcatatcctccaaaacgattgtcatactcagtgtctccatttcggtataggagtgcacgccccgtcacctcggaatctttaatcaaaaatgtccctgcagtttcttcatcagcaacccattttcttgatgatgcatcaacaattgccaactgcgtcttaccactactattattagcgtactcaataaatttgcctgctgtattttggatcgtatacgcaccgtcactcgctacaatggtaacagcatgggcattatttgccgcatttgcttcgatttttccatttgcaaccgtaatcgcaattccatcaaacaatttgctagcgttcaaccccgcagatgccggtaaaacagcatatttatctccattttcagccactatcaggtattttttacccgatgtaatagaggttacgcgcacatacccgcttcccactattttcccggcctgcgaaatcgcaacggttttggtatccacagccgcgccgtccttcatcagtttgatggtcagcgtggcggtgatagcctgctccgtcgtgttttccttgggcgtcacggttacgaccatcccgtttacggaggtcgtgaactgctccgatttatccgtagcggcttcgatcgtgcagccgtcggcattggcagccgtcaccgtcacggtcttggcattgtccgtcgcagcgaaagaaagcgacgtcgggtcgagcttggtaatcttcggttcagcgggtgcatcaccatccttttcgaccgatacggcaatcgtgctaagcatcttactctggttggtcatacctaacgtataacccttgacaataacaacctgtccattaagggaagcatcgacaaaaccatcggcgggatatgccagagagccctgcagatccgtaccttcgacagctatattatagtaatacccgtctatcgtaagcgtgcccgaatattcgatatatttaataacgggagtggctgccgcataggcatcgaaagcggctccgtcgaacttttcgggagtaggctgtgtgaaggaaccgtcagataccttttctattaccaggtcggtttcagagaactgtaccaacttactgtaagtagtcgtcttgccggtcaccttgacagtctggccaatcgtagcggaataatctaccacaggcttattatctttccatccaagatagaccagaatcttcccgctattgtcctgaatcaggaaactacgtccgttaatcgccacgacttgtccctgcgtagtataggtcgcgcctaccgaacccgcaatgacttcagcaatggtcttcgtttcagttacaggaggagtaatattgtccaggtcgacctccgtaccaccgatgccctcgaaaagtttcacgtcgtcgatacggtgtgcggatgtaagatccgaagtaaatttaatgtaaagttccgaaggcacctgtttcagcgtgaaattggccgtcgccaaagcccaggtaccgtagttagagtgctcgtcgtccccgacagggcggtcataggtaatttccgcccagttttcaccgtctttgctcagatatacatggaactccgaagtcttgaaggcattgtccttatcttcaaaaatactacggtatgaaccgaacgtaagttgaaggttcttctgggtagattcaagtgcgattttctgaatctcaaaaacaccgctcgttccgaaaaacatattgttgacaccggaagcgtcgtccttgtacttcgaatggctatcgttcgaaggcgaattcgaacgaacacttataccgctcgttttataagcaacattgtcggcacccgtaccagtctgattcttccagccctcgaatgcatctgcgaaggggaacttaccatctgcccccttttgagcctgctccttatcgaaatcgttagcatagatagcatcgcccgtgggggggggtgtaaccccgctgccgtactgtttcacggctacggacgactcggcctggccccatttgccgaattcggggtggataagcgtgaaggagatcttaccttcgcgcaggttcgtaccggcgggcagctcggaaaccgtaacggagatcgttccgttgcctttgccgctcatcggggaaatggtagcccaatccaggttacttgcagtaaccgtccattcgcagttcgccgtgatggcaacggtctgcgtcgtcgccgtctcatcggtgaaatcaagcgccgtcggatccgccgtcaacttcggcgtcagcgacttgtcatcgtcgtcggagcatcccgtaaatgccgtggcagccacaaggaaaaatgcaccgaagaccaacctaaaaagatgtttacctcaaatccgcaactacgcgcctaatatgatacagaagcgaaaagaatctgcatcgttagtaaaaagggggcacagtgcatcgaatgtcaccataaagacatataaatgccccttaccccaccatgcgacttgaggcaatacgcaaaatcacgactataagttgtcggtgttatccaaagtcattctggaacacattggcataagcattgttgcatgaatagatattcagcacatacttccttgatgtcctgacccatttggctggcacagagatgaacttaaagacaaacgtcttgatgcggcttgttgctttgagtccgaacctcttcacgtcaagcctcgccatgatgaatttatagaagttgcgtatgagtgccataagcagaagaaacaccgtgttttctcccataaaggattttggaagcctgttccagccgaatccgttattcatatcatcgaagatgcgttccttccctccacggaggttatagaattcgacaatctctttctcggaagactcgtagtcatttgtaaggatgcagcggtaggtgtattctccttcccacaggtcgagttcgccgtctatccgcttctgtctttgaatcacaagacggtatgccttccctttccatttctcgatgagaatggaggccagctcaaactcaatgccgcccaattccactttcttccaacctctgagggcaaagatgtcattgtagagcgaactgcatcggttagcacggatatagaaggtcttgcagtgtttagcaatctcttccactatctcttcagaacacgagccgcaatcagctctgaaacggttgataataagcttgttttgttcaaacctttcaaagaacctcttcagcgtgtccttctggtggaaacggacatttgtgttgccgtcgctgttctcaatgccgacaatcaagttgccaataaccgccacgccagggcgataaccaaggaacttcttgtatgtaggcttcgcatcaaacttctcagcctctatgaactggtggtcgaagtcaacgtcatacccctcgccctctttcagctgccctgtggacaataggcaattgaggagcagtgtattcagcttgtctgccgtgttgaagtcgtaggtcttgccagtgtcggatgtgtaggaaatgttatcctgggtcagttcctttatggctctaagaatcgtgtcggcactgcatgtgcgaagtgtcggatgaagcgaaaggtggtacatcagatgagtggtgacatcctcgatgcatgagccgccacaaaaataaacgctcataagcgaacggatgatttcgctgtattgataaccatacagcctgcatctcataccgagggttgagtcgattacagatgagagtctggagtcaaattgctccattattgaaaatattcctccaaaaggagtgagtttctcggatttaattgctacctttgccatgtctgtcgggtttgatacatattttgatttgcaacactaagataggtgaaaaatctgacatggcaaattcctgagcaactttttgttgctcaggtacttaaaaagttatatttgtaatagtgttgcggaattaagggtttactcataaaaatagttttaattaggtgattataaactaatatccgtttgcaaaaataacttacgattcttccgttttttaaaggggaaactattacaaagataacttttatttcaaaaatacaaaaggatttcggcatatatttactgttaagattccgttacatagcaaaaaaacgttccatgctgcctcggaaaggacaacccgtgcggcatacagcctcgccagcacccaaatcaaggcatcggcggaggcttccgtccggaaccgccccctggcgcaccttcggccaggcaaaaaaaattccgccccggaaaccgggacgggcgaagtttcaaggctggttggcggattgcatcggcaggagtcataaaccgacatcgtttccgatgctgcaaaattaccctgcggctatttcatcgttgcgacagtcccgttacaatcccgggaatatggcattacacgcacgttgcagcagccggcaaagccgctcgaccacaccacccagccacaaaagcagcctgcccggactgtaaacgtccgggcaggccatgccgaataacgggttcggcaacgattgcaatacggcggcggcctgcctcacacagcggccgcgcagggatcataccctattcccactcgatcgttgcgggcggtttcgaggagatgtcgtagacgacgcggttgacccctttgactttattgatgatgtcgttcgacacattggcaaggaactcatagggcaggtgcacccagtcggcggtcatgccgtcggtcgaggtcacggcacgcagtgcgacgcagctctcgtaggttcgctcgtcgcccatcacgccgacgctcttcacggggagcaggatagcccccgcctgccacaccttgtcgtaaagcccggcatcgcgcagggcgtcgatgtagattttgtccacgtcctgcaggattccgaccttttcgggcgtaatgtcgcccaagatacggatcgcaaggccgggccccgggaagggatggcgcccgatcagctgctcggagatcccgagcgaacggccgacgcggcgcacctcgtccttgaagagcaggcgcagcggttcgacgatcccgaggtgcatcttctcgggcagcccgccgacgttgtggtgcgacttgatcgtcgccgaggggccgttgaccgacaccgactcgatcacgtcgggatagattgtcccctgcgccagccagcgcacgtcctcgatccggatcgcctcgtcgttgaacacctcgacgaaatcgcggccgatgatcttgcgcttggtctcgggatcgctcacgccggccaggtcacccaggaacttgtcgccggccttcacgcccttgacgttcaagcccatgttcttatacgactcgagcacgtcctcgaattcgttcttgcgcagcaggcccgaatccacgaagatgcagtagaggttcttgccgatggccctgtgcagcagcacggcggccaccgacgagtcgacgccgcccgaaagcccgagcacgaccttgtcgtcgcccagtttctcctgcaactcgcgcacggtggcctctacgaaactctccgaggtccactcctgcctgcagccgcagatacccacgacgaaattcttcagcaggtgcgtgccgtcggtcgaatggtaaacctcggggtggaactggatgccccaggtctgctcgccctcgacgcggaacgcagccacgcgcacctcctcggtgctggccacgaccttgtagtcagccggcaccgacgtgatcgtatcgccgtgcgacatccacacctgcgtggtcgcaggcaggccgtgcatcagcggatcaccggcatcgcccaccgtaagcatcgcacggccgtactcgcggctgggcgcaggctgcacctcgccgccgaaggccgatgcgaggaactgcgcgccgtagcagacacccagcaggggcagtttacccttgatggccgaaaggtcgggggcaggggcatgctcgtccctcacggagaagggactgcccgagaggatcacgccccgcaccgaagcatccggcaccggaatcttgttgaaggggtggatctcgcaatagacattcagttcgcgtacgcgccgtgcgatgagctgcgtatactgcgacccgaagtcgagaatcaggattttttccataatataacgtaagtccgacgaatctgggttcatcaatttcggaaggtttacaagccatgaaactcgccggactcactctacggcgtctccgacgccggtttcaggcctaaaattcctccgggccttctcgttgccaaggaagacctcgaatccttattattttctttttaccggacggttgtagcttcccgcaaggcgcatctccgcggcgaaagcctcgttcccgacttcgcggatgcgtgctatgcaaccgcgacggtctgagcgaaaaacgacctggaaaaccccggcgatgaaattattgaactttccgcaggcatccagcggcatcagcgtgcattcggcgcaactctgccagccgttctcccggcagcaggaacgaaccttgcaccacacggccttttcgttatcgcggcaccccggacaactccctttccggaatttccggcatgaaccgcaaaaaagcccgcaggccgcaatcccgggatcggaactattcaccgcgggaataattgggcgtttcactcgtgatggtcacgtcgtgcgggtggttctccgtaacgccgttcgaggtgatgcggatgaactgcgcacgctgcaaagccgcgatatccctggcaccgcaataacccatgcccgaacggatgccgccgataagctggaagacagcctcgctcaacgtgcccttgaagggtacgcgcgccacgatcccttcgggaacgagcttattgatattgccctcgcagcccttctggaaatagcggtcggcggaacccgccttcatggcgtcgatcgagcccatgccgcggtaggtcttgaacttacggccgttgtagatgatcgtctcgccgggagactcctccgtgccggcgaacatcgagccgatcatcacgcagtcgccgcccgcagccagcgccttgacgatgtcgcccgaataacgcaggccgccgtcggcgataaccggaacgcccgtatctttggcggccgacgccgcggcatagatggccgacaactggggaacgcccacgcccgcgatcacgcgggtggtgcagatcgagccggggccgatgccgaccttgatgccgtcggcgccgttctcgatcaggaaccgtgctgctcctgccgtggcgatatttccgaccaccacgtcgagcgacggataggcggccttgatctccttgagcttattgacgatattcatcgaatgcccgtgcgcggagtcgagcaccacggcatccacatcctcctcgacgagcgccttcacgcgatccagcgcatcgggcgtgatgcccacgccggctgcgacgcgcagacggcctttggcatccttgcaggcgttgggatgatcctgcaccttcgtgatatccttataagtaataagccccaccagatggccttcgtcgtcgaccacgggaagcttttcgatcttgcagttgagcagcacctccgaggcgttggacaactcggagctatgcgtcgtgatgaggcggtcgccgggggtcatcacctcctcgatacggcgcgacatgtcgcgctggaaccgcaggtcgcggttggtgacgataccgatcagcttccgatccgcgtccacgaccggaatacccccgatcttgttctctttcatcaggttgagcgcatcgccgaccgtatggtctttcgagatggtcactgggtcgtaaatcatgccgttctcggcccgcttcacccggcgcacatgggcggcctgctcggcgatggacatgttcttgtggatcacgccgatcccgccttcacgagccagcgcaatagccatcggcgcttcggtaaccgtgtccatggcagcggacacaatggggatgttgagtttgatatttcgcgagaaacgggtctggacactgacctctcgcggcaacacttccgaataggcgggtacaagcagcacatcgtcgaacgtaagtccttcgggctgaaccctttcattgataaaagacataatgaacgtggatttttgttgctcgcaaatgtagtgataattttcgaaacggcctaatatccggggcaacgcgacgatttttttatcaacaatttatcaaagccgccgggtgcgggcgaaatccggagcccccgggacaacgcccggccagccccgcgacgggtaaatacacacgcctgcgtccgggacagcccccggcgccccgggccgggaagccgcccgcgcagtcccgtacaagccggaggggacgccccgcgcccggaatccccggacagcaatcgggggcatcctcccgccgccgacttcccggacaggaaaaatccccggcctcagggtcggggatcgaaattattccgtcacggcggcctgcgcacccggcggggtcagtactgctcctgcccgttggggaaatcgcatgacttcacgtccgcgatatactgcgacacggcgtccgacatgacggtatacaggtcggcatagcggcgcaggaagcgcggcgagaaacccttgttgatgcccagcatgtcgtggatcaccaacacctgcccgtcgcagccgttaccggccccgataccgatggtcggcgcggagatttcggaggtgacgcgggcggccagcgccgcaggaatcttttcgagcacgatgccgaaacaccccgcatcgctcagcaggtgggcgtcgcggacgagtttcgctgcctcggcctcctccttggcacgcacgctgtacgtcccgaacttatggatcgactgcggcgtcagccccaggtgccccatgacgggtattccggccgaaaggatgcggttaaccgattcgaggatctcttcgccgccctcgatcttcacggcatcggcctcggtctccttcatgatgcggatggccgagtcgagcgccaccttcgaattgccctggtaggttccgaacggcaggtcgacgacaaccagcgcacggctgacggcacgcacgaccgaacgcgcatggtaaatcatcatatcgagggtaatgggaagcgtggtttcgtaaccggccatcacgttggccgccgagtcgcccacgaggatcacgtcgatacccgcggcgtcgacgatcctggccatcgaataatcgtacgaggtcagcatggcgatcttctcgccgcgctgcttcatctccgtcagacggtaggtggtcactgccctgacagtactttctacagacatagtttactacgaacccgatggattattcaacatttcattcgttcgcaaggttccggtatggaatccatcggattcgtattacggcgcaaaaacgccaattccatatcgacaatccttccaaacctccctttgaaaagggagacttatcaacacctgtaaaccggggtgatagcgcaagccgggtgcaaagccaaatttatctgctttgccggggcgcagctaaaccgaggttcagcgcggcaaagttaacgcttcggccggatttggcaaaaaaaatcccacaaaacgacaccgcccgagaccgaaacgttgatcgaatgcttcgtcccggcctgcgggatctcgatcgcaccgtggcacatgtccacggcctgctgccccacgcccatcacctcattgccgaacacgagcgcatatttcacgcccggctccgcccggaaatcgccgagcatcacggctccttcgacctgctcgacggcatagacccggtagccttcggcgcgcaggcgggcaatgcactcctccgtcgtcttgtgataagtccacggcacggtcagttcggcaccgagcgccgtcttgtggatgtcgcggttgggcggcgtcgcggtgatgccgcagagggcgatgcgttccacggcgaaagcatcccccgtgcggaagaaagcccctacgttctgcaacgaacggacgttgtcgagcaccaccgcgacgggcattttctccatcgcggcgaactccccggccgagggccggttcagctcttcgttggtgattttacgcataacgtatgcaaatgagtgatttcggggtcaaaagtagtcaaatataaatattttacctatttttggggtctcaattcaaaagaattatgtcactcaaaaaagtcttgatgctgtcgttcgccgcctttgtcgcgggaggaagcctcagcgcacagaatctgatcgtcggcgccgacttcgcaacccgcttcgacaaccgggaatacgccaacaacgatttcaacgaatcgcagacgctcttcagcgcccgcctcacgccccgcatcggcgtggaatggatggggaaaaaccgcctggtggtcggtgtcgacctgttgcaggacttcggcaacgacacccggttcctgaccaaggcccgccctatcgtatactaccagttcaacagcaagaacgtacaggccaacgccggtatcttcgaccgcaaggagctgctgggcgactattcgagggcgttcttcagcgactcgacggcgttctaccacaaccgcctttcgggtttcctcgggcattataaatccaccgagcgcgagaatacctatgtagaaatggcgatcgactgggaaggcatgtattccgagcagtcgcgcgaaatgttccgcatcatctcggcgggacgctatacgctcgagcggggcttctacttcggttatgccttctcgatgttccatttcgcaggttcgaagctcaacgagaacgtcacggacaacctgctggtaaacccctatgcgggctggggattcaacgcctacttcgacttcgacatcaaggccgggttcctcttcgccccgcagcgcggccgcagcgtagaccacaactggaaaaaaccgtgcggtgcacagatcgacttcgtgctgaccaagtggggcgtgaaacttgagaacaacctctatctgggcgaaaacctgcaacccctgcgcaacatcgcggtcggcgaagacatccccgtcacctacggacaggacgggctttatgccggcgagcctttctacgcgacgacaaaaaatgtctataaccgcacgtgggtcggctacgaccgccgattcttcaagggcacgctggccgtcgaggcgggcatggtgttccactacgacggcacgggcatgggcacacagcaggtcgtgaagctctcggtggacatccagaagctgttcaacatcggccccaaggcaaagaaataaagcatacaacaagcgaaacatacacatatggcaagcgaaacaaacgaaacacgggagaagtcgctgaacttcctcgaagagatcatcgaagagtcgatcgccaagggcgaaacgcgcgtccagacccgtttcccgcccgaaccgaacggctacctgcatatcggacacgccaagagcatctgcatcaacttcgggctggcacggaaatacggaggcaagtgcaacctccgtttcgacgatacgaaccccgtcaaggaggatgtggagtatgtcgattcgatcaagcgcgacatccagtggctcgggttcgactgggccatcgaacgctatgcgtcggactatttcgaccagctctacgactgggcgatcgtactaattaaaaaagggttggcatacgtcgacgaccaaacgcaggagcagatccgcgaaaaccgcggtacggtttccgtaccgggcactccgtcgccgtggcgcgaccgttccgtggaggaaaacctcgacctgttcgtccgcatgaaaaacggcgaattccccgacggggccaaggtgctgcgcgccaagatcgacatggcgcaccccaacatgctcttccgcgacccgatcatgtaccgcatcatccatgccgagcatcaccgcacgggcaacaagtggtgcatctacccgatgtacgactatgcccacggccagagcgactcgatcgagcagatcacccactcgatctgcacgctcgaattcgacgtgcaccgtcctctctacgactggttcatccaggcgctggagatctacccttcgcaccagtacgaattcgcccggctgaacctcacctacacgatgatgtcgaagcgcaagctgctcaaactcgtgcaggaaggcgccgtgatgggctgggacgacccccgcatgccgacgatctgcgctttgcgccgcaagggctataccccggcctcggtgcgcagcttcgccgagatggtgggcgtcgccaagcgcgacaacgtgatcgacctgggcaaactcgaatactgcgtgcgcgaagacctgaacaagatcgcagagcgccgcatggcagtgctcaatccgctgaaagtggtcatcaccaactacgaggaaggcaagaccgagctcttcacggcgatcaacaaccccgaagacgaatcggccggcacgcggcaggtgcctttctcgaaggtcatctacatcgagcgcgacgatttcatggaggagcctcccaaaaagttcttccgcctggcacccggcggcgaggtgcgcctgcgctattcgtacctgatcaggtgcgaggaggtcgtcaaggatgccgcgggcaacatcaccgagctgcgctgcacctacgacccgatgtcgggcggcgggtcgtcgagcgacggccgccgcgtgaagggcgtcatccactgggtatcggccaaagatgccgtggaggctgaaatccgtctgttcaacccgctcttcacgaaagagaaccccgacgacgtggaggaaggacagacctgggaggacaacctcaaccccgaatccatggtcaaggtcacgggctacctggagccgtcgctgcgcgacatacccatagggcaggccgtgcagttcgagcgcgtaggctacttctgccccgacaccgactcgacacccgaacaccccgtgttcaaccgcacggtgacgctcaaggattcgtgggcgaaaatcaacaagtaggaaaacaccgaatactgtttaaaataagacctcccgctgcaaacgggaggtcttattttaggttattccgccggaaggcaaatctccgtcctgagtttttccgccgggtcacatcatccgcccgaaggtctttcgccccaaaaggtaacgcaggactacggatccgcggtaaaccctcccggcgaccgtccccctgcactgctgccgaatctccttccgcttgcgcgacaggctgccgtgccagcggagaaaatcgcgccaggcgcggaatacggcacggaaattatcgccccgcccctgtgccaggtacgacaatgcagccatcaggtcgagcacggggcgcacgacggccacgacggcacgctgcacaggagaagcacacttgtagagcatcgccaggttattgcgatggttgtagaacaccttggtcggggaatcggtcgtcagcgtcccgccgccgaggtggtagaccgtactcccgggcacgacccgcacgcggtaacccgcgagctgcatgcgccagcagaggtcgatctcctccatgtgggcgaagaaatcgtcgtcgaagccccctaatgcgcggaacacgtcggcacggcagcaaaaagccgctccgctgacccagaatacgtcgcgggcatcgtcgtactgcccctcgtcggcctcgacccgcttgaggatacgcccccggcagaagggatagcccaggaagtcgataaagcccccggaagcccctgcgtactcgaatctcgtacggtcgagccacgaaaccagcttgggcgaaacgaccgccacgtcgggctcacgctccagaacgccgaggatcggctccagccatccccggggtgtctcgacatcggaattgagcaacaggtaataatccgcctcgacctgcgccaaagcgcggttgtaaccacccgcaaaaccgtaattccggtcgaggcgcaccacggcgacggtcgggaactcctccgccagcaccgccagcgacccgtccgtcgaaccgttatcagcgacgacgaccccgaccccggcgggagccgcggccacgacgctcggcaggaagcggcgcaggtgttccgcgccgttccagttgagtatgacgattttaacgattggcattcgtgcgtttgtgtttccagcggcggtgcgaccacatccagagctcgggatgctcgcggatcatggcttccaaacgtctaacgtagcgttccgtgatttcgtattcggcgacctcctccacaccgtcgtagatcggttcgaacgacatctggtaacgtccccgctgcaagcgctccatccggacgaaatagaccggcaggttacagcgcagcgccagtttctccccgccgtcgaaaaagatcgtatcctggttgagaaagcggaaccaatggctgtcggggcggcgcggcgggttctggtcggcgataagccccatcacgaggttcttgccctcgatgccgcgttccctgttgcgcaggtagaagcgcagcgaatccttcatcgccacggtcatcgaattctcgtagttgcgcaggcgctggtaaaggcgttccatcactttgctgcgcagcgggtggtaaacggccacgagcatctgcgagcgttcgtaaagcccccagtaggagcaatactcccagcagccgaaatgggccgtcatggcgatccagtcacggccgtgcaccttcgcataatgttcctcgaacccttttacggtgagtaccgtacggcctttttcctcgctcatgtgggccatattgaccgtatcgacgaaaatctcggcaagcgtacggtaaaaactgcggcagacggccgcccgttcctgctcgcttttttcggggaacgagttccgcaaattggccttcacgaccttcatgcggtagcgcaggcaataatagaggatgaaaaagagcaggttttcaacaatgtagtacttgaaccagtaaggcatcacggcaaatacccgcgccccgagccacaggaactccaaccatatcttttgtatgaaattcagctctgtacgtttcatccggcaaatcaacggttacggttcgacgaaaagttttacattggcgaccttggtgcggattctcagccagttcgcgagcgtcgtccggtcgatggaatcagatgcgactttcggcgtgaccacacagacgagcgtcgtatcgagcggcgcgcccgaaacgtcgaacgtaatgcccttcatgagcgatatggccctgacgttcgtggtcatggcacccacctcgcgcgaaatgtcgtccacctcgacattcgtgacgcggtagcgtttcagctgcgcagccatctcgcctatgcgcctgttcttctcctccagaagctcgaggtaactttgttgcagcgacgccacatcgatcttgtccgtggtgttcgcctggcggacgaccagctcgaccttgtcgagcccgaagctacccatctgcgtgcgggcgttttcgatggttccgtcgtcgagcggctcccccaggagcagcagttcgatctgcgacggatgtccgtggtgtgcgtaacgcttattgcactcgatcacacgcgtatggggaaaattgaatacctgcgagacatatttgtcggccgccgcctcgaaaagcgacaccctgaccatgtggaacccgatgacgacgctcgggatgaaggtcaccagcgtgatgaccatcatcagccgcttcacgttgcgctcgcgcaccttgtctatgaacgcctttttctcgtatttcaggaaccgcaccatggcataggtcgccagggcgatgaataccgagttgatgaaaaagaggtagaacgccccgaagaagaagcgcatctgccccgtggcaaggccgaagcccgcggtacaaaggggcgggatcagcgccgtagcgatcgccacgcccgggatcacggtcgaagtgcgatcctgccgcgtctgcgccacgataccagccaggccgccgaacaatgcgatcagcacgtcgtaggtcgtcggcacggtacgtgccagcaactcgctgctgttcgacgacaggggcgacaccaggaaataggctgtcgaggtgacgatcgccacgacgaacatcagcgcataattgcgcagcgactttttgagcagttcgaaatcgttgatacccagcgagaggccgatacccatgatcggccccatgatgggcgaaatgagcatggcgccgataatcacggcggccgaattgacattcaggcccagcgacgcgatcatcgtcgcaaagatcagcacccacaggttgaccccgcggaataccacccctttggagatcgacgccacgacctcgtcgcgctgtgccttgtcctcgtcgaggctgaaacgcccccggaggaattcacgcatctctcccagccatgccgaggaagagcgtttgatccgatgcgtatcgttgttgttttccattttccagtcctttattcagtctcctcatccggtaattccctcttcggtttgggtttcccagccaatacgatcacaaattcgcctttgggttccgtcgtacgaaaatgttccagcacttcggcgacagtgccccgcacggtctgctcgaacttcttggtcagctcacgcgatacggacaccctgcgttccgatccgaaaacttcggcgaactgttcgaggcatttcaccacccggtagggcgattcgtagaataccatcgtgcgctcctcgtcggcaagcgactgcaactgcttcgcccgcccctttttctggggcagaaacccctcgaaacaaaaccggtcgcacgggaatccgctctgcacaagagcgggaaccagcgccgtggcaccgggcagggtctcgacctcgatgccggcctcgacacaagtcctgacgagcaggaaccccgggtcggagataccgggtgtcccggcgtccgaaaccaacgcggcattgcgtccggcggcaatcgacccggccaccatcttgaccgtggcgtgttcgttgaacttgtggtgcgaatggagttttttctcgatatcgaggtgtctgagcaggaacgacgtagtacgcgtatcctcggcgaggatgaaatccacctcgcgcagcacatcgaccgcccgcagcgtgatatcgtcgaggttcccgatcggggtaggtacgatatagagcttggccatggggctatgcgaatttacgttcgagcagttccatcaggaacttcgcgccgtcggaattggcattccagacataattctcggcaatgtaaatcatgcagtcgtcgaaatcgccgaaggcatcgagcttgtcgagcgccgcttcgtaagcccgggcatcgccgtcgaacaggtcgcggatcatcaggaacttgtcgttgatgccaatggcacgcctcaggtcggtgacgggctcgctgcggcgcagttccgaggccatatcgcgcggcggcacaatcgtatcggccagcgtctgtttgtcatggttgatcacttcgcccagtacggccccgttattcggcgccccgttccctacaagggtaatctcctcgaaatcgggctcttcgtcgtcatccccggtgtcggacacgggcgccggacgctgcggcacggacgccgcatacgcatcttcggcaggggcctcatccccggcgaacatacgcgaagccccgggagccgaagcgccagggccggatgccggttccgggctgtcggttgccggactgtcggttggaagctgcggccgcccggccgcgggtcttgcggcgtcccccgcggcaggtgccggagcaggcttttcggccgtcggccgtgcagccgtggattcgggattgtaaagcgacatgattacccgctgtttatggcggtggcgctgggtctcctcttcgatgccgaacaaggtcggcgcgatcggctgctgcgctgccgcaggatgcgcccccgctccggaagcagggtgggtaacgcccgtttccgcccctgatccggcaattgcttccggttcgggcatccccgagggtgcttcccggtgtgcgggctcgtcccggggatcggttggctcttgcggcccggatgcccccggcacacgggcaaactcctgcgagccggaatccccatgcgattcggatgccgccgcaatattttcagccggcacttccttgccagcgctatttccagtcgattcgggcgcagggatttcttccgcagccggggtttcaggatcgggaaccagcccggcaaccgggggttcagcctccgcagttcgccccgcagccggttcagccgggatttcggcaggttccgcaacacccccggccggctcttgtccgtccgccggcacggaatcctgcacagattcggccaccgtttccgccgccgcggtatcgcaatcggggaaagctgccccgggctccgccacgggcaggccggcctggggcgcaatgaacccggattcgggttccggcccggatccggagagcgacggcaattcgggttccgccacgggcagaggctcgatcgaaagcacttcgccgaggtctaagctgaccggaatctccgtcgggaagggttcctgttcggaggcatctgccgcgggaggttccgcctccgcatcgaaacgcacggcctcgtagagtgtccgcaacttatcgagtacgagatcccgctcgagggagccgatctcctggttcgcattccagccttcaacgatttccgagagcttgcgcaattcgctccgcacgtatttcaaatccataatccgcacactttttgcctccaaagatagcaaaaatttacgaacacaccgtgcaaaatccgagataatatccccgagggcctgcggtgccgctgcggggcacaaaaaacggggatcgacactcagccgatccccgtccgtatgcgggcgccgccctactctccgaaaatgtgccgcgcataattatacccgcaggcatcgtagatccgcgccaggcggcggacacggtgcagatagccggcataatccttccggtcgaggctccaccccacttcggccagcgcgctcaggcgcggcagaagcatatattcggcatggggccatgtcgcgatatactccgtccacaggttggcctgcacgcccagaatacaagcctgctcggcaggtgtgagctgctcgtaaggatcgagttcgtagaccttctccacgggtacgtacccgccgatggcaaggggttcgcgggccgtatctcgcgtctggtagtaatccaggtagcagttcgtggtcggcgccatgatggcatggttgccctgcctggcggctttgatgccccctttcgcaccgcgccacgacatgatggtcgccgtcggggtgacatcgccttcgagtatctcgtcccagccgatcaggcggcgtccgcgggcattcaggaacttctcgacgcgtgccgtggcgtagttctgcaactggcgcggacgcctcagcccttcggccttcatgcgcgccttgcaatgcgggcacttctcccacatcaccgtcgggcattcgtcgccgccgatatggatgtattccgacgggaaaaggccgacgacctcttccagcaccccctcgatgaattcgaaggtcgtctccttgccgatgcagaacaccctatcgtcgatgtcccaggtctggcgcacctcgtattgttcgcccgtgcagccgagccacggataggaggccagcgcacccacggcatgtccggggaattcgatctcggggatcaccatgataaaacgcttcgcggcgtagtccacgatgtcgcggatctcgtcctgcgtatagtaaccgccatagggcgtttcgtcgaacttgcagttttcgtcgtactcgccgcccgggtcgcggccgatcagcgtacggctgcgtacggaacccacctcggtcagcttcgggtatttcttaatctcgatacgccacccctggtcgtcggtaaggtgccagtggaacacgttgagcttatgcagggccatgatgtcgagcgcctccttcacttcgtcgaccgtgaagaaatggcggcagacgtcgagcatcatgccccggtagcccaggcacggtttgtcctcgatcgtcacgacgggcagctccacggcccgcacgttggccgcaccgtaagccgcagcggggatcagctggcggagggtctgcaccgcatagaacgccccggctgcgctcccggcaacaatctccgcacgcccgggcgtaatctccaggcggtagccatccgccggcatcgccgcgtcgcacgagatattcagcgccccgtcgaggggcacgtcggcatgccgcacccgcaaccctttgccgaacaccggttccagtacctggtcgagcgccccggtcacacaggccagactgtcgtcgccggacagcagcaccgcttcggtcgaagcggtcagcaaaaaagttccctgccctttcacgacacgctcgggcaacggcaccaccgcgacttcatcgtcggcggggattaccttaccgcagccgcagagggccgcacagaggacaacaaggggtataagtctcttcatatccgggttattttaaatggaggttcctccggaacacaaggtaaaaataaggcaaaaaacggacaaatcaaaaccccggcccgttattcgcacgccgaagcccccaaaagccccacgtgttcgaccgacgaacagcagatatggagccgttcgaccgtcttggcatacgggaactgtttcaactgctcgtacatcgcctcccggaaaaatccgaaggcatgggcgatgctcccgccgaaaacgatcgcttcggggtcgtaggcatagaggatcatcatcaccagccgcccgatgtgcccgccgaattcgtgccacagcgccagcgccgcggaatcgcccgccagggcacgctcgtaggcttccttgcccgtcgtgccgcggcctacgaagaaacggctgctgcaatagtattcgtaatcgcggtcgaggtacggaatgctcccgatctccccggcacccgtatcgtgcccgcaatagagttcgccaccgatcacgatccctgcgccgacacccgtgccgagcgccacgcacaccacgtcgctatatgcgctcgcctcgccgaagcggctgacgcccaaagcaaagcaattgcagtcgttgttgacatatacggggacaccgaaccgtttttcgagcaggtctttgaggtatacctcgcgccacgacgggatgcctacgacattgtagacgatcccgcgcgccgcatccacgaccgacggcacgccgataccgatgcgggcgacgtcgggggtgatgagcttcccgatgagcgaggcaatttgatccacgacctccccttcggggcggtcggctttgcagggttcggagagcaaccgcacgatgcggccatccttcaccaggccggcgcgcacgttcgtgccgcctaaatccacaccaatcctcatcgtgcaatcagttgttatttttgactttcgcaactttcccgccgcggaattccacatggtctgcaatccggccgtcgcgctcgtgtatccacgtctcgaagcctcgtttgccctcggtcagcacgaggatgcgcacccccggccgcaggttgttgtaggtcgtatcgtcgcccgaaaaacggccgtaaccgagggcgatacccttctcggccaccacatagtcgatgtcgtggtcatgcccgacgaaagtgcccatcacatcgccgcactcggccatcgcggcgaacatgccggggttcagcgccccggggcattcatcctcggcggcacggccgacatgcgtattgtcggggttccgccatgcagcgacgtattcgggcagggcgatatggaaaaacgccagcgccggcagcggcttcccgccgttggccgcggtataggcggcgctacgggcgcggtaccagcccacctgctcctgcgtgaaccagccgtagccgtcgatagacgggattgttgaataatcgtgcgaatcgaggcagtagagcaacgccgcaggttgcgtcgtcccggcgatctccagcaccacgtcggccagttcgcccccggcgccgagcgtattgagcgtgccggcatacgaggtgacgatgcggccgatctccgcccgcgtcagatcctgctcggcgtcgtggttccccagcaccacgcaaaacggcaggttgcgttccgcgacgggctccaacacgcggtgccacgcttcggcagcgggcttgcccgtcaccacgtcgcccgtgaagaccaccaggtcgggatgctccgcatcgaggatgtagcgcatctgagcgatggttttttccgcctgcgcccggcggtaaggcgtaccgaggtcgaggtgcacgtcggtgaactgtgcgatccggaatttgccgtcccggccgaaatgcagggcgggcgcctgtgcctgtgccgaacaccacaaggcgacggcacacataagagtcgttatctttttcataggtaggttaggttccttagttcagtttcacagtgccgcttttctccacgcggacggtgcggctctgcccgtcgccccacgtcaccgtcaggtcgaacggcacgttggtcgtaacgctcaccgcaggcacgtccccggctgaattgcggcctttgaccttcagccccacgacaccctcggggccatagggatagcggtcgatgccgtgggcctcggtatggttgatgtcccacacgatacgcccctcggaatagtcggatttgatgccgaggatatactcgatgaacaccgcgatcggcggcagccccgcccagcccacgaagtccttgcgggccatgaacccgggttcgatcttctccggggcatagtactcccagaaagtcccggtattcttccacacttcgaatacggcgttgaaatggttttcggccacctccagcgcaaggtcatggtagcccttgcggtagaggccgtcgatgaccatgtaattggcacccggccatacgccgccctgccagtaacggcccgtcgggttgtatttcgggtggtcggccgagagcgacggcacgcggtgcggacggtcgaattcggccgtgtccgccaggtgcgccaccatgcggtccatccgccccttgtccagcgcgtcggcctgcagggcccagaaggcgccgatccccttggtcgtgcagagcgacccgtcgccgtagcggtcgtagaggaaacccgtcgcgtcgtcccacaggtgctcgttgacataggcgcgcagccgtttcatctcgtcctccatgtcctcgatctcctgccagcgttcgatgtggaaaccgatgttgagcagcgactcgtcgaccagcatctgctgcaggttggtatcgagccagaccatgtggccgtgcgagaagatcgggttgtattcgggctttacgcggggcatgttgtccatgcccgtcccccatccgctcgaccagtaggtgccgtcgggccacgtgcggttgagccgccaccacttggcataggcgcacagggcggggaaaaccttgtgcaggcggtcgatgtcgccgaactggcggtaatacatcagttcgacccacggcagcaggttgggccccgtcgaggtgggatcgtagcgctcgaagcagtcggagccgtcggcacggatctcgcggcagatgaacccgtcgggatgctgcttggcgtagaagttgtccagcgtgcgctggaacgggaaaaagcggtaaccgtagcgggcgaacatcatcatgaacgaagcgtcccacatgaagatattgccgttgtaggcaatatcgaggtaaggcgacacgaaccccgagccctcctgcggctggcggatgttgcccacggcgatctgccaggcgtgccagtacatctcgacctccttttcatgcccttcccacacgggcgagggcaggatcttgcgcgcctcggcgaacgtccggggtttgatgtgttcgggtttggccgtgcggaactcgttctcggccacgaatacctcctttacataggtgtttttgtagggcagcttgtagggccccgatttgaggtcttgcgcccctgccgtgcccgctgcgaagaccagcgacatgaatgccgcgatttgtttgcgtagcgtcatagtatgcggttattttatcagtgattttaccctgcgtgcgatctccgtgttcatgtaggtgccgcagaacttgtcggcgcccgggccgtaggcgaataccggaagcatggcgggcgtatggtcgtcggaaacatagacgcccgtcacacgccccgtatgctcgtcgccgtcgaccaccaccaggccgccggtttcatggtcggccgtgacgatgacgagcgtctcgccgttcgtgtcggcgaatttcagcgcctcggcaacggccaggtcgaagctcagtgtctcgatgaccgaaccgggcaggcagcgcgagtgccccgcatagtcgatcttggcgccctcgaccatcaggaaaaacccttcgccgccgcgttcctgcaatttggcgatcgaagcgcgcgtggcatcggccagcagtgtcaggttggcctcctcggccgcatcgtccatcgcctcgtcgatgcagatgaccttgcccttcgcggcatcgatcccatcgaccgaacgcacgaaatcatattgtttctccagctccccgaccaggtcgatcccgtccttgcggcgtgtaaattcacggatgccgctgccgcagagcaggtcgatgcgcccgtccatgaggcagcgggtcagctcgtcggcattgtcgcgctcgaccgaatgcccgtagaaggccgtcggcgtggcatcggcgatgttacccagcgtcacgacgcccacgggcagccccctgtcgtggaagaaatcgctcagcgagggatagggcacgccctccgggctcatcgagatatggcggttatcatggcgttcgcccgtggccagggcgctgccgccggcagccgagtcggtcgtgaaggcatccagcgcattgttctgttgcaggccgatatatttcatctgcagggtcgacagccccttgttggcatagaaagccgccacgatctgcgacagccccatgccgtcgccgatcaggtagatcacgttgcgaacccgtccccggcccccgtcgttgcggtaagtcggggtgtagacgtcgatgcccttggagagttgcagtttgtcgttctggaagccccggaaatcgcgcgtggtcttgtccaggcgcttggtgcccgtcacgccttcggcggccgtgcgacgttcgccgatctggaaattcttgttgccgaaatcatcgaagaacgcggcgcacacctcggggtgatcggtattgaggtagtcgatacccatatcataaaaggtatagtaaaccgtcgtcccttcgggggcgccccagaaacgcacgggttttccccaggcatgtgcgcggtcgatgaccgtctccagttccgcacgctcggccgggatgatcgagcccttgccgttccactccgaatagtcgctgaaatcggcgcttatcagggcgatgcgctccagttgcgcgggcgtatagtcggcatcccacaccccgtcgaaacggatataggagggatatttgccgaaatcggccggtgccgggacacgccccgtgacaacgatccgcacagcctcggggttcaccgccgggtcgaacacctcgggatagcggcccagcaatgccgcaacggcctgtaaagtcggttcggtagcagacttgagctcgaccatcagttgaagatgttcgccggaatccttccatgcccgcccgccgttacgcccgaagagcgtcaccagcggttcgacgtagagcgcctcgaaggtcatgccgggcgaaaggtcttcgacctcgtgccccacgagcagcttgccgccgtgtaggaacacgtcggcctcgatggaatagacctgctgggcgtacgcctgccagaagggggcacggcggcaataatcgttgtgcgaatggatcaggatggggcgctcggccacagccgtggcgcaggtgcacagtgctgcgaacagcagccagcttttgagtatctttttcattgcgggatgttatttttcgaatttgacaatggccatcacgggggcatggtcggagacataaccgccaccgagcgtatcgggcagcacctcgtaaaggtcggcggcgatgccgtcgctcacgaagatgtagtcgagcaacgggcgttcggcctcgggtatctgcccgaagtcggaaaaactccactccgtgccggatttacgggcggcgacctccttcacgtcatgcagcacgccgtctttctgcacgtgcgccacgaccgacgagccgggctcggaattgaaatcgcccgtcaggatcacaggccgatccccgcgcagcgcttcgatgcgctccctgagcaggttcacgccttcgtcgcgggcgacctgccctacatggtcgaggtgggtgttgacgaagaggaactcccggcccccttccctgtcatgcagtacgacccaggttgccacgcgctcgcaggcgccgtcccaccctttcgagcctgcgacgtcgggggtttcgctcagccagaaagtcccggattcgaggggcgtaaaacgatcccgccggtaaaatacggcactgaactcgcccgcctcggcaccgtcctcacggccgacgcccaccgcagcatagccgggcagcaaacgcttcaggtcgccgagctggttggcaagcagctcctgcgtaccgaaaacgtcgacgccgtgcgaagcgatcacctcggcgacccgcccgcggcggaaacgccagttgtccgccccgtcttcggggttgtcgtaacgcatgttgaaggtcatgacgctgagcgtcgtggccgaaccgcaggcagtgaacgccgctgccgccagaagatagaacaatcgtttcataactttatagtttaatcaccgggacaattgggaaattcgacgcacagacgctccgcggggatctgctcgaagagagccgctccgggcgccctccagccccaggagagatcctgcccctcgtaatcctcgaaatacatgagcgtatagggatgcagacccgcttcgagcgccacgcgcccggtcgccatgaccgaagcgtgcgacccgtcgttgtcgaccaccttccggtcgccgatcacgagcacgctgccgtcatcactcttggtcatgaactcccacacgccccgttcgggaatgcggatccagccgttgaaaatatatccgaaatggtcttcctgcggggcatcggcaatcgacggctcgggcattgtcccggacgccacgagctttccccggcgaatctcgtccacatgcgagaacacgccttcgtaacaggcataggcgacgcccggacgcatggccgcgcccgctccggacagccctttgcggaatactgccttctcggcttggagcgtcagcgtacggctcggtgcggccccgggtttgaatccccgcgctttgagcgtcagcgagcggtcgacaacgacgggcccggcatagagcaccgaggtttcgtccggctccgagccgtcgagcgtatagcggatttcggctccggccgtcgtcgtggccagggcgacggccacaggctcggtgaagaggctcacgttctgcgtggtatagggaatcgaaacgacctggccgcgcgtaagcgaatagggctctgctgcggcatccgttccacgggcgtaatcgggttccgcacggagttcgaaatgcagttccccaccctgcatcagttgttcgtaggtgatgaaattttcggtcacgggcactccgtagagcgtcaccgaagcgatataggtattgcggcgggggttgtttgccgtaacggtcagcgtgcggccgttggccaggcgcacgacggccttcgggaattggggtgcggtcagcgcaaactggttcgagccggggcagacgggatagaagcccaggctggagaagatgtaccacgccgacatctggccgcagtcctcgttgccgatgatccccgcgggcgtcggggcgtacatcccgtgcagcaggctgcgcgtgagctcctgtgtccgccacggctgcccgacataattgtagaggtaggccatgtgatggctgggttcgttgccgtgggcatactgccccatgagccccgtcacgtcgcttacgtcgagctgcatctcgtccgattcgagcgtaaagagccgatccagttcacggacgaatgcctcgcggctgccgaaaagcccggcgagcccgttcacgtcgtgcggcacgaagaaacggtagtgccacggcgtggcctcggtatagtcgcgccccgtggagaactcttcgaacggctcagaccagttgccgtccgtcccgcggccgcggaagaaacaggtcgacccgtcgaagacattggcgtagttgagcgcccgctgcgcatactcccgggcgacgtcgtcccggcccatggccccggccatgcgggagatcgcccagtcgtcgtaggcatattccagcgtgcaggagaccgactcgcgcttgatattggaaggtataaacccctgtgtcacatagtaatcggaacctttcttattgatgttcgacgagcggatcatcgcatcgagcgccttttcggcatcgtatccgcggatacctttcaggtaggcatcggcaatgaccgacgcggcatggtagccgatcatcgtccccgtctcgcccgacacgagcggccagatcggaagctcgcccgttatgtcgtacatgtcgagcatactgcggatcatgtcgttgactaacgtcgtatccaccagcgtctgcaacgggttccacgcgcggaaagtgtcccacagcgagaatgtcgaatagtaggcaccgccctgcggcatacgcgcgatgcgctggtcgtgacggcggtactcgccgttgacatcgctcatcagattgggcgtcagcttggtatggtactgcgccgtatagaaattgaccatttcgtcgcgcgaaccgccctcgacgacgatgtcgcccagcgcttcgcgccacagcgcggcggcacgcgcatgcacggcatcgaaatccagctccggcacctcggcgacgctgttgagacgggcattctcagcgctgaccgacgacaacccgacggctatcgtaagcgtttcggtgtccggcgcaaaagtcagcacggcctgtttgtcgcccagcagccgcacgtcggcgaaaggctccgaaaaacgggcggagaaaaagacatactggtcgggcacccacccctgcgtgcggcgcatcccggcgatctcatcgggcgccatcgtccgcaattcgcgcatgtcgaccttctcctcggcgatcgtgtgcatcaggtcgacgaccacctgccgcggccccttgcccgtaaaggtatagcggtgcacgcccgtacggggcgccgccgtaagctccacccggatattttcaccgggtaactccacggcataatagccgcaggaggccttctcgtccccgtgcgaaaagaaatagggctgcaggacgcaggcgccgtcgtgcaacacgatttcgcgcgtggtgggatggaacaggatgtcggccaggtcggcacaccccgtaccgctgaggtgcgtatgcgaaaaaccgtcgatggtcgtatcgtcgtaatggtaaccggcgcaggcgtcccagtccccggcacgcgtgtcggggctgagctgcaccatgccgaacggcgtcgttgcgcccgggtaggtatgcccgtggtagcccgtgccgatgaacgggtctacataatcgaccgggccggccggccgcggcgcgcacgcaaggagcccgagggccagcaaggcgaaggtaagttttttggtcatggcagtttcggtgtatgcgccccgtccgtaaagcgttccatcaaagataaggattccggggcggtattgcaacccccggcagccgtatctgcgcaacatcggaaccggtcgcagtttaggttacacaaatataagagaagagaagcgtcccatccgtggctatttgcgcttttacatcctcacatcgcgcagaaccttcctatccggcgccgaaaccccggcaggagtgccttttcgcccgaaattccgtcctggggcagaaaattcccgaaaaaaagctatctttaccctcgaagagacccaaccagaccatggcacgcgtaattttcctgaccgatttttccgaagcctatgcccgcgaactgctgctcggcatggcccgctacgcgcacgacaccgcccaggcgtggagcctttgccggctgccgttgtcgatacgcgacaagttcggcatagaggcggtggtcgaatgggccgtgcggatgaaggccgacgccgtgatcgggcagttctacaacacggacaacgtcggtctgttccgcgaaaacggcatcatcgccatcgcgcaggatttcaagaagcgtttcacgacgatccccaacatcaccgggccgcaccaccttgccggccgcatggccgcggagtatttcctgaaaaaggggttccgcaattttgccttctacgggacgcggggcatcgacttctcggacgaacgctgccaggggttccgtgagaccgtcgaacaggcaaaccccgatttcaccttctcgtcgctgcgcagcggcgcccagaacgacctgtggtactacgacacggcgcagctcatcacatggctgcaatcgctgcccaaaccggtggccatcatggcctgcgacgacaaccaggcgtaccatatcaccgaggcgtgcctccagatcgagggggggggaaattcgcgtattccgaacgacatagccatcctgggggtagacaacgacgagacaatctgcaagctctccgccccgaacctttcgtcgctcagccagggcgtcgagcagggcggctacgacgtggcacggctgatcgaccggctgatccgcaaccccgaagcggaatgggaagacgtcatggtgatgccgctcaatatcatcacccgacagtcgacggacatctatgccaacaacgacccgcacatcgccgaggtattgcgctacatccatgagaacatcagtcagaagatcacggtggacgatctggtgaagctggtacccctgtcgcgccgcctgctcgaaacccgtttcaaaaagagcatgggcacctcgatctacgattacatcatccagactcgcatcgaaaagatgatgcagttgctgtgcgaagggctgagcgtatccgaggcggccgccgagctgggcttctccgacatcaagaacgtctcgcgcaccttcaggcagctgaagggcatcaccccgtcggaataccgcgatcaggtagccccgaaaaggcgttagcaccgtcccgcaaacaggtgtcccgccccttccgttccgcgcagagatcaaaattcaggcatatcggccgttttttgcggaggatttactatcttcggggcaaattaaccttcaaaccgaatctatgtccttaaaaccgttattcctattcgcatgcaccctatgcgcgctgccgctcatggcacagaaaaactacacgctcacctcgcccgacggcacgctgcaggccaccatcgcaaccggctccgacctgaggatctcgctctcggccgacggcgaaacgctgctcgccccgtcgcccgtctcgatgacgctcggcggcggcgaagtgctgggcagcaaccccaaagtcaccagggccaggaaaaatacggccgacgcacggatcgcctcgccgttctacaagaagagcagcgtccgcgaccactacaacgaactcgagcttacgatgcgcggcgattacgggctggtagtccgcctttacgacgacgggctggcctaccgtttcacgacccggaaaaaggacggcatcctggtcgagaacgagcaggtcgcctataccttcccgggcgattatacggcgtacgccccctatgtcggacacaagcggctgctcgatttcgaagggcagttccgcaattcgttcgagaacacctacacccgtctcccgctgacgcagctcgacccccgcaaactgatcttcctgcccgtgctggtggaacttcccggcggccgcaagatggtcatcaccgaggccgacctgcagggttatccgggcctcttcctcaacaactcgacggaggcccccgtgctgaagggcgtgttcgccccctatcccaaaaaagaggaacagggcggccacaaccagttgcagatgctggtcacggagcgcgaaccctatatcgccgcgaccgaaggcacccggtcgttcccgtggcgcgtaatggccgtatcgaaggacgacagccagctgctcgacaacgatctggtctaccgcctcgccccggcctcgaagatcgccgacacctcgtggatcaaacccggaaaagtggcctgggagtggtggaatgcatggaacctctacgacgtcgatttcaaggcgggcatcaacaacgaaacctataagtattatatctggttcgcctcgcagcacgggatcgaatacgtgatcctcgacgagggatgggccgtgaacaaacaggcagacctgatgcaggtagtaccggagatcgacctggaagaactggtcgaatacggccgcgaacataatgtgggcatcatcctctgggcgggctactacgccttcgagcgcgacatggaacgcgtcgtgaaacattatgccgacatgggcgtcaagggtttcaaggtcgatttcatggatcgtgacgaccaacggatggtcgatttcctgcaccgcgccgccgaagtctgcgccgaacataagatgctgctcgatttccacggcgtattcaagcccacggggctcaaccgcacatggcccaacgtactcaattacgagggcgtgttcggcctcgaacagctgaaatggtcggccgaatcgaccgacatggtgaaatacgacgtcacgatgccgttcatccgcatggtcgccgggccgatggactatacgcagggagccatgcgcaatgcctcgcgcggcaactaccgccctgtgcacagcgaacccatgagccagggcacccgctgccgccagctggccgagtacgtggtcttcgagtcgccgatcacgatgctctgcgactcgccgtcgaactacatgaaggaacccgagtgcttcgctttcatggcctcagtcccgaccgtatgggatgaaacgatggccctcacgggttcggtgggcgaatatatcgccatcgcccgccgctcgggcgacacgtggtacatcggcgccatgaccgactggacaccccgcgaactggagctggatctgtcgttcatcggcaacggcaactacgacgtcgagagtttcgccgacggcatcaacgccgaccgggcagcccgcgacttcaggaagaccgtatcggagctgccgcaggatcgcaggctgaagatccggatggccccgggcgggggctatgcagcccgcatctacgcacgataaaccagcctgcccccaaaaggcagcggcctgcgcaggccgctgccttttcattgctggcgatccgtccggcgatgccctgcaaagcgggaaatcgcaggcggaaccgtgcgaaagcccctgcctgcgatgacaatatgaaaagaatttcgtatctttgcggggttattgaaatctaacgacaactaaaatagaatggctttacaatgcggcatcgtaggtttgcccaacgtgggtaaatcgacccttttcaactgcctgtccaatgcgaaggcgcaggcggcgaactttcctttctgtaccatcgagcccaatgtgggcgtcatcacggttcccgaccagcggcttgtcaaactggcggagatcgacaatcccaaacgggtgatcccgaccacgatcgagatcgtggacatcgccgggctggtgaaaggggcgtcgaaaggcgaagggctcggcaacaaattcctggccaacatccgcaacacgcacgccatcatccatgtattgcgctgcttcgacaacggcaacatcacccatgtggacgggtcgatcaaccccgtgcgcgacaagggcatcatcgacacggagttgcagctcaaagacctcgaaaccgtcgaaaaccgcctcgccaagacgcagaagcaggccacctcgggcggcgacaagaacgccaaacgcgccgttgagctgctcctgcaatacaaagccgcactcgaacagggcaacagcgcccgcacggtggaactggagaaggaagaccgcaagctggtcgccgacctcaacctactgaccgacaaaccggtgctctacgtctgcaacgtggacgagaaaagcgccgtgacgggcaatgcctataccgaagcggtgaaggcggccatcgccggcgaaaaagccgaaatgctcgtcgtcgcagcagcgacggaggccgacatcgccgaactggaaagctacgaggagcggcagatgttcctcgaagacctcggccttgaggaatcgggcgtggctcgcctgataaaatcggcctacaaattgctgaacctcgaaacgttcttcaccacgggcgccgacgagtcgcgggcctggacatacgtgcgcggcatgaaagccccgcagacggcaggtatcatccacaccgacttcgaaaaaggattcatccgcgccgaggtcatcaagtacgacgactatgtggcgctgggttcggagaaggcgtgccgcgatgccggtaaaataggcatcgagggcaaggaatacgtcgtacaggacggcgacatcatgcacttcctgttcaacgtctgacacatggccgcaacccggccggaatcgggtgcagttaaaatagacaaacacaaaaacagcacgtaataacatggcaagacccgtaagagtgcgctttgcgccgagccccacggggccgctgcatatcggcggcgtccgcacggccctttacaactacctattcgcccgcaagatgggcggcacaatgatcctccgcatcgaggacaccgactcgcagcgtttcgtaccgggcgccgaagagtatatcctcgaatcgctcgagtggtgcggcatccggatcgacgaaggcgtaggcgcgggcggcccccacgccccctaccgccagagcgaacggcgtgaaatctacctcaaatacgccctgcagctggtcgaagccggatgggcgtactatgcgttcgacacggccgaagagctggacgccctgcgcagggaggccgaaggacgcggcgaggcattcgcctacaattacaccgtgcgcgaaaagctggccacctcgctggcgctgcccgccgaagaggtcagggcgcgtatcgaccgcggcgaccagtgggtgatccgtttcaggatgcctgaaaacgaagtcgtcgaaatggacgacctgatccgcggccacgtggaggtcaacacctcgacgctcgacgacaaggtgctctacaaatcgtccgacgcactgcccacctaccacctcgccaacatcgtcgacgaccacctgatggaggtctcgcacgtcatccgcggcgaggagtggcttccttcgctgccactgcactacctgctatacaaagcattcggatggacggcgacgcagcccgcgttcgcccacctgcccctgctgctcaaacccacgggcggcggcaagctctcgaaacgcgacggcgacaagatgggattccccgtattcccgctcttctggaaatcccccacgacgggcgagaccgcgcacggataccgcgaggacggctatttccccgaggcatttatcaacatgctggcgctgctggggtggaaccccggcaccgagcaggagattttctcgatgcaggagctgatcgacaatttctcgctggaacgcgtttccaagtcgggcgcacgcttccagcccgacaaggcaaaatggttcaatgcacagtacatgcaccataagagcgacgccgaactggccgcgctctaccagccgatcctgcgcgggcacggcatcgaggtcgcggacgaggtcgcaggccgcgccgccggcatcatgaaggagcgcgccacgttcatcaccgacctgtgggatctgacgtcgttctttttcgtggccccggccgaatacgaggagaagcagaccaggaaatactggaaggggcagaaccccgaaatcctgcgcgaactgcgcagcgtactggccgcgatcgacgatttctcgctggaaaataccgagcggatcgtacacggctggatcgagcagaaaggctacggcatggggcaggtgatgaacacgctgcgcctggccctggtcggcgccggcaagggccccggcatgtacgacgtgacgtcgttcatcggcaaggaggagaccctgcgccgcatcgaccatatcctggcaaccttaaaacccgcagaataatatggtaactatcgaacaacacgtatggggcatgacgcccgaaggagaggcgatcatcctctacacgatgcgcaacgacaagggcgccgaagtgaagatctcgaatttcggggcggcgatcgtctccgtgacgatgcccgaccgcgaaggccgcatggccgacgtggtgctcggttacaaacaccccgaaggctacttcttcgacggggccgcctcgggcaagagcgtcggccgctgcgccaaccgcatcgcatcgggacgcatgaccatcgaaggcaaagaatattcgctggaggtcaacaacggccccaaccatctgcacggcggcacgaaaaatttcgccaaccgtctttgggaaagccgtgtcgagaccaaccgcgtcgtcatgtcgctcctgtcggaggacggcgaccagaattaccccggcgagctgaacgtcgaagccgtattcgatttcgacgacgacaatgccctggaaatcacctacctcgccaagacggacaaaacgacggtcgtgaacctcacgaaccacgtctatttcaatctcgcgggcgacggaagcggttcgatcctcgaccacgaactgcgcctgaacagctcgaaggtgctcgaaatgaacgacaagcaaattccgaccgggaaattgctcgacgcagcgggcactccgcaggacttccgccaattcaggcccttccgccccggcatcggctcggagttcaaccatatccgcgatttcaaggggtacgaccatccttttgtcatcgacgggtggcagcccaacatcctgggcgaggtcggcgaactgcgcgaaaaaggctcggggcgctgcgtaaagatactttcgtcgcagcccagcgtaatggtctacaccggcaactggctcgcaggcggatgccccgaaaccaagaccggcggacgttacaacgactacgacggcgtggcgatcgaatgccagaactaccccgacgccgtgaaccatcccgatttcccgtcgccgctgctcaaacctggcgaactctattgccagaagatcgtcttccggttcggcaccttttaggctgccccggcaaaacgaaaatccctgctacatgtagcagggatttttcggacaagaacccggcgtgaacgagcggacggacacgggagattccgctccgtatatgcggcctgcagggtttcttacttcttttccgtcctacctttttccgccctacttccccgtcccggactgggcggccaacacccgggcgcgctcgagcgccgcatggatgtcggggcaaatgttctcctcgccgagcaggttgcagatcccggcattctccagcgtagcgcgcacgcccgggttcacgcccgacagcacgagggtactccccgcccgctgcgacatccggcacagggtttccaagttatggagccccgtggagtcgataaacggcacgcgacgcatacgaatgatccgcacccggggacggtcgcccatctgcatcatcaactcctcgaagcgagtagcgatgccgaagaaataggggccgtcgatctcatacacctcgatcccggagggtatggccagcggctcttcgtgcagccgggcgtcggaacccgctgaggggtcgatttcattgcggatcaccgatatttcggtcgtctccatcacacgccgcaggaacagcacgcaggcgataagcagccccacctcgatggccaccgtcaggtcgaagacgaccgtcaggaagaaggtaaccagcaggacggccctgtcggaaaggggcgtgcgcagcaaagcccggaaagtccgccagccgctcatgttataggacacgaccacaagcacgcccgcaagacaggccatcgggatatactgcgccagcggcatcatcagcaacaggatcagcagcagcactccggcatggataatgcccgccacgggcgtccggccgccgttgttgatattggtcatcgtccgggcgatggcacccgtggccggaatgccgccgaacagcggagtgagcaggttggcggcaccctgcgccataagctcggtattcgaatcatggcggtcgccggtcacaccgtcggcgaccgtcgccgaaagcagggattcgatagcccccagcagcgcaatggtcaaagccacggggaacaggctgcgcatcacctcccaatccatcgcgggcatggccgcggcaggcaattcggcacggatcgtaaagcggtcgccgatggtatcgacgccctccatgcccgcatacgtccgaagcgcccaaaccccggccgtcagcacgacgatggccaccagcgaccccgggatacggcgcgagaacctgggtgtaaggacaatcagcaggatgctgcccaaccccacggccaggttcgcccagttgaccgaaccgaaatggcggaaatagagcatccacttgccgatgaaatcccccggcacgggttccccgccgaaattcatcccgaacaggtctgcgatctgcgtcgtgaaaatcgtcagggcgatgccggctgtgaaccccaccacgacgggatagggaatgaaccggatgacggcgccgagtttgaacagccccatcgcgaccagcagcacgccggccatgaacgtcgcaaccagcagccccgtttcgccgtattgctggacgacgccgtagacgatgacgatgaaggcacccgtagggccgccgatctgtacccggcttccgcccagcagcgagacgacgaaccccgcgaccacggccgtgatgattcccttttcgggcgatacgcccgaagcgataccgaaggcgatagccagcggcagggccacgatgccaacgaccaggccggccatcaggtcagccgaaaacgtctgacgcgaatagccccggaacacttcgaagaaccggggacggaacgatgcgatatgtttcatagaccgttaaaaaaatttgaaagtgcaaaagtaggcatttttcggcttatatctcccttttcggcatttaattattcgggcctgcacgggccgggacaaataaatttggtattgccccggacaatcactacctttgccgtcgaatttctaaggggtgctcgcagtgcgcgggctgagattatacccattgaaccggacacgggtaatgccgagaccgggatgcataatcaacattacataccccttttcagttctttaactttaaaaagtttaaacatgaaaaggtttttactacccattgcggccgccgtcataggcaccgccgcacatgcccaggccgtggaggccgggcaggaagactcgctgcgcatgtatcggttgcaggagatcgaagtcaccgccacacgcgccgacgcggccacgcccgtggcctacacggacatcgcgcgcgacgagatcgcccgcaacagcttcggatccgacatcccgtcggtactggcgctgaccccctcgatggtcgccaccaacgaaaccggcatcggcatcggcgccacctcggtacggctgcgcggcacggacgccacgcgcctgaacgtgacgatcaacggcgtttcgatgaacaaccccgactcgcactcgatgtactggtacgacacgcccgacctgatctcgtcggtagggacggtgcaggtgcagcgcggcgcaggcatctcgaccaacggcacgggtgccttcggcggcgcggtgaacatgaccaccgaggcactcccgaccgatttcaacggctcggcatcgctctcctacggatcgtacaacaccaacaaacaggccgtgcaggtttcgtcgggcctcatgggcggccactgggccgtggatgcacgcctgacccatatcggttcggacggctacatcgaccgcggagccacagatcttaaatcctacatgttccagggtgcctattacaacggcaatacgatgctgaaactggtatcgtttggcggcaaggccaagacctacctcacctataacggcgtcacgaaggaggacatgaagcgctacggacgccggtaccacgacagcgggcagtacgtcacctcggacggccccttcgtactggccgatggcacgcacgtcgactactacgacgaccagacggacaactacctgcaaatcaacaaccaactgatactcaatcaccgcatcgatgaccgctgggtgatgaacgccacggcgttctacacgtacgggtacggttattacaagcagtacaaggacgacgcatggcttgcgggctacaccaacctgcagagcgacatcgaacaggccgacctgatccgcgaaaagatcatgcgcaaccacctgggaggcatcaacgcctcggcagcctattcggtacgcaacctcgacctcacgttcggcggttcgtggagctattactcctgtccccactggggcacgctggactgggtggacggcctgaagaaaagcgacatccgggggcgctggtacgacaacgatgtcgacaaacaagacgccaacgtcttcgtgcgcgccaactggacagtcgcccgggggttgcgcctgttcgccgacatgcaataccgctatgtgcattaccaggcatggggcgtcaacgacaactacaactgggacacctccgcgatgcagcctatcgacgtagataagaaataccatttcttcaacccgcgcgcgggcatccattacacgctcgccgaccgccacaacttctacgcatcgttcgccgtcgcacagaaggagcctacgcgcagcgacttcaccgaccgttatatgttctccggcgacaactcctatccttcgtccgagaaactctacgactatgaacttggctaccggtacgacacgccgaaattcagcgcaggcgtgaacctctactacatgaaatacaaggatcagctggtcgccacgggcatggtcaacgacggcgacgatgccctgaacacgaacgtggaggacagctaccgccggggcatcgaactttcggcgcaatggaaagccacgggctggttcacgctcagcgggcacgcaacgttcagccagaacaggatcgaggattacgtcgacgccctcaaggacagccccaccttcggacagaacctgggcgacatgaccatctcctactcgcccgacgtaatcgccggggtgctcttcgacttccactacaagggcttcgaggccgtattccacacgcagtatattggcaagcagtatttcacgaacaacgaaatcgacgccctgtcgcttgacagctattgcacgaccaacctcaacctgggctatacgctccgcacgaaagccgcccgcagcgtccgcttcgggctcatggtctacaacctcttcgattcggagtactgcggcaacgggtacggctattcctacatggacgacggcaagcgtacggacgtcgccctctacttcccgcaggccccgctgaacgtgctggccaacgtgacggtgaaattctgagaacagatggactggaaactcgtactgcaaatcgccggggtcgtgctggggctgctctacctgtggctggaataccgggccgacatccgcttgtggatcgtcgggctcatcatgccgctggtgcacggtgcactctactacaaggccgggctctatgccgactgctcgatgcaggcctactacgtactggccggcctttacgggtggatcgtatggcataacgcaccgcgcaggaaagcagcggccgaccggatcgggcatacgcccctgcgccaagctgcggggctgatcgccgtctacgccgcagcgcatacgggcatctacttcctgctcgtgggattcaccaacagcaccgtgccgttctgggacgcgatgaccacggccggaagcatcgtggcgatgtggatgctctcgcgcaagtacgtcgagcaatggctcgtatggctggccgtagacctggtaacggtggggctgtacctctacaaaggcatcccgctgacggcaggcctgtacgccctctactcggcgctggcagtcgcgggctaccttcgctggaaagcaaaaatgcgcgcatagcaatccggcctcaaaatgacggaaggccgtcccctgctacggggacggccttcgttttccgagtatccgggccgctgtgccaaatgccctatttcacatcggtgaggtagacattacggaactccagggtgccgccttcgctctggagcgcaatgtagcccgtgcggttcgtacccgaacattcgttctgcaatatgccgttgatatagacggtcatccggtcaccctggcaaacgatctcggcctcgttccactcgcctgcaggcttctcgcaaccggcatcgccgatacgcgcctttatagggaatttgccgacgggttcgatcccggcggcccttgcacccccgagcaacaccaggtcgcccgcacgcccggccatgagctggcattcgatcccttgaggccagaccttgtcgccctcctgcacgcgctggaaaatgccgctgttcgtagcttcgccgatccagcgccactcggcgtggagcctgtaatcgccgtactgccgcgcggtacgcatgtagccgaacggctgccccgcgatacggatattgccgtcccggacggtgaatacctccccggcaggcacttcgcccaggctgtcgacaacgcatacccaacccgcaaggtctttgccattgaaaagttcggttcgggcatttccgccgcacgaacccaaagccagcgcacaaaccagcgctacgaaaagaaatcggatattcatagtttatcgagtatttgatcggacaatctcagggccgggcaggatccggcacagcggctattcgggcaggccgtgttccccgacataggccagtatctcctcgcgcagggacttgggcgtaacgttctgccgcagcacgagcaggtaggaattgcggatctgcgtccggataaaggcatcgggcaggtcgcccgtcgtgcggatgtcgttccagtgctttttgctcgaatgccacgcaggcgtgacgtcgggatactcctcgcgcagggaaaccgcctcgtcgggatcgcacttcacggcgacccgcccgaaattctccatatcggcataggcatacatcttcccgccgaccttgtagaccagcgtagtttcgtcgaagggcgtacattcctcggtcaggggcagcgacaggcagtagtcgcgaaaagccaggacatccatagcaaactgattttcgggtaaagatatgaaatttttggcacacggattgcgttccagccataagtaaaaccaaaatcaaggaaacgatgaaaaaaattctcctctgtgtatccctgctctcgatgttcgcggcaggcttcgtaggctgctcgcaaaagcgggagtggaaccacgaacaacgcaaggccatgcgcgaagcgctgcgcagctaccgccagatggtttacctcgacgacctgaccgacgccgagttcgtactcttcaccgaccaggtggccggggagctggaaggcacctatcccgtctacgcgaccttcgtggagatgccgggcgtaaccgacacggtcgacatggtggtcgtcacgaccatcgtggacgaactgaacgccgacgcacgcaacatgcggcatatcttcccctacaactacctcgtagcgcagggcgtgcttcccgcaggcctcgaccacgaccagcagaaggctttttacaactgcttcgccgggaaggtgaacgacacctacgacacgatgtcgcaattcttcaacgccatcctggccgatacgaccgacatgtcgcagctgcgccagttgcaggggcagtgcgccaacgaccttttcgaatgggtgattaccgaagtcgatgtcatcgagagcgtcaactgacgcatcgcacgaccaaacgcagccgggcgggattttttgaaaaaatcccgcccggttatctttaccccgccactccgcgtaacatgcgctacacctccggcaccgtgcacgaacacgacgtctcggggcgtttgtcgtaaaattccttggacaccacgatccggattgccttgtggaggattgagaattcgagcggcgtttcgcccagcagctccccgtccacctcgaccgatatttcgggcgacgactcgatgcggatacggctgccgcgctcctggaggatatgccggatacggtagatgccgccgttgaacaggtagtggaaccggaacagcaggtgccagaaatgcaccggccggatgagcgacacgtcgagcatgccatcgtcggccacagcctcgggaagctgctgcataccgccgccgttgtacttgcaaataccgatggcgatgcttagcagcaggttgttgtagaccagccggtcatcgacccacaccttcattccggtggatttataacgaaagaattgcctgaccagacaccatgtgtagatccagcggttcttgcgccccttcttcttgaggtgcgagaacttgcgcaccacatgggcgtcgaagcccgcacccgcgacattggccatgtaacggctctggcggtagtgcgactcctcgtaggagaccacgcccacatcctgcaggaacgaatacccttcgctgatcgccttcacggcgtcctggtagcggttcgaaataccgaacgtgcgcacccagtcgttgcccgtaccgacggcgaccaccgcaagcagcacctcgtcggggcagaccttctgctggatgaacagcccgttgaccacctcgtgcagggtgccgtcgcccccgacgacgatgatatgccgatacccctcgttgacggccgtcacggtaagttccgtggcgtggaacttatgttccgtgaagaccggttcgcagagtatctgcgcatcgcgcaggtagcgcgatatctgcgggaaatggtcaagcccgcggccgcctccggccacgggattgacgatgacgaaccatttgacctttccggcttccaaaacacgctactttttgggaatgttgcgcagcgtgtcgaccatgaactcgtagaacttgccgaccgatgcgatctccaccttctcgtcgggcgagtgcgggtaacagatcgtggggccgaacgagatcatgtccatcttggggtatttgctgccgatgatgccgcactccagcccggcgtgaatcgccgttacggcgggctgcttgccgtaaagggctttgtacgaagcggtcatggccttcaggatcggcgaatccatgtcggggttccatccgtcgtagctgcccgaaagctgcaccttggcgccggccagtgagaacacggcggcaatggcctcgcccagcgcggccttttcggtgttgaccgaactgcgcagcaggcattgcaatttgaccgtctttccgtcggacaccacgcgtgcgaggttgctcgaagtctgcaccagccccggcatggccatcgacatcttctgcacgccgtcggggcagccgaccactgccttcgtaagtttctcagccacctcgcgggcaaccatctccgcaggggcttcgcactccctgatcttgaccgacacggcatcctcgatgcccgcgtattcggccttgacgaccttctcatacgccttcagctccttggcgaatgcctcgtactctttcgttttgaccatcaccacagcctcggcctcgcgggggatggcattacgcaggccgccgccgtccaccgaacacagcaacacggcgtgcgacgccgaagcggcgttcaggaagcggaacagcaccttgttggcattggcacgctggcatccgatctggatgcccgaatggccgcccttgagccccttgaccgtgatcttcgcagcggtataattccgtgcgggcgtcttctccgccgcatatttgaaggtgacgttggcatcgagcccgccggcgcagcccacatacagctcgccttcggtctccgaatcgaggttcagcaggatatcgccgcggagcaggccctttttcaacccgaaggcaccgtccatgccggtctcctcggttgcggtaaacaaggcttcgagggggccgtgcaccagcgtgtcgtcctccagcacggcaaggatcgccgcggcgccgatgccgttgtcggccccgagcgtcgtgccgtcggccgtgacccattcgccgtcgatgtaggcgtcgatggggtctttggtgaagtcgaacttcttatcgttgttcatctggggcaccatgtcgaggtgcgcctgcaggatgacgcctttgcggtcttccatccctttcgaggcaggcttgcggacatagacgttgtgcgcagcgtcctccttgcattccagtccccgggacttggcgaaatccatgacgtacttgcgaatcttctcctcgtgcgacgaggggcgcgggatgcgggcgatctgagcaaaatgtttccagacgagcgccggcttgagcgcagacaggttcttgtccataactattcggtttttaggtttgattgttcgggttctttccgggtatccccggcatatttgtcgaatgcgtcgacgatgtatttgaccagttggtggcgcacgatgtcgcgtttgtcgaactccacgatgccgatcccctcgacaccgcgcaggatctccatcgagcgggtcagcccgctgtcgcttttcttcggcaggtcgatctgcgtcacgtcgcccgtgacgatgaacctggcgttgcgccccatgcgcgtgaggaacatcttgatctgcgacagggtcgtattctgcgcctcgtcgaggatgacgaacgcattgtcgagcgtacggccgcgcatgtaggccagcggcgcgatctgcaccgtcccctcctcgaggtatttcgccagcttggccggcgggatcatgtcattcagcgcatcgtagaggggttgcaggtaggggtcgagcttctccttcatgtcacccggcaggaacccgagtttctcgcccgcctcgaccgccggacgcgtgaggatgatacgccgcacctccttctccttcaacgcgcgcacggccagcgcgatggccgtataggtcttgcccgacccggcggggcccacggcgaacaacaggtcgtttttgtcgtaaagtttcaccagcttttgctggttgaccgtacgcgcgcgaatgatattgccgttgttgccgtaaacgatgacgtccttgtcagccggggcttcctgtccggcgatatcaccggcgaaagcctggccgatgacttcggacgagatgtgcccgtatttgaggtaataggccaccaacccctccatatgccggccgaaccgttgggtttcggcctccgagcccagcactttgagcgacgaaccgcgcgctacgatccggagttggggatggagcgccttgatctggtcgaggtagacattccgggggccgtagagctcccgggggtcgacaccctcgatggtgatctcttttccgacagcttcggtcataggctaaaacaggtaaccgacgctcagggcgacgttatacgaacggagcttgtcgaggcggctgccgtcgggcagcaccacgtcctccttgcctttgaactggccgttgtaacgcaggtcgatgagcatgtgccccagcaatttgacgcccgcacccaccgtataggacatcgtgggacgtacgcggccgaaatccagcaggtcgccgcccgacttctgtttgcagtcgttcatcacggtgaacaccgggcccgcatagaaccggaacggcctgagcaggcgcagcgacacgagcaccgggacgtcgatcgagttcgacttgaggttgatctccttcgccccttcgggtttgatgcggagcccctggcgcacatacaggatctgaggctcgatggcgaaggcgcccagatttaccgccgtgacgataccggcctgccagcccagtttattcttgacatcggtcttcgacatgttggtcgtataatcggggacgttgataccgccgatcaccccccactcgacccgcgtgcgggggcgctgcgctaaagccggccatacgcaggcccccaacagcagggttattacaattttacgaatcattgaacaactgtttatttgattttcaacttgatacttgcccagagcatataacccacgcagagggcgacgaacagcatccccaggtgggggttccccgtccagcggatgattgccccgcatacgggccccgagacggccccggcggcaatcgccataatcatcagccccgcgaccccgttggcctgttcgggtacggctttggtcgccacggcatagaaggtggcgaagacgcaggccatggcgaagcccatcagcccgacggccgcataaatcgcagcctcgttgcgtacgaaaagcagcaccacgcagagcaccagcgccccggccatattccagctcaggtatttcacgtccgaaaggcgcaccagcacccaggccccgaccagcgtaccgacgatgcggcaggcatagaaacccgtagtggtgaggatcgaatcggggttgtcgatcagccgtaccgagaggaacccgatcccgacgtccccggcgatgaaacacgccacacccagcgtacacaacaggactgccctgttcctcagcagccggaaacaatcggacatccccgccgcatgcccgctgcgttcgggttcggccacggcggtaaattgcagccagatgccgcccagcacggtgagcccggcatagatcggcagcagcaggcgccacgaacccgtgagcgccacgagcgccgtgacgatgggcgccagcaacagcagcgaggtattgcggaaaatctgccccacggtcaggtagctcgtcatccgctcgcccggcacgatggtcgccagcagggggttgaccgccacctggagcgccgtattgccgatgccgagcagcccgaagccggcgaagtaccagcccagtgcgcagccctcgcccgcgaggaagggcaccagcaagccggcgatcgtgaatgcatagccgatcatcgacatggccttgcggccgatgcggttcatcagtgccgccaagggggtcgacaggacgaggaaccaaaggaacaccatcgtgggcaggaaactcacggccgcctgctgcgatgcgggaaattcggtggcgatacgccccgagatcggagccacgatatcgcagaaccccatgataaagaagcccataagcacgggccagagaacacgtttatctactttgtcgacacgcatcggcgacgattttttatccatacgatttttcaaagttacgtttttttggcgaaacgcgaaacatcgacccgtttttttcaccccttactgcaacttgcacgcccgaatcggcacggcaccgcctccccgtacgccacggaatccctgctggatttttttacgatacaaacgtcgccggcgacttgcatattatctgttttttcttatctttgtcctcagactaaacagatccgacaatgttaatgaccgcattccccataacgttgccgctcgaagacccgattctgaaattcctgctgatcctggtcatcattctggcggcaccgttgttactgaacaaactcaaaatcccctatttgctggggctcatcatcgcaggtgcggtgatcggcccccacggcctgaacctggttctgcgcgacagcagcatcatcctctcgggaacggccggcctcctgtacatcatgttcctgtcggggctggacatggacatgtccgatttcaagaaaaacagctggcgcagcctcatcttcgggctctacaccttctgcgtgccgctcgggctcggcatcctggccgggtattacatcctgggcttcccgatttactcctcgatcctgctggccgggctcttcgcctcgcaaaccctcatcgcctaccccatcgtcagcaaactcggcatctcgcgcgacaaggccgtcacgatcgcggtcggcggcacggtcatcaccgacacgctcgccctgctgctgctcacggtcatcgtcgggatggccacgggcaatgtcgacgagacattctggtggaggctcagcgcctcggtactgctctcgatcggcatcatcctgttcctgttcccgctgctggcgcactggttcttcaaacattgcagcgacagcgtatcgcagtatatcttcgtgctggcgatggtattcctgggagcctacctcgcccacatggccgggctggagccgatcatcggcgccttcctctcgggactggccctcaaccgccagatcccccgcacctcgcccctgatgaacaggatcgaattcgtgggaaacgccatcttcatccccttctttctgatcggcgtgggcatgctcatcgactaccgggcgttcttccgcgactgggaaagcatcgaagtggcgatggtgatgatcgccctgattacgctcgcgaaattcctcgcggcctatttcacacaaaagaccttccggctctcgaacgaccaacgtacggtgatcttcgggctgagcagcgcccatgtggcggcgacgctcgcggccgtcatggtcggttacaacgtcatactcgggcatacggcggacggcgaaccgatccgcctgctgagcgaaagcgtcctgaacggcacgatcctgatgatcctcgccacctgcaccgtctcgaccttcgccacgcaacggggcgcacacaacatcgcaatgcgcaatgcgcaggacgacgacaaggagccgcaggaggaagaccatatcctgatcccgctcgccaacgagcagaccgcctacgaactggtctgcctgagcatgacgctcaaaaaggccaaggagcggaacgggctgtatgcgctgaacgccatcgacaacaaggtcgaagaccccaacctcgaaaaacaggggcgcaaactgctcgacatggcggcgcaggcggcggcatcggccgacaattacatgcagcaactgctccgctacgacgtgaacatcgccaacgccatcgtcagcgtggtcaaggagcgcaatatctccgacatcgtgatgggtatgcaccacgaccgtacgccgggcgggtcgggcatcggcaggatggccgccgacctgctgagctacagcaacgtcaccacgttcttctaccaccccgaacaaccgctcaccaccgtcaagcggcacctggtcatcgtgcccgaaaaagccgagaaagaggccgggttccagctctggatgcagaaattacgcaacctggccgagaattcgagtgccaggatcgtcttctacgccccggccagcacgatgcaatacctgcggccttcgcgcggaaaacgctcgtcgaaagccgaatacgtggtttccgactgctggaacgacctaacggcgctgacctatgaaaccaaacgcgacgattgcctgtgggtggtgatgagccgccgcgaccggctctcctaccaccccgccatgagcaaggtgccggggtatatggagcagttcttcgccgggcacagtttcgtgctggtctatcccgtacaggcgggcgatacggacaaccgctatctgtaacgtacgcccgggcaaccggtgcggggagtttcccgtttccggattttatactacctttacgggtgacggatgcaccccggaaaaacccggacaggtttggttttgcggccgccttgtattatctttgcatcagaaaaaagaaatagagtatgagtctcgtagcaatcgtgggccgtccgaatgtcggcaaaagcaccctcttcaaccgtctggtaggccagcgaaaggccatcgtcgatgccacggccggaaccacccgcgaccgccattacggtaagaccgactggaacggcagggaattttccgtgatagacacgggcggctacaccgtcaattcggaagatatcttcgaggacgaaatccgccgccaggtattgctggcgatcgacgaagccgacgtgatcctcttcctggtcgaagtcaagaccggcatcaccgacctcgacatgctgatggccgatctcctgcgccgcacatcgaaaaaggtgatcctcgtctgcaacaaggtcgacaacaacgaccagatatactcttcgcacgagttctatgccctggggctgggcgatccctactgcatcagttcgatgagcggcagcggcacgggcgacctgatggatgccatcctcgcggcgctgcccgccgaggccgtggccgaagaggaggagaacctgccgcacatcaccatcgtggggcgtccgaacgtcggcaaatcgtcgatgaccaacgccctgctgggcgaggagcgcaatatcgtgacctcgatcgccggcaccacgcgcgactcgatccacacccgctacaacaaattcgggatggacttctacctcgtggacacggcgggtatgcgcaagaagggcaaggcgatggaagacctcgaattttactcggtgatgcgttcgatccgcgccatcgaaaattccgacgtctgcatcctgatgctcgacgcacagcaggggctcgaatcgcaagacctcaacatccacaacctgatcgtccgcaaccgcaagggttgcgtgatcgtggtcaacaaatgggatctggtcgagaaggacaacaatacgatgaaggagtggacggagttcctgaagaagaaactcgcaccgttcaacgatattccgatcatcttcacctcggttctgagcaaacaacgcattttcgacgtactccagacggccatccgggtctacgagtcgcgcaaacgccgcatctcgacctcggcgctcaacgatttcctgctgccgctgatcgaaaattacccgccgcccgcgaccaagggcaaatacatcaagatcaaatatgtaacccagttgccgacgccgacgccgcagttcgcgttcttcgtcaatctgccgcagtacatcaaggagccttaccgccgcttcctcgaaaacaacatccgcgaccactgggatttctccggtgtaccgatgcagatctacttccggcagaaataaggacgggctgcggcatcgtcaggtcttgtcaccggagaaatccggcctcgacattccccctaaatccccctttggcaaagggggacttttacaaaccgggatgccgatgcaaatctacttccggcagaaataaggacgggctgcggcatcgcccggtctcgtcaccggagaaatccggctctaacattccccctaaatccccctttgacaaagggggacttttacaaaccgggataccgatgcagatttgcttccggcagaaataaggaggagaatatctgccctgccattcgcacaaaacaaaaagggacgacatgcagtgtcgtccctttttaaactccgttacgcttcccgccgtcgcgccaatagcttacgcgccgtatcggagagcagcaccacgacaccggcaaggatcgcagtatcctttatcaccagccgtcccgcgcccgagagcaacgggaacccgtattccccgctgcccagatccggcacccaaacttcgggcgtagtcaccagaaacgacagcgtgccgagcgtcataatcacggccagcagctccccggccaggccgatgcgggccgagaagaacccaaggaaggtcaggatgccgattcccataatcagcaaccccagcccgtgggaaaagccataggtgttgttcttttcatgccacgcatgctttgcagcatcgtattcgccctccttgagtttataatccctgtactcgggtgctttttcgttgtagaagaaactcatgaagggactgttcgccacgaagggcacgatgccttcggcttcgtaattccggaatttaagtccgccgatccagacaaaaatgataaggatagccacccggatcatccccaggccgagccgttgtgcgttggccgcaattttcagaaagccgtaaaacaggcaggaaagtctttgcatcatattcgtttttcgttaattgtccgatgatgcaaagatctggattcaggatcgcacacgcgatggcaggaatgccggaaatgttgggaattattcccttttttcgcgctgccggaacccggtgatgctctcgccgttcattttagcgaagaaacggctgaaagccgcggtatcctcatagcccagcaggtaagcgatctccttggcacttttcggggtatagagcagcaggcggcgcgcctcggcattgacccggtcgtggatgatgttcagcggcgagggctgcccgcacgaggcgaagaggttggcgagcgtcttgggcgaccggtgaagcagcccggcatagtcctgcacccgtttcttcgtccggaaatgctcgtcgaccagcacatagtagcggcgcaccgtgtcgaagagtttttcacggtcggcaccgacggagaaatgctcgcgcgagatgcgcgtacatatgataataaaccgtttgagctgcatgcggagcatctcttcgcgcagaccgtcaactaccccgtattcggcccgcaggtcgtcgaccacccgttgcagggcggccgtgcgcatttcggagagttcgagccgcagcacttcggaactgccgttgaaaagcagtccgctgcacgacacctcgccgtcatgaccgaaaatgcagtagaaattgctgtcgaaagcaaggatcaggtattcgccctcggcgcgcgtcacgtcgagggtatggagcggcgtcaggggcagcagcatcccagcccggagctccatgggaatatggtcgacttcgagccgaaggcatccgcgccttacccagacgaatttatagagcccggggctgcgatgcagcgcggcatcgcggtagtcgctgcacaggacgaggttgcctttcaggggcgtgctgaatgtcagatccatggttcggagatttaggttcggggaaacaatcgcaagcggtatctcaaagataatgcacaaaaataaaaacacccgcatttcgggccgaaaaatcgcatccgccttcggaggcagtcaaggtacggttttcggcctgtataacttcaggttataccatcatcagaattaccgatttgcaaatccgtcaaacataacttacatttataaaaaatctaacccgcataataagaaaaccccatggacaaaaagaaacagcttaccgcagagaacggccggccgatcgccgacaaccagaacatccagaccgcaggcgtccgcggccccgtgacgctgcaagacccgtggttcctcgagaaactcgcgcatttcgaccgcgaagtaatccccgaacggcgtatgcatgccaaaggctcgggcgcattcggcacctttacggtgacgcaggacatcaccgaatacacgcgtgcgtcgatcttcgcccgggtcggcaagaagaccgaatgcttcgtgcgtttctcgaccgtcgccggcgagcgcggcgcagccgatgccgagcgcgacatccgcggtttcgccatgaagttctacaccgacgcgggcaactgggatctcgtgggcaacaacacccccgtattcttcctgcgcgacccgctgaaattccccgacctgaaccatgccgtgaagcgcgacccgcgcaccaacctgcgttcggccaacaacaactgggatttctggacgctgctgcccgaagcgctgcaccaggtgacgatcaccatgtcaccgcggggcattccggcatcgtaccgccacatgcacggattcggaagccacacatacagtttctatgacaaggacaacaagcgcacgtgggtgaagttccacctcacgacccagcaaggcatcaaaaacctgacggacgccgaagccgaagcccttgtgggcaaagaccgcgagtcgcaccagagagatctctacgagtccatcgaacgcggcgatttcccgcgctggacgatgtacgtgcagctgatgaccgaggaagaggcgcgcaactacaagctcaacccgttcgacctgacaaaggtgtggtaccacaaagatttcccgctgcacgaggtgggcgtactggaattgaaccgcaaccccgagaattactatgccgatgtcgagcaggcggcgttcaacccgatgaacatcgtcgaaggcatcggcttctcgcccgacaagatgttgcaggggcgcctgttctcctacggcgacgcacagcgctaccgcctgggcgtgaaccacacggaaatccccgtgaacaggccccgctgcccgatccacgccttccaccgcgacgggcagatgcgcaccgacggcaactacggatcggcaaagggttacgaacccaacagctacggcgaatggcaggacacccccgccctcaaagagccgcccctggccgtgaacggcgacgtttacaactacgacgagcgcgaactggacagcgactatttcacgcagcccggcctgctgtggcgcgtgatgtcggcagaagaccagaaagccacctgcgagaatacggcgcgcgccatgggcgatgccgagctgttcatcaagcagcgccacacgcgccactgctactatgccgacccggcatacggcaagggagtggccgaggcgctgggcatctcgctcgaagaggccctcaaggccgaagacccggcgcatccttcgtgggatccgcgtaaatgaccggcggaattccgcgcaggcaatccgcgcagcccgctccggcaaaccggttcgcaccccaccgccggccacggcaggccgatgcctgaaaacagcaggcggaaaaaccgccggacaataacggcaaggccgggctttcagaaagcccggccttgcattttacccatgcagggatatttacggctgctgccggttagggaaaccttcagcccggcaaccagcgtgccgtctctccctgtgtatcccgcacggactactcccggggcacgctaccgcccggctgcggggtttcgccgccctgaggcttatcgccgcggcgacggttcctgcccccgcgatggcggtgtttgcggtcacgcgtcccacgattgccttcgccgcgcccggaggcgtggtcgttatcggcaggtgccgcctgagggactgcgatcccgggattttcggcagccgccgcaccccgttcccggtcgttgcggcgttcgcgccctgcgcgttcgcccttgtctgcgcgtccgcgcccacggcttccgccgttcgaaccgccgcggccacggcctccgccacggccaccgcgcccacggccgttattgacggcaggattgtatacggggcccgcgcccacgctggccggcaattcggccttgcggatatccctctcgatgaacttctcgatcgcatggaacttgccctgctcgtcctcgctgacgaacgtcacggcgctgcccgtagccgcggcgcgcgccgtacggccgatacggtgaatataatcctcggggtcgtgcggcacgtcgtaattgatgaccagcccgatatcctcgatgtcgatgccgcgcgccacgatgtccgtagccaccaggatcgacaccttgttgttcttgaagtcgagcatcacctcctcgcgctgcgcctgttccaggtcggaatgcatggcggccacattgagtttcatgcgcttgagcgtgtgcgccagctccttgaccttgagcttcgacgacgagaagatgatcgtcttcgaatcggtcggctcggcgaacatctcgcggatgatgcccagcttctggttctcgtagcagacataggccgactggtcgatcgcctcgttgggtttcgaaatggcgatgttcacctcggcgggattgcgcaggatcgtcctggccatctcgcgtatcttcggaggcagcgtcgccgagaacatgatcgtctgccgctctttgggcatgtaggagacgatcttcatgatgtcctcgctgaaacccatgtcgagcatgcggtcggcctcgtcgaggatcaggcactcgacgtgcgaaaggtcgatgccgctgttctggatgtgcgagatcatgcgcccgggggtggcgatcaccacgtccgaacccatcagcataccgcgcttctgcacatcccagcccttgccgtcgccaccgccgtatacgaccgtggtcgacacgggcaggtagtacgaaaatccctggaactgctggtcgatctgctgcgccagctcgcgcgtcggcacgatgatcaccgactttatcacattgtcttcgttgccttcgatcaacagcctgttgagcagcggcagcgtgtaggccgccgtcttgccggttccggtctgggcgcaaccgatgatgtcgcggccctccaggatcaccgggatggtgtgttcctggacaggagtcatctcctggaaattcatatcgtcgagtccgtcgaggatctcatcctccaggtcaagttcgtcaaatcgcatcttacgtttcagtttattatatccttaaatgatttcttctccgaacagcgtcgccggggtgcaccccgtaatacgcacgcgcacatagtcgccgacgtcgtgccggccgcggtcgaagaccacgaccttgttctgcgacgtccggcccgaaagttgcttttcgtcgcgcttcgaacgcccctcgaccagcacttcgaactcgcgccccacgtcgcgcaggttgctcgcatgccccagttcgttttgcagggcgatgatctccgaaagccgccgcgacttcacctcgtcgggcacgtcgtccggcaggtgctcgtgcgcgaaagtcccgggacgctccgagtatttgaacatgtaggcaaactcgtaccccacctcgcgcatgagcgaaagcgtcgcttcgtgctcctgctcggtctcgcccgagaagccggcgatcaggtcggtcgtgatggcgcaatcgggcaggtaacggcggatggcggcgatacggccgagataccattcgcgggtgtacttgcggttcatacgcccgagcatcgacgaggcgcccgattgtgcgggcaggtggatcgagcggcagatgttgggcatcgaggccatgacctccagcaggcggtcgctcatgtccttggggtgcgacgtggcgaagcgcacgcgcagcgacggcgaaaccgacgccacgaggcgcatcagttcggggaagtccacctcgccggccttgtacgaattgacgttctgccccagcaacgtcacttcgcggtatccgttctcgaagagcgagcgggcctccgcgacgatcgtttgcgggtcgcggctccgttcgcggccgcgggtatagggcaccacgcagtaggaacagaaattattgcatccgcgcatgatggccacataggcgctcacgccgttgcggtcgagccgcacgggggcgatctcggcataggtctcctccgtggagagcaggacgttcacgcccttgccgcccgcttcggcctcgcgcaccagacgcggcaggtcgcggtaggcatccggcccggccacgacgtcgacgccgtaagggccctcgaccaatttctccttgaggcgttcggccatgcagccgatgatgcccacgacgagccccggtttggcccggcggtagcgtttcatctcggccagacgcccccagatacgctgctcggcattgtcgcggatcgagcaggtgttgatcaggatgacatcggcctgaccgatatcctcggtgtagacgtatccctcccgctgcatcagggcgaccacgacctccgtgtcgccgacattcatctggcagccgtaggtttcgacgaaaagtttgcgtccggcgcccgacagggggcgcaatgtattcgtattgagtttaaattccacgttccaaatttccgttattccgcgtgtatctcgttcttgtcggggaactgtttgaacccttcgccgaacgtctcgtaggcatcggtcacgaccacgaacgccgccgggtcgatctctttgatcttatgttgcacgaggtgcacctccttgcggctcacgaccaggaagatcatgtcccgcgaagcgtccgtatacatccccttcgacttgatgtaggtcgcactgcggtcgaggtcttcgatgatgaagcgtttgagcgcctgatggtggtcgctgatgatgaagagcagcttgtcgtacgacgctccgttgagcaggtaggcgatcacacgcgaggtgatataaatcgtgatgagcgaatagagcgtcagcatccagccgttcgaagcggcttcgcccgtccccagcccgaagccgatgacggccaggccggacagcacgacgaaaccgtcggccaggaagatgcccgacgagaacttgatgcccgcgaatttctgcaacagcatcgccacgatgtcggtgccgcccgtggtcgcctgctggcgcacgacgatgccctgccccacgccgatgacgacggcgccgatgacgcacgtcagcagcaagtcgttcgacaggtcgagccgcccgttcagcagcagcgacggatcgaggctctcgaccgccgcggcgtcgggatagaccagccgcgtgagcacgttcatgaagccgggcgtataaagcgcagccagcaccgtacgcgttccgaactgcccgccgaaaaccagcatcgcaacgagcatcagcggcacgtcgaacatatagccgaacgtacccacctggatcgacggaaaaatgttgtgcagcacgatacccataccgtacacgcctcccggcacgaaattgtaagggttcacaaacagcacgaagccggcacccatgaccgaacacccgaaaaagatcaggaaccacgagcgccaccacgcccacgagcccataggttccagtaatgctttcgtattcataccctgttatacatttaaagtatgcaaagatacgatattcccccgaatccgccagcagaacggcgcggatttttcacgccgggcttccgtttccggattttttaattatatttgcattatacaaacccttggaaaaccgttatgatcctcacatattacaccgctaccaccatgattatcatcgcctatctgctgggctcgattccgagcgccgtgtggatcggcaagaaatattacggcatcgacatccgcgaatacggcagcaagaacgccggtacgaccaacatgctgcgcgtgctgggcaggcgggccgcactgcccgtattcgggctcgatttcctgaaggggttcgtggcggtgacgatcatcgacctgatgaaatacgacagcgtattcgccgacggggccaatgaaaactggttctacatcctgcgtttcatagccgtgttcgccgccgtggtgggacacatcttcccgatcttcgccaatttccggggcggcaagggcgtagcgacgctcgtcggagccatcatgggcgtcaacgccccgctcgtactgctctgcttcggcgtatggttcctggtgctgatggtcacccactacgtgtcgctggcctcgatggtcgcaggctgttccttcccgatctttacgctcatatcgccgaaggtcaaccacctggtgccgttcgtggttttttcgttcatcatcgccatcctgctgatttacacccaccgcaagaacatcgagcggctgaaggccggcaccgaatcgaagatatacatctggaaaccccggcatgtaaaagtcgacccggaagaagccaaagacaagggagcaaacaaataaggctccggaagcttccccacaggactttttggagcaaaaagtaagcacaataggataaaaaatgcgggcaccctgctggaaaatcgtttttttgtctatctttgcaccggacattaggacgcaatcatgttagaggaaaacctgataaaaatatacgagacgagtttccgcgagaaccgtgaaatgccggcactgaccgactatttcaagggcgaaacattctcgtattacgagatggccaaggagatcgccaagctgcacctcctgttcaaaaaggccggcgtaaagaagggcgacaagatagcgctgatcgggcgcaacaatccccggtggtgcatcacctacatcgccacgatctcctacggcgccgtaatcgtcccgatattgcaggatttcgccccggccgacatcatccacatcatcaaccactcggaaagcaagctgctctttctgggcgacaacttctgggacatcatcgaagaagaccagatacgccagatcgaggccgtgttttcgctcaccgatttccacgccatctacgaacgcaacggcaaggcgctcaccaagttccagcgcgatatcctgaaaaactaccgttcgaaatatccgcgcgggttcagcgtaaacgacatcaagtaccccgagatccccaacgacgaggtcatcctgctcaactacacgtcgggcaccacgggctattcgaagggagtgatgctcacggtgaacaacctcacgggcaacgtaagtttcgcccgcggcatggtcaacacgcagaccggcacccactatttccgcaagggcggacgcacgctgtcgttcctgccgctggcccacgcctacggctgcgcgttcgatttcctttcgccgctggccgtcggcgggcacatcaccctgctgggtaaaatcccgtcgcccaagatcctgctggaagccatgtccgtggtcaagccgacgatcatctgctgcgtaccgatgatcctcgaaaaggtctaccgcaagcaggtgatgccgatgctcgaaaaaggcccgatgtcgatcgccgtcaagattccgctgctcaacacggccatctactcggtgatccggaaaaaactgctggatgccttcggcggcaacgtcgacatattcatcgtcggcggcgccccgatgaatcaggagaccgaatcgttcctgatgaagatcaagttcccgatcaccatcggttacggcatgaccgaatgcgcgccgctcatcagtttcacacccgacaacgaattcaaggcgggctcctgcggccgctacctgaaaggtctgctcgacgtccggatcgactcccccgccccggaacacgtggccggcgaaatcgtcgtgcgcggcgagcatgtgatgaaaggctactacaagaacgaaaaagatacggagaaggtactcgaacccgacggctggctccacacgggcgacatgggcacgatggatccggacgggacgctctacatccgcggacgctcgaagacgatgatcctctccggaagcgggcaaaacatctatcccgaggagatcgaggacaagctcaacaacatgtacctcgtactcgaatccctgatactcgactcgggcaacggcaagctcaaagcgatggtcgtccccgactacgaacaggccgaggcggaaggcgtggacaagaacgacctgccgcagatcatgcagaacaacctcacggagctgaactcgctcctggcggcatacgaacgggtgtcggaaataataatttatccgacggagttcgaaaagacaccaaaacagagtatcaaacgttatttatacagtccgtcgctactgaacaaataaaaaaacatacacataaaggctcagcaggtaaccacttggattctctatcccaaattcttcatagtcactgaatccattccaacaatgaggcgtcactaatagttcggttacctgctttttttacgaaagctacccgggagcaccgggtaacttttttttattatctttacggcatgaaaatgacccgcaaacaaaccgtcggagaaaacctgctctacgtaatggtgtgggcagccatcatcctggtgccggtgctcaattcgcagatgatgtcggaactgcacatcagtttcgaaaacgtactcatcgcatggcggcagatagccccctatttcattatcttcatcatccataattccgtcctcgccccgcggctcatgctgcgccgcaagtacaaaacatacctgctctgcgaccttgcactcatcatcgccgtattctggctggtgaacatatacgaagaacacctcaccgaccgcttcctcccccacggcgaccccgaggcgttcgacgcctaccggaaagcttcgttctcgaacctggagatgtattggaacgtcgtgctgggattctttatgacgggggccaacacgggtatcaagctcatttaccagtcgatgcgcgacgagcagcagatggaagaactcaaacgccagaacctggaagccgaaatggactatctgaaataccagataaacccccatttcttcatgaacacgctcaacaacatccacgccctgatagacatcgacaccgaatatgccaaaaatgccgtgatcgagctgtcgaagatgatgcgctatgtgctctatgaatcggggcgcgagatcatctccctgaacagggacatccagttcgtacagaattacatcgggctgatgcgcatccgctacaccgacgccgtggacattcgcgtggaatacccgcacgacctgccgccccaggtttccatcccgccgctgttgctgatcgtattcgtggaaaacgccttcaagcacggcgtgagttacagcaaaccgtcgttcatccacatgcggatcgactacgccgacggcaaggtcgtcagcaccatcggcaacagcctccacagcccgcaggcggagaagcacaacgccggaatcggactggagaacgtccgcaaacgcctctcgctgatctacggcccgaaaaattattcgctcgatatcgaagagaccaaagagacctataccgtaaaactcgtaatacctaccctcaatgcttaaatgtatcgccatagacgatgaaccgctggccctacgccaactgaaaagctacatcgagaaaatcccgtacctggaacttaccgcgacgtgcaacaacgcgctcgaagcccagcagttactggcttcgcagcatgtagacctgatattcgtcgacatcaacatgcccgacctgagcggcgtggagttcgtccgctcgctggtcgacaggccgatggtgattttcacgacggcctactcggaatacgctgtcgaagggttcaagctcgacgccgtggattacctgctcaaacccttcagctttgccgacttcagccgctcggcggggaaagccaattcgctctacgaactgcgccacaaccagcgtgcgggggaacccgaggccactcccgaggcactgcccaaagacaaggaatacatctccgtgaaagcggattacaaggtttcgctggtcaagatcagcaacatcgtgtacctggaaagcgaaggggagtacgtgcggatgcacctcgacgacggcacgacgatcaccacgcttttccggctcaagaacatggaggcggcactcccgtcggacatgttcatgcgcgtgcaccgttcctatatcgtcaacctgcgttgcatcaaaggctatgtccgcggccgcgtattcctcagcgatacggaatacgtccccatcggcgaaaactacaaggagagtttccagcactacatcgaatcgaatttcaagaatttatagggccgagaaatcggggaatcccgacaactggacgtatttgccgtcgcggtactcgcagcagtagtgccgcaggccgttggtcaggatcacgaaccgcgcccccagcaccgaattgtagcgcacagcctgcgccagggttcgctcgccgatccggatttccggcgctttgcattcggccagcaccagcggctcggcacggtcgccgaccaccaccacgtcggcccgctgcggctgcccgttgaccggcacggcatattcctgcacgacgcgcttgggcagcaccccgcagtgcgaaacgaggtaagcgatcaggtggcgccgcacccactcttcgggggtcagcacgaggtaaataccccgcaggtcatcccacacctcgacctgtccctcgcggcggcgggcacgcagccggatggcaggaaaattgagtttggggagcgcagacatcttagttccggaaaatttactatctttacgtgcacaaatatacgaacattttcgatacgccgggccgcacgggccactcgtttgtccgggcgcaaggaaatggtcacaaaaaacaaccttatgaggagtattctttcgatcatagcacttttttcgtgctgcacgctggcggcacaggagtatattccgacctacggccgcgaaccgatgcgcggtgaactgctcgtctacccaagcgcccgggaggctgcggaggccgacggcagcgacaacaaatatttcacgcgcctgaacgaatggacgcaaaaggggaacagtttcacgacggacttcaccgtaccgttcgcctgggccaaccggcaggtgttgttccggctcggatgggcatcggccgactatgagatccgcgtaaacggcgaggcggtagcctacaacagcgactgcaacgccccggctgaattcaacctcacgcgccatgccaaagaggggcgtaacacgctggaggtcattctcagttccccgtcgaaggtcgaacggctcgaaagctggaaaaacgacgcgtcaccggccatcggagcggcatgggtcatgagccagcccacattgcgcgtacgcgacatactcaccaagacatggcgcagcaccgaagagggagacaacgtcatggccgaagtcggactcgtcgtcaagagcgaagccctcaacccgcgcacgtcgcgcgtccactacgaattgctgtccccagccggtaagacctcggcaacgggctacaaggacatcaaactcaacatgcgcggcgaggacaccctgcggttcctggcacgtattccggacagcctgctttggagcccggaaaagaccacacgcttcaccttgcgggtcaaaacccagcacgaaggccgctatatggagtatatcgaggttccgctggggttccgtaccgtagaggtacaaaacgggcagttggcggtgaatggcacccccgtcacgctccgcacgcgcgaggttcccacccaggcctcggcagacgagatcgcggcattgcgcggacaagggtacaacacgctcaaactcctccctggcccagtgtccccaacgctgtatgacacctgcgacacgctgggaatgtacgtgatcgtacaggcgccgatcgacacccgcagcagcggtgaatcgcggcggatcggcggcaatccgtcgaacgacccggaatggctgggggcatacgtcgaacgtacggcggacagctaccatgcctcgaaacggcatccgtcggtaatcgctttttcgctggccacgcaatcggccaacggcatcaacctctacgaaagttacctggacatgaagaagtccggcgacccgcggccgttcatctatcccgatgccgccggagagtggaacagcgacaaactggagatgcaataaacccgaagtggctctgcgataacgagaaaagcttttattgcaaaaaaatcgggatttttttgcaggatttttttgcaataaaaaaaaatatcactaattttgcactcgcaatcctaaaggattgatgcctctttagctcagttggtagagcacgacactcttaatgttggggtccagggttcgagcccctgagggggtacaaagcaaaagactgataatcaatgattatcagtctttttgtttttgtgttcctgccctgtcgtcgggcatttttgggcgggaaagagagcgttttcggggaaatgtttaacactaaatcagtcggttaaacttgtttgcgcaacaatgcaaacaaatgaatatcagcattaacgccgtctttcgcaaagacagaatgaacaatcaaaacgccgcgcccgttcacctgcgtttaacacaaaaccgaaaacttaaacacatcagcacgggtgtaacactcaacattaatgaatgggattttgaaaatcaacgtgttaagggccaaactcccgaattgcaggcgttacaactccgcatcgacaccaaaatcgacgaactccgccgcaaaatcaaacgcttggaagcattagaggtagaggttactctcgacaatcttttggaaaccaacgggcggaaaataaactgcacggtcggtgaatatctgaaacagaccatcgaacggctggaaacactcggcaaatacggctcggcctccaaacaccgctcgttgttatcccgtttgtcgcaatttcggtcgctgaatatctgatttgacgaaatagaccttgcatatcttcacgactttgaactgttcctgcataaagagggcaacactaacaacagcataacaacataaattttagctaaaatgaacagaataccaaaaacagaatgacggcagagcagcgatgaacagcgcatgatgatttgaaaaatcgttgccgatgataacttttacgggatgtgcttggctatatcacgcaaacccgatgaatttgcgcccgcgatttatgtatacatgcctgacgatacagatagagatatacaacttttcagcgcaaagggcaaataacagtacagatgcaatgtacattgactgaatccaacgcagagatattgctccttatgccgaatatccttgaatggggatacgataagataaacctattcgaattgcatataaaaagcgatacggttattatcaactatacgacaacagaggggaagcaaagagattttaaattcccgctggctgggtttaaggagaaatatttggaacaatttatataaattatctatctttgctcatacgatatgccgaaactttatatcatagcgggttgtaacggtgcaggaaaaacgactgcatcctacaccgtattggttgcaaagagttcgtcaatgccgatgaaattgcaaaagggctgtcgccgttcaatcccgaaagcgtggcaatcgaagcagggcggctgatgttgcaacgtatagatgacttacttgccgagggcgcggattttgcatttgaaacgacgttggcaactccgttcctatgtgaaatttatcgaacgggcacacgcgaaaggctactttgtaaccctactttatttttggctaccgactcctgaacaagctatcgagcgtgttgcaacacgcgtaagcgagggcggccataatatcccgtcggatgtcattcgccgtcgttatgcgaacgggattaggaatcttgtaacactttatacgccgatttgtaatttctggacgatatacgacaatagttcggcagatgcagaaattaaaatcatcgcttcgggagcgaaaaacacaacaatcaaaatagaagatacgttatcctacaaaacaatttcagactatgagcgagattgaaataaaacaaatgcaggagaaaatcaatgcagggattttacttgcccgaaagcgtctgattgagaaaacaaaaaaagaggacggcgaattggtggttgtgcgagatggaaaggtcgtacgcatcaaagccaaagaccttaaataattctgtctaattgagaaatatatcctcggccatacggtcggggattttttatatagaaatcaaagctactgaaaattgccgaaaacagacgaacggcgagagggtgattcatatttaaatcagtcggttacggacaaaaacttcgtttttgtccgcgaagtagacacaacactctcaatgttgggattcagggttcgagcccctgagggggggggcagaaaagcagttgaaagatactgcaacaaacagaaaaaaccttggctaaatctttcttaatctttgattgagcacatgcacttctatgcccggtatcgattcgataaaccggcttcccaacaacatggagggcgtgtaatatccgcccgggccggtataatccagacaatattgcgcaatccggataccgaccgtggcggtcagagcgtagacattgggggtggacatcgtcatttccagcttttcgccgtccggagcctcggcctcgccccagaattgtccccgcccggcctccagcgctttggcgtcaggcccttttttcatcagccagccagccagacgcttcgtgatcttctgcccgaactgggtattcagaatccctttgaccgggttggtcaatcgtatcatatagatgctcattctcggcatagccatatagactgcgccatcgggaactccggtagatattccggaggtgaaaacatccccccaggggatcgtcatagcccactggggcttgttctgaaacgggattttccgcatctgaaaggcattcgaaacgactttcagcataccgccctcgcggatcaacccgcctttgccgaaactctcgatcatggtgttgaccgtgccgatactcggattggtgccgaacgagagagccagatcgatgcgcgtggcggcgggcagtttctccttaagcatcgccgccagacagtcggttggcacgatgtcggttccggcacctggcaaaatgaggacgttttgctgccgcgcctcttcatccagcgcatggcatttccggaagatgtcgatctcgcccgtaatgtcgaggtagtggatctgttgcgcaagacatgctcgcgccagcggctccgccgtggcggaaaacggccccgcacagttgagtagtacgcttatatcctgtaaattgcttccggtattccgtacaccgaaagcccggcattcgaggctcagttccgtagcgataggtttcagcttttcggcatctcgcccgccgataatagggcagagcccctgtgccacagcctcgcgcaccatcagctctccggcatagccgtaggccccgtagatcatcaactggttatttttcatcggatctcccttttagtcaggtgattcaatacgactttcgccatttccttggagctgagcggattctgtccagtgatcagggttccgtcgacaacgactttcgaagtcatcggaatccatgctttccggtaatcggcaccccgttctttcagcaccgcttcgaggtcgaaaggaacaacctttttgcgccgggcaagggtttcctcgaaccagctgaatccggtgatctttttaccggctaccagcatctgcccgtcggacagcccgacattcagcaatccgcatacgccgtgacaaatcgccgacacgattttgccgctttcaaaatgcgttttgagaattgcctgcaggacggcattgtccgggaaatcgtacatgctgccatgtcctccggccagataaacacagtcgaaccgtcgccccgcaacttcatcgagactttgggcatgatgcaacagctcccgaaattcggggtcgttccaatatgctttggacatcttatcgagggtgaacggcttcaaactctcgggatcgaccggtatctcaccgcctttcggactcgcgatcgttatcttgcagcccagccctttcgctcggtgatagatgtgtgtcagttcgctgagccataatccggtgggtagaattgcattggcataggctccgattccggtcgctacgatcaaaattttcggcataatcatgacggtgtttttttgataggtaatgctgcaaaaattactccgtattgctattcgatcttcttccaaatcaccgaccgtttcgcccacaccgaagagccttttatggacatatccgttgaatttaaagaataggctttcggcccaacatattccgctgccgtttcacttggcgtatctcgcggagcatttcgtgaaccattcgccggatttcgattatcactgcactgctctcgctttcgttcataaccgtcaggattactgactgcaaaggtcggatcggtcttttgcttcgcaggatagatgccggcacgcattttagggtatgcgtgatcccaaaaggcaattccggttattccctactctggcggtcagggctgtcggaacctttgcggcctgcctttttcaggggaagccgcgggaaaagttttctgaaccgcactatgtaagccgcaacccggttccccgcgacgatcaggctcacggcaatgataatcaacaggatgccgcaacatatcctcagcgtgagggtctccccgaagatcatcaccccgaagaagaccgccgtgacaggttccaaggcaccgaggattgccgtcggcgtcgaacctatgtactggatggcgctggtagtacacaaaaacgagatcgccgtcgggaaaacagccagtgcgagcaagttcccccacaggtaccatttatcgggcacatggactgccatgccgaagtccagccggacaacgtaaagcagcaacccgaaaagcaggacgtagaacgtcaccttgagcgtcgcaacggatttcagcaccgggcggttcacgccgacgatataaattgcgtaggacaaagccgaaaccatcaccagaaccgttcccgtgatattgagcgtcgaaccatcgctgcctttgaacaacagcccgataccggccaatgccagcaagatgcacagcgctgtctgcggagagagtttttcccggaagccgaaagccatgatcaacgccacgaaaataggatatacgaacagtagcgtcgaggcgataccggcgtccatgtaattgtagctcaagaacaaggacagcgacgagagggcaaccagcaaacccaggagcaccagcggcacgatctcacggcggtgcagcttgaaatcccggccgcgcgccttgagcatggtacccaacaacgggatggcaaaaaggtaccggaagaacaataccgaatcgggatccatccccgccttgtagagcggaagggcaaagagcggattcatgccgtacgtggcggcggcaacagctcccagaaggtaacctttggcttttgtattcatacggtcggattttgcggcaaaaatagtatttatttcggctgcaaatgcagaccgggcaaaattatcacgcaatcgccaaccggtagcgcacacgtcccgcaccgacacatcccctcctacgggtgaagctcctgaatattgccgacccttcgatgcgaaacgatccctaccggggcaaggcagccggtacgacttccctgcggatcaaagccgcacggacgaaatattcggggatgcaggcctcgtccagcagccacttgggcgtggccgattcgtctttcttccccgaccagtcgttgtaaaacaacccggcggcatcccgtgcgttccggcgcgcccaatccatccagcggatgaatatatccacgtatttcggatcgccgtcgaggtcgtaaagcgcctggtagccccgcaacaacaccagatagaaccacggcaaatcacggttcgcggccgcgccgtccggcgtctccggcaaatagaatttccgggctccttcggccagccggcgggcattgtccagataaacccgatcgccggtatatccatacaacgcgacggcaccctgcagcagcaaccccgtattataggaatagaccgccttgtccagacgcgcttcgggctgcgtgagccaggagttccagactatatccagttccggatcgtgcaggtaggcatccatccagtcgtagaaacggcgcccggcagtcaggtaataggggtctcccgtcgccccgtacaggttgagtgccagcagcatcgccttaccgttggcgcaccccggcttctggttctccaccccttcgagccacgacacggcaccgtcgtggtcggggcgccagccgctcaggatgaaggtcatcacctgcttggctttttccaggtgggcgggattgcgggtcacgccgtaggccgcgacataggccaggccgaccagcccgttgtcgtcgtaataacggtcgaccttgcccatcctgacgggataagcctgatacccggcgggcatccgcccgtcgtcgtaatactgctcgacagccatcaccatcgaatcgacatagcagccgtatttcaccggatcgacttcggccagcgcaaccgccgaggtgaacaccccgtccatgggccacaggaaggaaacctcctgcgtgcttttcgccccgtcgtcgaaatagtttacatcgggacggtagctattggggtaatattccgaaaacaggccgtattccggcacccggtacatgttccacaccttgcggaacatctcttcggcaaacgcataatgctcccccggtacgggagccacagcctcctggcggcatccagacaggcaacacgcagcaccgaagaatgcggcaaaaaatacctttttcatcttatcgttacatttgaatcagtccctgccggaacaacctcctcagaattcgagccgcacgacgaccgggaaatgatccgacggcgtccgcgcctcatagctgtgcaacgacacctccttggggaatgctccggacttgatctcctcgtcgctgcgggtggtctgcgaacggtaggtgtccgtcaacaccccgtaatcgtgcacacgcaccgaaggcgacacgaaaatatggtcgatacggctgtcggttttcagcgtggggttgaaattgttgaacgtcccgttcggggcatagcgtctggccgcggtttcatacgaatcggccaatacccccgaggcggtgaaggtcgtatagatggggttgttctggtcgacgttgaaatcgcccgtgaggatcacgaactccctggggccgcacatttcgcggatcttcgcgacgaccagtttggcgctctcctcgcgcgcccggacaccgacgtgatccatatgcaggttgaagaaccagaaccggcgcctggtctgcctgtccaggaaatgcccccatgtgcagatgcggggcagcgcggcatcccaccccttgttgggacggccggtaacttccgagagccagaaatggccttcgtccagcaaccggaaacgctcctttttatagaatatgggggaatattcgcctttggccttgccgtcgtcgcgccccacgccgatataggcatagtcgggaagctgcgccagcatatcgtgcaactgcccgtcgagcacctcctggctgccgaaaatatcgaacccctggaattcgatcagcccgcatacccaggggcagcggcgttcccaaccgttgcctcgttcggcgtcgcctttattggcgttacggatattgtaggtggccacggtcagttcctgcgcaacggcagggagcagcagcacggcgaacagggcgagggtcagcaatcttttcatagtaatgttttcaggttaacggaataattatttcgttgtgcaaagatataaaaacgggactggaattcctcagtccggatcgcgggtatagcgatccggcagggagaggatgccgtcgatccggtatccgtcctccccgtgcctgagcagcaattcggctttccggtatttccggttgaaattatcccacagcaagatccggtaaacatccgtccgaacggaatccttttcgatacggagattttccagcacactttcatcgcagtcctgcgcctccaggaacggatcgtaatccagctccatttccgcatacatccgctgcaaccggccgaacaaccgcggggtcaggtatcgccgcaggatcgccaggccttcttcattatcaccattccgcaaccacgcggctatgtattccgcgtaaaaccgccgcagcatccccagggcggaatccggcatgttttcccccgcatgcacgccgtgcaccttgtccgcggaatatcccgtccggacagcattgccggcccgtatcatccccgcagggcaaggcggacggacggattcccggctgctgctccgggcgcttatttccgcgccgacagccaacagagccaccgtggctaagaacatcattatcttgattttcataatattacgatttaattccggaatacggcgcccggtgccgcgcggctaccccacatcgaattccctgtggccgggcactaccgtgcgtaaaggtaataaaaacacccggaaaacagcaaggttgacagccggaaaaacagccagcaggcacaaaggcccggatattcgcgcccgcaacacaaaaaatcgcaccagacatgcatactttcaggccgcaggccgcatcgttcggttatttttactatctttgctgggctaaataccggtaccgaatgcaaccagtgaaccgaacctccgacccccaggggcagccagtcagcacgaacctgtctgcaaccggattccgggagccggggttctgcaaccaggtgcaaccgcaggatcggggaagggctcgcaccgcatgaaccgcacgcaccgcatggccgattcctgcgcagaaaaatgctgaaaccaacaaataaatagcaaccatgtacagatacgacaaccgggtggtcatcactctcgatgccggaggtacgaacctcgtgttcggagccatgcaggccaacaaattcatcgtcgaacccatcaccatgccgtcgaatgcggacgacctcgacaaatgcctggcaacgatggtcgaaggcttccaggctgtgatcgacaaactggaggccaaacccgtcgccatcagcttcgcattcccgggcccggccgattatcccaacggcatcatcggcggttacctgcccaatttcccctcgttccgcgaaggcgtggcgctggggcccttcctcgaatacaaattcggcattccggtattcatcaacaacgacggcgacctgttcgcctatggcgaagcactgggcggcgccctgcccgaggtaaacgccaagctcgaagccctgggctgcccgaaacgctacaaaaacctggtgggctacaccttcggcacgggcttcggcatcggtgtggtggtcaacaatcaactcaaccgcggcgacaactcgtgtgtcgaaaccttctgcctcaaacacaagaagatgcccgacatcatcgtcgaggacggcgtggcggtacgcgccatcaagcgggtctacggcgaggtctcgggcgacgttaaacacgcgttcgagccgaaggacatctgcgagatcgccgacggcaagcgtcccggcgatgtcgaagcggccaaacaggccttcgccgagttgggcgagattgccggcgacgccatggcaacggccgtaacgttggtggacgggctcatcgtcatcggcggcggcatcaccgcagcccgcaagtacatcatgcccagtctgctgaaagaactgcgcggcaagatgcacaccatcacgggcgaggagttgaaccgcgtgcagatgaaggtctacgacctggacaacgaggaagaattcaaggagttcgccaagggcgaccagcgtgcgctgaaggtttacggcacggatcgttacgtggcatacgacccccagaaacgcatcggcgtcatgatctcgaaactcggggcgagcaatgccatctcggtgggtgcctacgcattcgccctgagccagctcgacgcacagaaacaacaataattctttacagcatcagggaataaaaaattatgtataagttccaacccattctcaaatcgacaatctggggcggcgaaaagatcgtcccctacaagcacatcgcctccgaccagaagcaggtcggcgaaagctgggaactttcgggcgtcaagggtaacgaatcggtcgtagcgggaggccccgaggcgggcaccaccctgcccgggctgatcgcacgccacggcgctgcattgctcggcaaggccaatgcagcacgcttcgggcaggagttcccgctgctgatcaagttcatcgacgcacggcaggatctctcgatccaggtgcacccgaacgacgcactggcatggaagcgccacaaatcgaaaggcaagaccgagatgtggtacgtcgtggacgccgacaaaggcgcacgcctgcgctcgggattcgccaagcaggtgacgcccgcccagtacgaagccagcgtcgcggacaacaccatcaccgacctgctcgccgaatatgaaatacaccccggcgacctctttttcctgccggccggacgcgttcacagcatcggagccggggcgtttatcgccgagatacagcagacctcggacatcacctaccgcatctacgatttcaaccgcaaggatgccgacggcaacacccgcgagctgcacaccgaactggcgaagggcgccatcgactacaccgtactgcccgattaccggacgcattaccagaaggcgcaggatcgcgaagtggaactggtgtcgtgcccctatttcaccacctcgctctacgacctgaccgaagcgcagaccatcgactattcggcattggattcgttcgtcgtcgtgatctgcgtcgaaggcaagggaacactctgcgacgactcgggcaacgaaatgccgatccaccagggagagaccgtgctgctccccgccacggtaaaatcgctccgcgtgattccagggggaaacctgaaaatgctgaccagctacatcaaataaacaggcaacacccgtcgtcgaaaaatccccggcagccgataattgccggggattttattttcggtcaagcggcatagttgtaaattcaatgagaaacaaaacatccgatcgtaaaaatacttaccaaaaacctcatcaaaagaaaaaaagttttatttttacgcgattccgttgcaggactgcgttctttttagtacctttggggtgtgcaaccgtaatagcgcggaaacagcagaaaatcgtacgccatgaaggagaatttaagagagatcgcatcgcatttcgccttggaaggccccgtcacggccatcgactcactgggcgaaggattcatcaacgacacattcatcgtccgcaccgaagcagatgcccccgactacatcctccaacgcaagaacaaggccgttttccccgacgtgccggccatgatggacaacatccgccgggtcacggaacacatccgccgccgcgtcattgcggccggaggcgacccgcggcgcgaggtgatgaccgtcgtcccggcaaaggacgggcacttgtaccacgtcgacgcggaaggcgaatactgggccgcgacggtcttcatcgacgacacggttgcctacaacaaggccgactccccggaactggcccgcaagggcggcgaaggcatcgggaaattccagtcccagctggacgatttcaccgaaccgctggcggagacgatcaaagggttccataacatccgccaccgtttcggacaatgggacgccgccctggcccgcgatgccgcagggcgcagaatacacctcgcggaggagatcggctggatcgagtcgcggcgcgccgagatgctctctttctggtcgaaggtcgaggacggtacgatccctacgcgcgtgacgcacaacgacacgaaaatcaacaacatcctgttcgacaaacagggcgaggtgctctgcgccatcgacctcgacacggtgatggcctccacgtcgctcaacgatttcggcgacgcgatccgctcttacgccaacacgggcgacgaggacgaccgcgacctgtcgcgcgtcggcatttcgctcgaaatgttcagcgcctacaccgacggatacctctcgcagcgtgcagcacaactcaccgacacggaaatcggccatctggctttctcggcacggtatatcacgttcgaacaggttttgcgcttcctgatggactacatcgacggcgacacctattacaagataaaataccccgaccacaacctcgtacgcacgcacgcccaataccgcctgctgcaaagcatggaggaacattacggcgaaatgtgccgcatcgtggacgggatcgcggcgaaataccgcaacgcataaaaacgcataaaccggaaaagacgatgtagcaaaagagggaggggaaaacaatcatggagatacggaaaataacaggcgtcgtcccggccgacaaacgggccgtcgaggccgctttcgacagcatcgaaccgcagccggtagcttgctgcaactggccggagcaatatccctatgcaccggaggtttcgttccgcatgttccacacgggtgcctacctgatgctgcgcttcgacgtcgcggaacaatggacgatggcccgcgtcacggaggacaacggagaagtttggactgattcgtgcgtggagttcttcatcgcccccgacgacagcggctactactacaatttcgaatgcacctgcatcgggcgtctgctcgtggggttccgcagagagcgcgaacacgccacacatgccacgccccgggtcatggaaagcatcctgcgcaacccgagcctcgggtcgcgtcccttccccgaacacgaaggcgacaaccgctggtcggtggtgctggccatcccgccgcaggcgttgttcatgcactcgctgacggactggagcggactgaaagcgaaggtgaacctctacaaatgcggggacaaactctcgcagccccatttcctgtcatggaagccgatctcggccccgaagcccgacttccacctgccggaatttttcgaacaaattaaattttcaaagatatgaacaacaaatattcacttcccaaagacgggggcctgatcgaagtatcggctccgcgcgacatcatccaccgttacgaaaagatccacacgacggtttatgaaaacgaatacctgggcgtgcagtacgtcgccgacaccatcgtgaaggcaatccgtacatataacgaaatccactgttcgaacgaggtttacgaggagtcgcagccgttcgtgctggggctcacgaccgggcgcaccccgctcgggctgtaccgcgaactggtcaaacgccacgaggaggggatcgtcagcttccgcaacgtggcggtattcagcctcgacgagttctacccgatccgctcgaccgaacagcagagccgcaatttccgcatccacgaggatttcctcaaccatatcgacatcctgcccgaaaacattcacatccccgacggcacggtacccgaagccaggatttccgaatactgcgcatcgtacgaccactcggtgcgcaagatcgacctgatgatcatcggcgtcggcgaggacgggcagatcggcttcaacgaaccgggatcgtatgccaaatcgcgcacacggctggttcagctgacccacaacacgcgcaaaatccagtccggggcgttcttcggcctggaaaacacgccgaagatggccatcacgatgggtatcgacacgatcatgcgcgccgagaagatcatcctgatggcgtggggcgaggagaaagccaagatcgtccagaaggtcgtcgaaggcgaagtcatcagccaggtgcctgcctcgaacctgcagatgcaccccaatatcgaggtggtgatcgacgaaaatgccgcgcagatgcttacgcgcgagcagacaccgtggctggtaggcccctgcaaatggacgcccaagttcacccgcaaggccgtggtatggctgtgcggcgtggtacagaaaccgatcctgaaactcacctacaaggattatatcgaaaactcgctgggcgagctgctcgaacagggacgcgcctacgaccagatcaacatcgacgtgttcaacgacctgcagcacaccatcacgggctggccgggcggcaagcccaacgccgacgattcgacacgccctgtaccgtcggaaccgttccccaagcgcgtggtggtattctcgccccaccccgacgacgacgtcatctcaatgggcggtacctttatccgcctcgtgcagcagggacacgacgtacacgtagcctacgaaacttcgggcaacgtggccgtacacgacgacgtcgtgctgcagaacatcgacacggcccgcgaactgggcttcggagaccactacgccgaggtcgagaagatcatcgccggcaagaagaagggcgaacccgaaccgcgtccgctgctcgacctcaagggtgccatccgccgcgccgaggcacgcgccgccgtccgctcgttcggcctgaaccccgacacgaacgcccacttcctcaacctgccgttctacgaaacgggtggtatcaagaagggacagcttacggagaaggacatcgacatcatcgtcaagctgctgcgcgaggtgaaaccccaccagatttatgccgcaggcgacctggccgacccgcacgggacacaccgcacggccatggaggccgtactcggcgccctggacgtagtcagggacgacgaatggctcaaggaatgccacctgtggctctaccgcggtgcatggatggaatgggatctgggcatggtcgacatggcggtgccgctgtcgcccgacgagctgatcatgaagcgccacgccatctaccgccacctctcgcagaaggacatcatgcccttcccaggcagcgacccgcgcgagttctggcagcgcgccgaagagcgtacgcagaacacggcgcagctttacgacaagctcggcatggccgaataccaggcgatcgaggtgttcgtcaagatgttctgacgcccgtccgaatgaagaatgaacagacaaaccgataaaccgaaaaatatatgcgactcattatcgaagacacacaggaaaatgccggccgttgggcggcgcattacatcgtcgggcagatcaacaagaagcaggctgccggaggcacgttcgtgctgggcctgccgacgggttcgaccccgctgacgacgtacaaggagctgatcgccctgaacaaagccgggaaggtatcgttcaaggatgtcgtcacgttcaacatggacgaatacgtcgggctcccggaagagcatcccgaaagctaccattcgttcatgtggaacacctttttcaaccacgtggacatcaccccggccaatgtcaacatcctcaacggcaacgcccccgacctgcagaaggaatgcgacgaatacgaggagaaaatccgccgcgcagggggcatcgacctcttcctgggcggtgtcggcgaagacgggcacctggccttcaacgaaccgttctcgtcgctcaactcgcgcacccgcgtcaagacgctgacctacgacacactggtcgtaaactcgcgtttcttcgacaacgacgtgaacaaggtacccaagcaagccttgtcggtgggcgtagccaccgtgctcgatgctaagcaggtgctgatcctcgccctcgggcataagaaagcccgcgccttgcaacagtgtgtggaaggcccttactcgcacgtctgcacgatctcggccatgcaggtacacccccacgggatcgtcgtatgcgacgaacccgcgaccgcggaactgaaggtcggcacctaccgttatttcaaggatatcgagaaggacaacctgatctgaatccggactggctctaaataaagaatccccgcaggcatcggcctgcggggattcttttcggcacagaaggcggttccggcctgctgccgttattgcgcaggatgcccccggcactccccccggacagcaagcaccgatccggcaacagcccaccgagcaacagttccggccggcaactgcccggccgacaaacacccggtcagcacacacccgtccggcaaccgccccggccgaaatcagacaccggccgaaatcagacaccggcgaagcggcaaaaaattccccgcacggcaggcaggccgtacggggaatcgtttgaaccatactaatctctaaatagccgggcccaaattacatggcatcgggtttcagcaacccgatctcgtcgacacagaaataggtcggatctgccagatagtcgcagaccgccttgaataccagcttgtccaccgcacccagcgacgacaggtcgactttgcgccatccgctcagcttcgatttcccggcgacgagagtttccgtgatgctgcccttttccacaccgccgagcgaccccgtgatcttcacctggaaactgtcgctatccgcccccgtgaaataattgtatacccaggtcgaattggcgatgtataggtgggcgacgatgcgcggctccaccaggtcaatggtcggataacccgactcactcaggtattcgggatacatttccgtcggcgagttggaatcgtaaaatacggcataggtttccgtaccgttggcaccgccgtccgcccacacggagaactgctgcttgctggagggagcggccgcattccggtcgggcatccgcgaaagcccgatgccgccccacccgtcgtatagcgatgaataataggcgttgaaaaccagattctggtctgccgtcgaaaagagcatgccgtcgaaatccgcacccacagcgtattgcttcgcacaaaaagcgttcgcataggtataatcccccattcccatcagggacatcgtaacggggccgagcttcacgtcgtcgccggtcatggcgtcgagcagatgttcggaggcctcgaatgatactacttcgccgtcaaagggtttctcgcgcgggccgtcgtcgtccgagcaggctacaaaggcaaaagtagccgcaataatccaaaaaatatttttcatctcaaaatagttattcggtataagcgaaatcatcaatacagaaataagtcggcgccatcacatcatcgcactcaacagagaaaacaattttggtcacggctcccaatttatccagccctacgttcttccaatcagctacgaccttgttgtccgatgccaacggcacctcaatcgtccccgtttcggtttcaccgttgaaaccgataatcgcaacactgaagtcgctgtatttagtatcggtgaggtaaagatatgtccacgtattattggcaatacgaagcgacacgggagtaataaccgtcgaaaactcgatggccgggctgaacgaataacccgggcccatacctttcatatcgtatgcaacggcgaacttgttctggccgtcatcagccgtcgtataaacgctgaactggttatccgtcccgaaagtcgttttgtcatgacaggcagacatcgcgaatttgcaccacgtgtcccagacaccgccgaaatccgagaaataagagaggaacgaagcagttccttctttgtaaatcacgccttcgaactccaacgagccgtctacatccgttgccagagttttaccccacaggtatccgtcggcaccaagttccacctcactgaaagatattgtttcgagctgggggggggtcggcatcttgtcgtcgtccgagcaggcagctaaagccgaagccgcaaaggctaaaaggagaagttttttcatctttcgtttgttttatgtgcaaaaataaaaaaatccggttccgaacccccggaatcgaatccaccattttacgcaaccggactgcacatatatataatatgcctgtcctcacaacaaacgtccggcactgccgtgcctccgtccgcagcgctccgttctccgcagagccagcccgaaaataaggatcctcccaccgggagatgcaaggcaggtcttctggctcgttccagccgcaacgccttcccggccggagccagtggctaaagagtgtgcggcaatagacggaacttacagcagcgggaactgctgccgaatttcacggcattcccatttaatcacacggggccttgcccggccctttgtgaaccattgcggtgcaaagttaaaaaataaattcgtatctttgccgacgctaacaaaaattcagcaaaaatatgaagcacgcatacgtatttcccggacagggtgcacaggcggtcggtatgggcaaagacctttacgacaacgtccccgaagcaaaggagcttttcgaaaaagccaacgaaatcctcgggttccgtatcacggacatcatgttcgccggcacggacgacgaactcaagcaaaccaaagtgacgcaacctgccgtattccttcactcggtaatcatggccaaggcgctcggcgtgaaacccgacgctgccgcaggacactcgctgggtgagttctcggccctggtcgtggccggtgccctctcgttcgaagacggcctgaagctcgtctcgaagcgtgccatggccatgcaggccgcctgcgaggcacagcccggtacgatggccgccatcctcggcctggaagaccacgtagtcgaagaaatctgcgcatcggtcaacggcatcgtcgtagcggccaattacaactgccccggccagctcgtgatctcgggtgccgtggaagccgtcgacgcagcctgcgaaaaagccaaggccgccggtgcgcgccgcgccctgcgcctgcccgtaggcggcgcattccactcgccgctgatggagcctgccaagcaggaactggaaaaggcgatcagcgaggctccgttccagacacccgtatgcccgatctaccagaatgtcgacgcgaagccctacacggatcccgcacagatcaaggccaacctgatcgcacagctgaccgccccggtacgctggacatacatcgtaaagaacatgctcgccgacggcgtgacggaattcaccgagctcggccccggcaccgtattgcagggccttatcaggaaggtaaaccccgaagccgtcgtagaatcgaaatcggcattatagtctaaaaagccgcaaaacaaaaaggaacggactgaaaatcagtccgttccttttattttaatgtgttttgaaacaaaatttattaaattttattaaaaacatgttgcgttttttaaatatacttattatatttgcaaaggtttagttaaaaatgagacaggacggatgacatcactcaccgaatttttcaacaaacacgaagacgatgccctgaagggtatttcgcacaagaacagtatcatcaagcgcaacatcatcgcctacatggcggtgaacggcgaatgtacgctctcggaactgaccaaagagctgcatatcagcgtcccgaccattaccaagctggtgcaggaactggtcgatgagaacatcgtaacggatctgggcaaggtggagaccccgggcggacgcaggccgaacatattcggcctggccaattcggcgatctatttcgcaggcatcaacgtcgggcgcgacaacatgacgttcctgatcaccgacctgcagaacaacatcatcaaggaggaatacgactacaccttcgagttgcaggatcgcccgcagtgtttcgagcgcatctgttccaacatagagaacttcatcgccacctgcggcatcgaccggggcaagatcctcgggctgggcgtctgcatgacggggcgcgtgaatcccgacacgggccgcagctacaaatatttcacctccagcgaacagtcgctgcgcgaagtgctcgaagagcgcgtcgggctgcgcgtgctgctcgaaaacgacacccgcgcccgctgttatgcggagtacacgtgcggcaagtcgaaggacgagagcaacgtgctctacctgcacatggggcgcggcgtggcaatcggaatcgttgtggacgggcagctctactacgggaaaagcgggttcgccggtgaattcggacacatcccgtttttcgacaacgagatcatctgctcgtgcggcaaaaagggctgcctcgaaaccgaggtttcgggtatcgccatcgaggacaagatgtgccacctgatcgagaagggcgtcaatacgatcctcaaggagaagtacgaccagcagaaaagcatccatatcgacgacatcatcgccgcggcgaagaacgacgacaacctctcgatcgagctgatcgaggaggccggcgaaaaagtcggcaaggccgtggccttcctcatcaacacgttcaaccccgagacggtcatcgtcggcggcaacatggccgccgcaggcgactacatcatgctccccctcaagtctgcgaccaacaaatattcgctcaacctcgtatacaaggacaccaaattccgcgtatcgaagatgaccgagaacgcgaacgcatggggtgtggcaatgctcatccgcaacaagatcattggtatctgatgaacctcgaaggccggacaacgcggctgcgagccctcgaaccgggagacatcgagctgatgtacgcctgggaaaacgacacccagatatggggcgtcagcggtacgctggcgcctttttcccgccatacgctggaacggttcatcgaagggcagcaattcgacattttccaaacccgccagcagcggcttatcatcgaaacccgggaagggctccccgtcggggcgctcgacctgttcgacctggatccggtgaatatccgtgcgggtgtcggcatcctgatccacgatacggcacaacgcggcaaaggctatgccgccgatgcggtggagaccgtatgcagctatgcccgcgacatgctgcacctgcaccagttatggtgcagcgtcgaagccggaaatgcggcgagcctcgcacttttccgcaacgccgggttttcagaaacgggggtcaggaaggagtggctgcggcttgccgacggattccacgacgaggttttcctgcaaaaaatattatgacctgcgccggttagcacaacgccacaaaactaatccgccgccgataagcccaaacagctccgggaggaaggggcctccgggagaaagcttcgagagagggcttcgggatggcgcttcgaagccattccccggcagccgatatgcccaatgcgcacttttctaacccaagacacggatagcgcccagcccgaggactcacacttcacccggatcgcatccccgatagcatgatgggaatgcgcatcgtatccgacacgcctgttcgcatcgcggatttcaggatacaacatcccgtacagccgataggtttccaccagggaatgccaacgcttcggttcggtattacggtggtaaattttaaaatcggccggatcgcaaagatccagccgattgtacaaaaaggtatcgcgcgcgcacaggaaaactccccgcaggacatacgccgcaataagaagtacgaatcctgtccacacgggatgcagaaacctgcgaaacttttccttaacgattattccagacggcgcgaaccgtcagaaatcacgacctcgtacaccttgggttcatggccgtacttctcgttgaacctctttttcgccgtggcgatgaagttgtcgtaaagttcgtccttcaccaggttgatcgtacagccgccgaagccgccgcccatgatgcgcgaaccagacacgccgcactcctcggcaacctcggccaggaaatccagttcctcgcacgacacttcgtaatccttcgacatgccccaatgggtttcatacatccgcttgccgaccgtctcgtagtcgcccttttcgagcgcatcacagacatcgagcacgcgtttctcttcgccgatcacgtagcgggcacgcttgtagtcctcgtccgagatcttatccttgatggcatcgagctgctccatcgtagcgccgcgcaggaactcctgcccgagcatcttggccacccgctcgcacgaagcccggcggtcgttgtagggcgaacccaccagctcgtgcttcacgcgcgaatcgagcaggacgagtttataacccttggggtcgaacgggaaataggcatactccagcgaacggcagtccaggcggatcaggttgcccttcttgccgaaaaccgaagcgaactgatccatgatgccgcagttcacgccgcaatagttatgctcggtggactggccgatcttcgccagttcgaatttgtcgatgcccagcgaatagaggtcgttcagcgcaaaggcgtaggtcgactccagcgctgccgacgacgacatgccggcgcccaggggcacgtcgcccgcgaataccgtatcgaaaccgccgatcttaccgccccgcttctgaatctcgcggcatacgccgaagatatagcaagcccagctctcggcgggtttatcggcttcgttcagcccgaactccgcgctttcacccaagtcgagcgcatgggcccgcaccttgtccgtgccgttgagtttgatggccgccacgattcctttgtcaaccgcccccgggaaaacgaagcccccgttgtaatcagtatgctccccgatcagattgatacgccccggcgaagcgaacaggatagccccggagccgtaaatctcctggaactttttgctgactttttctttcatggtctattctggttttaagttaaggattccatttccacatcatacgaagataggaaaaaatcccgaaactccgatatatttcgccgggaaatcgtacatatcgttccgctccgtgtttcgtttcaaaatcacaaacccttcccgtatgatgacatcgtcctgaaaaaacaccttttgcgccccgccgggcttgttattccggaaatgtttactaactttgttgaagtttcgatttataagcactcaaccaacatttcaaacgatatgacaaaaaagctcatcttcgccgccgccctgctcttcgcaggaaccgccgcggccttcgctcagcccaaggtgattgcgcaccgcggctactggacggcacccaattcggcgcagaactcacttgcttcgttctccaaagccgattcggtcggggccttcggctcggaaatggacgtatggctgactgccgacgacaagctgatcgtaaaccacgaccgtatatacaagggtaccgaaatcgacatggagaaaggtacgctgaaggagatcacctcgatcgtgcttcccaacggagagaacatcccgacgctggacgcctatctgcgcctggtggctgccaaacccgacacccggctggtgctggaaatgaaatcgctttccgaccttcggcgcgaagacctcgcggccgagaagatcgtcaaggcattgcgcaagtacgacctgctcgaccgcaccgacatcatcgccttctcgatcaatgcctgcctggcattcaggaaactgctgcccgacgggcgtatcttctacctgaacggagacctctccccgcgcagcatcaaggggctcggcctcaccggcatcgactactcgatgcgcgtgctgcgcaagcaccccgaatgggtggaacaggcaaaaaagctgggactggaggtgaacgtatggacggtcgacgaggaagaggacatgcgctatttcatcgacctgggcgtggactacatcacgacggattaccccgagcggttgcaggccttgctgaaataacagcggcaatataaatggcttgccgtttaattcaagccgtccgattttataggcagtccggatttccgggctgcttttctgttacggcccgtctatcggcggccatatccgtccaagacactgagcgcttgctgctgcgcaatgaaattcacctaaatattacactgacttccgtaaaaacaagtaactttgtaaaaattcgggctacccgaacataaatacagaaatatgaacataaaaattcttttaatgcttgtgttgttgattttcagctccttcaatggcatcgaagcacaaataaaacagaaaacccacgctgaatcccccaaaaagcgccttaccatggaagctataaaaaacataccggaagaattctggaaatcgggattcgtcctcaacggctgcaaaatcacatttccatgcaaacttatagatttgatgcaggccgggaactacaaaagctgtgcaggcgtcgcaatgatccctcccactgccaaagatgaatactgggcaacaacggtaaaaaacgaaaagggagaaatcatcaacgcggagatatttaaccccacggcccaagccctccctgaaaccgattgcattgtgaacagcatcagtattacgccgcgatccgataactggcataatatttccgacttcgctgtttttggattggcaagcaaaatagccacacgagaagaagtcgtcgaaacggttggaaaatattgcggcgccccggcacaagtcattgattttccgataatagattactatgatttttacgacaagaaaccttcggaaacgaatccgccccattacggcaatataaaaatcagtataacaatctccaaaatggacagtatctataatgaacgaatgatcggatttgaatttgagcatgcaggcgatttttaccgcaggcagaaataaatatttgcaagcatcttccgactgggttctccttcaaaacctccggcattcgcatctccgcaaaacacaagtccagccgcaaacgcaacgtacggaattacctttcgaactggagggggggggtaataaaggcgacggtgaaaatcaccgtcgcctttatttgaccggcacctcacaagagtctgatcgcaatcgggctaaaagcgtccctatatgtggtatatcatgcatcgacgacgatcacctcgatgccgcgctcgcgcagccggtcgaggtaaaggggctggatgccattgtcggtgatgatgcggtcgacagcctccaggtcgcagatcttgctgaagccgcggcgtccgaatttcgaactgtcggccagtacgatgaccttctgcgcggcgttcatcatcacacggttcagcgccgcttcgagcatgttggtcgtcgtaagcccgaattcgaggtctatgccgtcgaccccgacgaacagcttgctgcagttgaagttgccgagcatctgttcggcaaagggccccacgaccgacaccgaactgctgcgggtaatgccccctaactggatcacgtcgacattggtgtcctgcgaaaggatcgatgtcacgggaacggccgccgtgatgaccgtcaggtgcccgacgggcttgatttcgcgcgcgaggaaggccatggtcgtgcccgacgcgatgatgatcgaatcgtcctgcgcgacaaggcttgcggccttggccccgatagcccgtttctccgccacgtttttcttctccttctcgttgacgtggcggtcgctgatataggggctgataaggatcgcactgccgtgcgtgcggtagagtttcttctgttgttcgaggaaagagaggtctttgcggatcgtgacctccgaaaccttgaacaactcggccagctgcacgacggatatggagccgttctgctgcaacagtgccaggatccggttatgacgctccggaaggctcaaaatagtctcttcgccggatttattcatagatcgattaaaaatttggttttataatgcaagatacgaaaataatccgaaattagatcgaaacctcccggagaaatattttttccggcgatatattgtgctccgaaacgaaatattatgaaataaaacatattttattttgaaatacaaaaaatcatatgtaattttgttgcgaaacgaaattcatgaatttatggaaagacttgcacaaatcaaaaaactatccgagaaagacaaggtttgggatatcgtagtggtaggcggaggcgccacgggcctcggcgtggcggtcgacgcagcgacccgcgggctgagcgtagcgctgctcgaaaagaccgacttcgccaaatgcacatcgagccgcagtacgaagctcgtgcacggcggcgtacgttacctgcagaagggcgacgtcatgctggtgctcgaagccctgcgcgaacgcggccgcatgaaagccaacgccccgcacctggtcaaagaccaggcattcgtgatctcgaattacagttactgggataatttcctctatttttgcggtctgaccttctacgacatgctttcgttcggtttcggttacggccgttcgaaattcatttcggcaaaaaaagtaatgaaatacatccccacttcggtcgaaaaggggctcaagggcggcgtcgtataccacgacgggcagttcgacgactcgcgcatggcgatcaacctcgcacagacatgcatcgagaacggcggcacggtcgtgaaccaggcgagcgttacggggatcgtacacgacgatgcgggacgtgcggccggcgtgaaattcgtggacaacctcacgggcgaagagtacacggtcaaggcgcgcagcgtggtgaacgccgcagggtgcttcgtggacgacatcatgcacatggacagccctacgcaccgcaagatggtcactccgagccagggcgtgcacctggtgctcgacatgaaattcctgcagagcgactacgccatcatggtacccaagacctcggacggccgcgtgctgttcgccgtgccctggcacgacaaggtcgtggtcggaaccacggacatcgtacgtcccaaggccgaggaagacccgcgcccgctcaaagaagagatcgacttcatcctcggcacggcagggctctacatgaaccccgcgccgacctacaaggacatcctttcggtcttcgcagggcagcgtccgctggcggcgcccaagaaggagggcaaaaacaccaaggaaatttcgcgcagccacaagatcatcgtttcggacaacgggctggtgacgatcacgggcggcaaatggacgtcctaccgtctgatggccgaagatacggtggacaaggcgatcgaggtcgccaagttgcccgtccgcaagtgcgtgaccaagaaactgcgcatccacggttaccgcaagaaccccaacctggcggatcacatgtacgtctacggcagcgacgagcccaagatcctcgaccttatcaagcagcagcccgagctgggcgagaaactctcgcccaaatacggctatacctatgccgaggtgctgtgggccgtacgcgaggagatggccatgacggtcgaggacgtgctttcgcgccgtgtgcgcctgctcttcgtcgatgcccgcgaagccatcgcggcggcgccgaaggtagccgcgatgatggccagggagctgggacgcgaccaggcctggatcgacactcaggtaaaagatttcacggatttggcgaaaacgtatatctttgaacaaaactgatcgctgaaccatgtggaaaatactacgaccccctaaacacaaaccgcccgtcgctgcggaaaaaatagacaaagagtacaagcggctgcggttgcaggtattcatcggcatcttcatcggatatgccggttactacctcgtgcgcaagaacttcacgctggccatgccccaccttgtcgaaatgggattcgacaagggtgacctgggcatcgcgctctcggcgaacgccattgcctacgggctttcgaagttcctgatgggcggcgtttccgaccgcagcaacgcccgtgtcttcctgccgctgggactggtgttgtcggcgctggtgacgatgttcctcgggacatcggccggtatctcgtcgatcatcatgatgttcatcacgcagttcctcatcggctggttccagggtatgggctggcccccgtgcggacgcgtcatgacccactggttctcgcagaacgaacgcggcacgaagatgtcgatctggaacgtggcccacaacgtcggcggcggcatgatcggcccgatggcggcctacggactgttgtggttcgggtcgtggcagatcggtacgttctggttccccgccgtggtggccatcgtggtcgcgatgcttgcattcctgctgatccgcgacacgccccagtcgaccgggctcccgcccatcgagaaataccgcaacgactacccgaaaaattacagcgagaagtcggagcaggagcttacgacgaaggaaatcttcttcaaatacgtactcaacaacaagatactctggtatatcgccttcgccaatgcgttcgtgtacctggtgcgttacggcgtactggactgggcgccgacctacctgaaggacatcaagggttatgacatcaaggatgtgggctgggcctactcggcatacgaatgggcagccatccccggcacgatcatctgcggatggttgtcggacaaggtcttcaaaggacgccgggccatcacgaccatgatctacatggcactcgtcgcggtcttcatcgtgatctactggaaaaacatggacaacgtactgctggataacatatcgctgatcgccatcggattcctgatctacggccccgtgatgctgatcggcgtacaggccctcgacctcgcacccaagaaggccgccgggacagccgccggactgaccggattcttcggatacttcttcggcacggccatcctcgccaacatcgccatgggttcgatcgtacagcacctgggctgggactggggattcatcatgttgctcgcggcgtgcgcactggccttcctcttcatcagtttcacctaccgggaagaacaatatctggttaaacaacggaaatagcaaggcttcacggcggcccggacggccgctgcggagcgaggggttccttttataggattgttatgtttgggtggggcgtcagccccgaatcgaaaaagcctttaactcccggttaagggctttttcattgcccccgaccagccggtcgaccaacgcatggaacttcggggaatggtcgtggtgaacggtatggcacaactcgtggacgatgacgaaatcgcgcaaatgctccggaagcgtcatcaggaaaaggctcagcgaaatattgttcgtcccggtacagctcccccacttcgtacgcgaggcacggatcgtcagcttgttgtacttcagccccgtgatgcgggagagccgaccgatacggtcgggcaggtcggctttggcggcgcgccgcagctcttcgacgcgggctttttccgcggcaggcggcaactgcggcgggagtgccgcacgccgctgcgcaagccgtgcccgggccgcctcgacccatccggctttgcactcgagaaactccatcgctcgccgtgcggaaaccccgcaaggaaacgacaggcggacacaccccgtcccgcgcacgctgatcgaaatacggcgtgcgcggcgcgactgggagaggacgacctcacccagccggggatgttcgacgatcgtaatcatgcctaacgggccataatggccgagatatccacatcgtcgaggcgaagcgcagaatcccgccgttcgatgctcatactgaaaaaaaggatcaacaactcttcatccgaataggtcaggagttcattggcagcgttctccagctcagagggcaggggataatcccccttgcccgcacgccgcagttgccgctgcaacagggcgggtgcggaaattacgaattcggggcgatccgtgccgaagtcgatccgcagcgtatcatcctcgaaccggtaatacgggatacggccctggtcgtaacgattgtacgaaaggttggcatacagcacccgataccctggggcaaggtcgatgcgtcgcaccccgtccgggtacaccgacacccagttgtcatcggtacggtaatcgtagccgtagaccacataatcgcggaacacatccggcactgcctcgcggactttgccgagctccaccccgaaccgggcaaaggccagcgtatcatggtcggcaacgtagtcgagcgcctcgtaaaggcggcggtaatccccgcgcagcagggtgtcggggacaaaggcgtccagttgcagccggccctcgccgtcgagcatgttaagctgttttgccacacggacggcacggcgcacctgcgagccggtcgctatgcgttgcggttcgagcacaggcaggtaggccagagccgcaaagcagacgaaccccgccaggccgacgtacaggtagcgcccggtacggcgcgagaggaacaacagcacgcagagcgtcatcagcccgccgcagacaagcaggtatacgcgcggttcggtaagcccgtattcgttcgtacgacgcaggacgccgatccagaacagcagctgcgtaggcaacgacaccaggctgaaacggtcgaagaaccagtcgtacatgcgtttctgcaacaacggctgcaacgccttgaccgcaatggccagcagtgtgaacccgaataccagataggccaccccgccctcgggcaaagaccacgtaacgaggatcttgaccatgtaaaggcagagtatggcggtgtagatcagcagtgcgggcgtcacgatatagttcagcaacacgtcgaggatgcgagtgtcgcggcattcggcaccggcccaacggtcgtacatcatcaggaaaagcaccgggccggcgaaggtctcgaaaaggatcagggcatagatccagacatgctcgatccaactcccttcgagcccgaagatataggtcgtggagaagaggatagcggagaacaaccccagcgctacattggcgaagagcgcagcgaggatgcccgaacgcagccacaccatgatgtcatcgacgaaccgcttgttgcacacggcacggcggcagagcagcagcgccaggggcgccaggatgccgaaggtgatgaacgacggctcgctggcgagccagtcctccagacctccccagaacgcgaacggcacgaaaggcgcccagcatacccagtagactttccgccacggccccggccccgcaaggttattgaaggccagcgcaacagcgaaggccagcggcacgagcgccagcctgaccagggtgtcgtcgctgtccgtctcgtaggcgacgaggcagccgatacagccgagggcaatcaatcccgcctccacagggtgcaggcgcagcatttgcaggaacccctcccgaagccactgcacgtaatgtccgagtttcgctttcatggttttcgtttattgtccgatacgctggcgcacgacctcgaaaagcatcacggccgctgcggccgagacgttcagcgattcgatatgcccgatcagggggattgccagctgttcgtcgcagagtttgagcacctctttcgagatgcccgtatcctcggcacccatcaccagggccgtaggcttgcggaaatcggcatcgtagagcagtttgcggctcttctcggttgcggcgacgatctgaaacccttcggtctggagcagttttatcgtattgcggatcgaccccacgcggcagaccgggatcgtcgccagcgccccggccgacgagcggattgcctcggcattcacgggggccgaattcttcagcggcgtcaccagaccgtgcgccccggcgcactcggccgagcgggcgatggcgccgaaattgcggacgtcggtcaccccgtcaaagatcaccaccagcggcgtctcgtcctcgggcacccgttccaggatgtcggccagcccgacatattcgatggccgaaatctgcgccacgacaccctggtggttaccgcgcgtgaggcggttgagcttttcgacaggcacctcctgcatccgcacgcggtgacggatgcagaggtctttcagctccgtcatcagctgcccttcggcacctttgcggatgtaaagtttctcgatctggcgtccagcctcgatggcttcggccacgggacgtatcccgaaaataatgttgtccatagcagcttatttttcatttgccccggggcgggcggcacaaggttcagccggatttcccggaaatcactgttcttcgacgagttccagttcgtacgatgccttctcccactcgtgcatctgatggtcgtaacgggctttcaggtcgttgtaggccttgtagtcggcttcgtcgtaggcggtcgccgcagcgaatttcgcatcgtaggcggcgatctgtttttcgattgcggcaagttccgcctcgatcccctcgaccgtccggcgcagcttgcgcagctgtttctcctgctccttgcgctgctcgtaagtgagtttgccggaaacggcggcctcgggtttcggagttgcctgcacggcgggtttctgcggggtgtccctgcgttcgacctcctggagcgattccagcttccgcttttcgaggaaatagtagatacccccgaggtactccttcaccccgccgtcgcggaactcatagaccttctgcaccatgccgtcgaggaattcgcggtcgtgcgacacgatgacgaccgtgccgtcgtacttcatgatggcattcttgaggatgtccttcgaacgcatgtccatgtggttggtcggctcgtccagtaccagcaggttgcgcggttcgagcatcatgcgggccatggccagacgtgcccgctcgccgcccgaaagcaccttgacctttttgtcgatatcctcgccgcggaacaggaacgccccgaggatatcgcgcaggcgggtacggatgtcccccacggccacgcggtcgagcgtatcgtagacggtgaattcgccgtccatcaggtcgtcctggttctgggcatagtagccgatattgacgttggcaccgagccgcaccgaaccttcggtcggcgtcagctgcccgacgagcatacgcgccagcgtggtcttgccttcgccgttacggccgacgagggcgatcttgtcgccctttccgatgatgaaattcgcgccgctgaagacatgcttcgccccgaacgacatcccggcttcgttgatctcggccacgatctgtcccgagcggggtgcgggcgggaacttgatattgagcgtcgccaagtcttcctcctcgacctcgagccgttcgaggcgttcgagttgcttgatgcgcgactgcacctggttcgacttggtgggtttgtagcggaacttctcgatgaattcctcggtcttttcgatcatgcgctgctggttttcataggcagccatctgctgtgcccggcgttcggcgcgcagcacgacatatttcgaataggaaaccttgtaatcggtcgctttgcccagcgaaagctcgaccgtgcggttggtgacgttgtcgaggaaagcgcggtcgtgcgaaatcagcagcacggcgccgctgtaattcttcaggtaatcctcgagccactggatcgactcgatgtcgaggtggttcgtcggctcatcgagcaggaagatcgagggacggcgcaacagcagtttcgccagctcgatacgcatgcgccagccgcccgagaattcgctcgtcggacgtccgaaatcctcgcgtttgaacccgagccccagcagcgtcttttcgatatccgcatcgcgggtctcgccgccgaggatatggtagtgatcctgcgcatcgttcaggcggtgcaacagctgcgcataaccgtcgctttcgtagtcggtacgctccgcgatctcgcgcgtcaggtgctcgatctcggcctcgaggcgcagcacctcctcgaacgccttggcggtctcctcgacgagcgtcgtcgtatcggccacacgcatggtctgcggcaggtagccgatcgtacagtcgccgttcagggtcacgctgcccgaggtcggttgctgctcgcccgtaatgatgcgcagcagcgtggttttgcccgccccgttccggccgacgaggccgatgcggtctttggggtttatcaggaacgatatgttgtcgaagagcgtccagcccccgtaacttacagtaagattgtcaagagatatcatggtctgtctaaaatcacggcaaagttagtgatttaatccgacatatcgtatctttgaactccgaaacgaacattgttatagtatggagaagttggaacgctacctgcggttcatccgcgaggccgaacggctgaaaaacgtcctgcgcacggcgcacacctcgaccgggaggcacgaaagcacggccgaacactcgtggcggctggccctgctggccgccgtcctcaccggcgaacgcccccggctggacatgcaacgggtattgttgatgtgcctcgtccacgacctcggcgaagcgtatgacggggacattccggccgtggcgcagatggccgacggcaccaaggaggctgcggagctggccgcaatggacaaactgacgcgcatgctcccgcccgcggccggaacggcaatccggaagatatgggaggaatacgaagcatgccagacgcccgaggcgcggtgggtgaaagccctcgacaaagccgagaccatcatccagcataaccaaggtgccaatcccgccgatttcgattacgcgttcaacctgacctacggctccggctatttccgcgacgacgacctgctgcgcgacctgcgccgcctgctggacgacgagacccgacggcacatcgtcccctgagccgctgcggaatgcaatacgggcgcgacacccaggcaaaacccggaacacgagacgtccggaatccctgaaaaccctggccgcttcgccccgaaatatccggcgcgccgaatggtcaggcgttgagcatccgcacgatctcggcctgcgggtcttcggcgccgaaaacggcattcccggcaaccagcacgtcggcccctgcctcgtagacctcgcgggagttgtgcgacgagatgccgccgtcgacctcgatgatggtctgcaaccccaactcccgagccatggcccgcagagcccggatcttcccggtcgaagccgggatgaacgactgcccgccgaaaccgggttcgacgctcatcaccagcaccaggtcgaccagcgggaggatatcgcgcagcacctcgaccgaagtcgccggcttgatcgacaccccggccttcgcaccggccttgcggatcatttctatgcaccccctgggatcgtacgtggcttcgtagtggaaggtcacgatgtcggcgcccgcctcggcgaaacgcgctacgtaacgctccggctcgacgatcatcaggtgcacgtcgaggcactttgcggtcaccttgcggatggccttcagcaccggaaacccgaaggagatattggggacgaacacgccgtccatcacgtcgatatgtacccactcggccgcactgcggtcgaccatctgcgtgtcgcgttccaggtggccgaaatcggccgaaagcatcgaaggtgctacgattctgttcatggttcgaatattacttacgacaaatatagtcatttcccggcagttttccacgcttcggagcgggattccgtccccgcaaacccgggttttggggttcggggttgcagttcgggattccgaatgccggttccctgtcgcacggtctttccggggattccgtcccgaaagagctgccggtcaggatcttttccggttcagggtgtcgatcctccggcgtatcgcaatgccgttggacagcgaaagcagcaatgcaagccctatgccgcatacccatgtaacgccgaccccggccggggcgtacccctcctgcaatgctgccagttcgggcaggtaccacatacgcaccagccacgacaaaaccacggccacgacgaggacgcccaggttgagccacagggtcagcaaccaatacggacgtgccacacgtcccggtgcataacccagcaggagcagattttccagtttcgcgctgttcttctgcaagagcaggaaaatgctcagcatcagaatgtagaaagacatcacgctgaacaccagccccacccctccgagtcctccggctgcaagctgcaggaaataggcagccttcccgtcgtcacggcggtcgccttcggcctcatagcccttgccgtcgaggtaagccgaaatcgcggcatccacagggcggtcggtctcgacgatgacccgcgatgcctgtttctccccgccctggccgaaccgcccgttcgaccaacggatgaaagactccggaacgaggatcgtattgaggcggttcgacaacccgacgatacggccccggaactgttcagtccgcccgttgccggcgacctcgatgccgagcgaaacccgctgaaatatcccctccgaaatctgcggcagcccctgcgacttggcaaacccgtaattatagaggttcaggtaattgcgcgggatgatgatggggatatccccgtcgccgggttcgtatttccacttcccggaggtgacatcgagaaaacggtcgggcaccgcctcgaaaaagaggtaggtcgagagctgcacgccgcccatgcccaccgtccccttcacccggtagtccgccggcgtgaaagccccgacgtcccggacgaaaggctgtcccttcaattcctccagctccgcgggggtaaagtcgctgctccccagcccgatcgtctggagtgcgccgacccgtttcgaaagtaccaggtaatcgccccgcatgaacgaatcgggggcatcgaagaccggcatgacatcgcggtaagcctgcaccgaggtgagcacgatggtcatgcccacgaccccggcgagggcgaaacctacggtctgcgcgacgctcagatggctgcgcagcaatttccagagcagcgtcatagcgtaagggttttatggtagggaagctcgagccggctgcccaccgaggtaacgacgatacccgccccctgcgcctgcgcctcttccagcagcatcccggagagcaactccccgttagcggcatcgaggtggctgacaggctcatcgagcaggatgaaatcgaacggctggcacatgcagcgaatgaaggccacgcgctgctgctgtccgaaggagagcttttcgaccggggcatcccgcttatcggcgatacccgcagcctcgagcattcgcccgatctgctcctgcgtcttgaaatgcgtgagctcgtttttcaggccgatattctccgcgacggtcaattcgccgaaaagacgcaaatcctggaaaagcatactcagcgacctgcggcgcaggccgctccacgccgcggcggaaaagccgcggcaatccgccccgtcgaagagtatccgccccgcgtaatcctcccggatgccgtagagaaagtggcacagcgaagttttccccgttcccgaagcagcctcgagcaggcagtactcccccttgcggaaggtcacctcctgcaaccagacccccgaatcccgcggagccgctttccccgcgaacacgcagggcagcacccgttgcaaagttatcgattccatacgttctttatttcaaggtaaacggccgttcgaatcccggacggccgtttaccataaaccccgaaggttattacaaattgacctccggtacgtaccggcggatcagttcgccgattttgtcgcagacagtcttaaaggagttctgctccttgtccgtcatattgattacggcagtcccgcccttcatcgtaccataggcttccaggtcttcgaacatggccagcacggagagcgcggcctcgacctgcgggtcgacattaccgccgacaagctgcgcggtcagcgcggtcacaccctcgaaatcgacgtagaagcttcccgactggcccttgaatatcttgctcatcgaagccagcgattcgatgtccgcaccgtcgagcgccgatttcacgaccgcatcggtcgtacagtaaagcacatcgcctttcacgccgaacagcaccgtgacaccgcccatgctgatcgtatattcgccttcgcccgccttctggatgggcataccggagaggttggagacgatcgtctgcaacacggcgggatccttcacctgggccagcagcgacgctacgggatactgaccgtcggctgtcatccctgagaacgagatcacgcagtcgccgctgaaagcatccatcacttgcttgaccatcgggttggccatcagcatcccgtaaccgggcattgcggagaacaccgagtacatcttctcgccgtcgaggccgtaggccatcgcaccgatcgtattccggggtacgtagcgcaacagggcgcccgtctggggcttcacgtaggcgtagaaatccatcatcttctgttcgctctccttgtccttgtacgacacggcggcatcgcaaacgatccgtcccttctcgaaattgacggaacttgccagcgtggcacccttgagggcttccatcatcggcatcgaactcatcatcgggttgctatccattatcgacaccagtgccgaatagaccatcaccatgttgatgtcgttcttctcggagagctgcccggcaacaactttatcgcccatcaggctctcgccgctcttctgggcaaagagtttcttaacggcatcgagtccgctttctggcgacccctgcgcgaaatagagcatgacagccacatcgttgtaggcgcacaacccgctcacggagctgtcctcgcccaatgcgatgaccgagataccgccctcgttccggggtgcaatgccgcttttctcgttgatacgggcgagcagcgcgtccagtttcgccttatcgccgacgggcagcagcataccgccccggacattcggggactgcatcgcgccatccatcgacatgaagaagaacaggtcttttttcaggtcgatacccgattcacaggggttcttcagcagggccagcaggtattccttctcttcggcagtgatgccatcggccttgtcgagctcggccttgagccggatgaagagcggatgctgcccgatgtcgccggcatcgctcttctgcagaagcgaagcggggttgaccgacatcgtcataaaggaatcggcaggcaggaaattgcggtaatcggcacttccgccgcaggaaacaactagcatggacactgcagcgaggcaggccagtttcagggatcgtaacgtttttttcatattcgaaattatttgaatccgtatttggaacaaacaaagctataaaaaaatacgtaacaacctgcgacatcgggactaaaaattgcgttgcggggctaaattaacgcacatgccccggtacggggtgtttttccgggaataaattgctatttttgcatggaaacagacacaaaaacacacgatgactcctaccacccttttcatattggccgctacgtgcagcctggcagtgcccgtcgccctgttcctcgtactctggcgcagggacacccggcggcttgccgctgacaaccaagcctccgaagcccgcgagcgcgatgccacgtcgcggctggcggcggccgaagcccggctggccgccgcggaacaagccttgtccgcggaaaaagagttgcggcagcgctacgaaggacaggtgcaggcgctgaccgagcagcggacgcgtaccgaagcggaactggcggcactccgcgcctcatccgaggccgagatcgcatcgctgcgcgcgaagaacgccgaggatcgcgcggccgaaaaagccgagcgcgaaaaactggaggagaccttccgggcccagttccgcaaccttgcgaccgagatactgggcgagcagtccaagcatttcaaggagaccaacaaggagtcgctcgacgtgctgctcaaacccttccgcgacaacatcgtcgaattccgcaagcgcgtcgaggacatctacaccacgcagacggcacagcgcggcgaactgaaggccgagctgaaaaacctgatggagctcaaccggcgcatcacgaccgagaccacgaacctgaccaacgcactgaaaggcaattcgaaagtgcagggcgactggggcgaaatgctgctggaaacgatcctggacagttcagcgctcatcaagggcatccactacgaaacgcaatacaacatcaaggacgccgagggacacaacctgcgccccgacgtcgtgctgcacctgcccgagaagaaagacatcgtcatcgactcgaaggtttcgctcacggctttcgtaggctacacctcggccgaaaccgaagaggagcgccgccgctgcctcgcagcgcacacggcctccgtccgccagcacgtcaacgaactgggacgcaaggagtaccagcgcctgctcaactcgcccgacttcgtcatcatgttcatccccaacgaaccggccttcctcgccgcattgcagaacgacgcggccatctggtcggacgcctacgacaagaaggtcatcatctcgtcgccgacgaaccttttcgccctgctcaaactggtcgccgacctgtggaaatacaacgaccaggacaagaacaccagggacatcgccgcatgcgggctgaaactctatgaacaactggtggccttcaccggttcgctcgaaggggtcggcacagcgctggacaaggcacgcgacgcctatgacgacgcctacaaacggctctgcacgggcaacgacaacatcatccgcgtcggggaacggctgcgcaggacggcgcgcctacaaaccaagaaacaacactccgcgcgcacgctcgaagccgccggggaggacgacctcccgggcatccccgccgccgaaaccgggggcgggaatccggttcccggagccggaggcgaagaataaccgaactgcccggcgcgccagcccggatacccgggcacagaggaacacgggaggaggcaaagccccccccctataacatgcaaaagcccgccgatgttcggcgggcttttacatttcccggcaggagatttcccatgtcgtgcacaaaatccggctcacggcctgcggggttccctccagtttttgcgcatccgcacttcgatcccgggcgtcgcgtcgtgcgccatcgtctccacgatgtcgtcccacacctcctgaacccagccgacacgtcgccggcaatgcttcagcacctcgaccgcccaaatcttcacggcgaccttcgcccccggctcgaccgcccatcgggcggcggcctccgcaatccgctccatatcccgcctcccgggcgagtaacgccccagcaggtcggccatgacctttgcgaagtgacgccgggcactgggatcggcgcaggccgggaaatccgtcccgcaaaacttaccggcacagggcatgaacgaatccggggcgtcgaaatagattttctcgagtacatacgcaccccggaaagccaccttgtgcctcacggcacgcggcaacccctcgtagcgggaggtcaccacctcatacagcagccccacggcacccgcatcacgcacgcgccgggccaccgtgtcggcaaaatcggaataaaaccgctccgacaggcattttatcaactccgcttccatcataccggtatactcccgccgaacccccgattctgaaggttcgccatacagcaaccccgaaaagcccggggccttacggccatgccagacgccacagcatgaaaaacgccgtcagaacaactttttcttcgacatcgtaacgacaaaatccttcaggtagaaaggttcgaaataggcgatatcttccgtgcatcccgcatcgagcgcacgctgggccagccgcgcaagcccgcgtgcggaaggggctacctcgacaagcacggcgtcgggcagtatcccggcgcatttgcgggccccactgccgaagatcacgaacggcctcccctgcgaacggaagtgcgcaaagctctccccgtcaacgacctcggccgaaacttcgttcaggggcttgccagttgtatcgaatacctgcgcatagacctccatgcggcgggcatcgaccatcgggcaaaggcaggcatgttcccagtcggggacggaaagaattccggcttcgtagtcttcgagtgccacttcggccagcgcatcgagcgacccgacggccaccagcggcttacgcaccccgtagcacagccccttggcgaacgaaacgccgatacgcagccccgtataggagccggggcccttgcccacggccacggcatccagttcatcgggcgcaatgcccgtttcgcgcaaaagctcgtcgacgaacacgccgaccttacgggcgtggtcgcgcccctcgtcgctctcgcgcagcgaaagcagctccccgtcctttgcaataccgaccgaacaaacgtccgtaccggtctcgatacatagaatcaagctcatatcttcgataaattcaaactcaatcgtccaaaatacccaggtgctccagcgcccgggcaatgccgtcgtcgtcgaccgtagcggtcacgtagtcggcggcgttcagcgcctcgtcgcaggcattgcccatggcaatccccacccccgcggcagacaacatcgccacgtcgttgccgccgtcgccgaaggccgcgacctccgaagcccgtaatccgcaggcggacataaattccctcatacccgtggccttgtcgatgcctgcgacattgatgtcggcgaaaatcgggcaccaccggctcgccgcaagcccgggcaactgcgccatgacgcgccgttcggtctccgtatccagatagaaacacatctggcagcactcgctccggccgaaaagcgcacggaggtcggtctgctcgggcacgggatgcgcgaccatatgcgccagccgttccacctcgggcgtcacacggttgacgaatacaccgctctccagttccagcgccagcgggaatcccatctgcgaggaaagctccatggcgcgttcgaaattggcccgcggaatcgggtgctggcttaccacacgcccgtcggcagccacacaccgtgcgccgttgagcgacaccacgccgtcgtagggaatcccctcgagcggagcgaggtcgttcgccgcacgccccgtagcgataaagagccggatgccccgcgcatgcgcccgcaccagggcatcgcgtgccgaagcgggtatttcatgggtcttgaaactgatcagcgtaccgtccacatcgaggaaaacagctcgtatcatcgtttgtaatttttcatcgccttgtcgatctcacgcttggcatcgttttccttcaggtattcgcgcttgtcataggtcttccggccccgggccagcccgaccacgaccttggccagtccccgttcgttcaggaacaggcgcagccccacgatcgtgaggcccttgtcctgccccgcacgctggagtttgtccagctcgcggcggttgagcagcagtttccggtcgcggcgcggcgcatggttgttgcaggtgccccacccgtattcggcgatgttgacaccccgtatccacagctcgcccttgtcgaaataacagaacgaatcagtcagcgaagccttgcccgcacggatggacttaatctcggtaccaacgagcacgatgcccgcaacgtactcttccagaatctcatagtcgaacgtcgcgcgcttgttacggatatttatctttttctgttcactcatatattcggaatcggcacaataattgcctatttattcgcaggggtgggaatcggtcaaggtaactaattcttttatctttgatatgttttacacatctttctgtttattttctgtttgcacacggtatgcgtagtgatacgtgtacgacccgagacccgcccctttttttcttttaaaattcaaaccccggcatattcccgcccggcactccgccgggcgcggtcataatatcaaccgctgcaatttctttgcaatcgtcactttcaccttgttgaacccggccagccgctggatcacctcgccgacctgctcgtccgtgaggctctcgtccgcgagcttggcctgccactccttgatatagctttcgatcaccttcgacttgtagagcgtcacggccttcggcacccctacggccagcatctcggcatcgctctcgacatggatgtccttgcgccgccacagctggctggccacgtaattgtcgtccgacgtaaggatgtcgaccgaggcgttgcacacctccgggtcgggatggttcaggaaaaagtgcgccgggacttccacccccgtaccgagaatcttccactgctcacggtaagttgccaaaatactgttgtatagcggattgcgaaacgtaagcccgtcgctgtccagttccaggaagatcacctccgcgacgttgcacgccaccatcgtgcgcccctccttgaactcgaacgaacaatggccgtatttgagcaggtatttcaccagttcgcgttcgagcgcctcggtgctgctccctgcctcgacctgcttcacgaattccacctcgggctgcggagcctccgccttccgcaacgccgtctggcggcgtacgaattcgtcggcctcgcggtcgccggtcgtcgccatgcgcttgcgcgccacctccgagatcaggatgttctcgtcgatgtccatgatccgcgcgcactccttgatgtaaaccgaccgctggatcggatcgggaatctgcgcgatcgactgcaccatatcggcgatcagcgccgccttccggatcgggtcgccctgggcggcctccaacagcaattttgctttgaaggccaggaaatcctgttcgttggcccggatatattcctgcacctcggccgcagtgtgcgcccgggcgaaggagtcgggatcctcgggttcgggcagcagcaccacgcgcacgttcatcccctcccggaggatcatgtcgatcccgcgcagcgaagcgtggatacccgccgagtctccgtcgtaaatgaccgtgatgtttttcgtaaaacggttcagcaggcgtatctgctcggtcgtgagcgatgtcccggacgacgaaacgacgttctcgacacccgcctggtgcatcgaaatcacatcggtatagccttcgaccatgatggcgaagtcgagctgctggatcgccttcttggcgaaatagagtccgtacagctcacgtttcttgctgtatatctcgctctcgggcgaattctggtacttggcaacggtcttgtcggtacgcagcgtacggccgccgaaagcgacgatgcgccccgaaatgttatgtacggggaaaatcacccggtcgcggaagcggtcgtagagcgaaccgtcgctctcgcgttcgagcgaaaggccggtagagaccaagaactcctttttatatcccgccgccagcgcatccttcgacatccggtcgccacgcgcggggcagaacccgaggccgaacttcttgatcgtggcgtcggtcatgccgcgcttctggcggaaataggtcatacccacgctcatgccctcggtctcgtggtgcaggtagttggagaaataatcggccgcccagccgttgagcgcgaacatcgattcgcggtcgtcgttgcggcgtacctcttcctcggacatctccttctccttgacctcgatgccgtatcgtttggccaccatcttcagggcttcgggataggtgatgttctcgtgctccatcaggaacgtgacggcattgccgcctttgccgcagccgaagcatttatatacccccttcgagggcgacacgacgaacgacggggttttctcgttgtggaacgggcagcaggcctgatagttcacacccttgcgcttgagcgtgacgtactcaccgataatatccacgatattggcggctgcataaatgcggtctactgtttccctgtcgatcatgtctgcaaagatagcaataattccccaacccttagcggggtgcaaaaagtttttgccgggcggagaagatcagtacccaaccgtcctgatgtcttccagctcggcgcggatggcctcgttcaatccgcaggcaggcaccaagcctcgggtgatgaccccggaaccgagcgtgtcatccatctggcagcggaagcagcactcctgattttcccgtgcacggagaaaaacaagctcagggcgcagcggagcgtatcttcgtgcaccttgtccaactccccgcggccggatgcggcggcacattgccgcatggcatacatctcggtcgtaaaatcggcgatcaccccttccgacatatcgaggtggcgcagcacatcggacttgaacagcccgacaatctcccgggcatcctgccgtttctggcagttcgtaataagccgcccgcccccgaacgtaatgacgacacccaggatcacggccagggaattgagccggaacgacttccagccttcgctttcgaacagcttcatatggcgtggcgggacaattttaactgtccccggtacgtttcaaaacagacgctccgccttggccaaaccggggcgacatttcaccataccgttttttttatctacttttgcaccatggatttcaagttggtatcggattacgccccgatgggcgaccagccggaagcgatcgcacagctcgtcggctcgatccggcacggctccaaacataacaccctgctgggggtgacaggctcgggaaagaccttcaccgtggccaacgtcatcgcgcagctgaaccgcccgacgctcgtcctgagccacaacaagacgctcgcggcgcagctttacggcgagttccgcaatttcttcccggagaacgccgtggagtatttcgtctcctactacgactattaccagccggaggcctacctcccctcgacggacaccttcatcgaaaaagacctttcgatcaacgccgagatcgagaaactgcgcctgcgcaccgtagccacgctgctgtcggggcgccgcgacgtgatcgtcgtatcgagcgtatcgtgcctctacggcgccggcaacccggcggatttccatgccacggccatcaacatccgggtcgggcaggtcgtcagctacaagcatttcctctacaagctggtcgaagcgctctacacgcgcaccgaacgcgacctggaaccggcgacgttccgcgtcaacggcgacacggtggacatcatggcggccttcggcgaattcggcagccagtgcttccgcgtaatgttctacgacaacgaagtcgaggccatccagaccatcgaccccgcgacggggcagcgtatccactcgctcgacaacctgacgctctaccccacgagcctcttcgtcaccaccaaggagcgcatcaactgcgccgtacaacagatatacctggatctgggcaggcagatcgaattcttcgagcgtgccggacgcacgacggaggcgcagcgcatcaagcagcgcgtggaatacgacgtcgagatgatcaaggagttggggtactgccccggcatcgagaactactcgcgttatttcgacggccgcgccgagggcacgcgccctttctgcctgattgactatttcccgaaggattacatgctcgtcgtagacgaaagccacgtcacgctgccgcaggtacacgccatgtacggcggcgatcgcgcccgcaaggaaaacctcgtggagtacggattccgactcccggcggccaaggacaaccgtccggtgaccttcgccgagttcgagcagttgcagggcacgtcgatctacgtgagcgccacgcccgccgactacgaactgatgaagagcgaaggcgtgatcgtcgaacagctgatccgccccacggggctggtcgacccgccgctcgaggtgcgcgtcacggccaaccagatcgacgacctgctggaggagatcgacaagcgcgtgaaggacgacgacaaggtgctcgtgacgaccatcaccaaacgcatggccgaggaactttcgaaatacttcgaccgggtgggcgtgcgcaaccgctacatccactcggacgtggatacgctggaacgcatccagattctggaagacctgcgggccggaatgttcgacgtgctggtgggcgtgaacctgctgcgcgaagggctcgacctgcccgaagtggcgctggtggcgatcctcgacgccgacaaggagggtttcctgcgcaacgtgcggtcgctgacgcagatcgcgggacgcgccgcgcgccattcacagggcaacgtgatcctctatgccgacacctgcaccgactccatgcgcttcgccatcgagcagagcaaccgccggcgcgagaaacaggtgcgctacaacatggagcacggcatgctgccgcgccgggcgcagaagagcggcacggggcaaagtaccctgctctccgcgcgcaccgacgtcccggaaatagcggcgagctacccgctcgccgaagaccactacatggccgccgcggacgtacagagaacctacgccgccagcgagaatatcgacacgctgatcgacaaggcgcgcgaagacatggaacgtgcggccaaatcgctcgacttcctcgccgccgcgaaattccgcgacaggatgtacgaactgcagaaactcaaggaggagaatcggaaaggctgacacgcccggccccgcggttattcgcggacggcgttgcggaaggtgaaatacttggcggccaggtagctgtacaccatcgtccccagcgaggccatcatttgcgaaggcgtcgcccaaaacccgcacaactcgacgaagaatttcaggaagagataattgaccaccaccgagccggcgacggagaggaggtagcggaaaagctgcgtccccgtggcaagcggcgaacggcggaacgccacatggcggttcagccagaaccccgtgaagaaggtcagcggaaaaacgatcagcatcgccgcgacatgcggggaaaccgcgatgaaaccgaggtcgagcagctccttgtcgagcacgaaattatagagcagaaaatagcatccccagccgaaaaccacgttcgcgccgccgcaaacggcataacgaaacgtctggcgcggcaatagcgcagaaacaggccggcggtagaaccagtcgatgaaacggattatcagctcggaaagacgcatcaacgggcagtgtaagtccacagcccggggaaacggtcgctataattacggatgaacaacgtacatgcctccgcatcgggcgcctcgaaaggtgaaaccatgaatttattgccgaaacggtagaccccgcagcgtaccgatgcatccctggcttcggcatccgcggcggcccgggccgcattttccggcgtactgaaaacccccagcacgacataccggtgtcccgaaacgagcgatgcaggctccgtggagacccgtgccgccgacccgggacgctgtccggcaggtttggcatccgcacggtcaccggcgctgtccgccgtcccggccgcacccgcagcactgctcccggcaacgtcggtttccgcagccttcgttcccgcaactaccgtcgcagtcccgtcgtccgtcacaccggccgtcgcggacgaatcggcgggaatccccgcatccgcggcgggcaaggtgcgcgctacttcggcgatcgcgccgggttccggaatatcggaagaattgatgcgcaggaattcggcgccgccgaaacccgccgcaatcacgatcgccgcgatgccgacccacagcgcccagtccaaccggcgggcaggcttgatccgcacgggctcgtgtccctgcgggttcagcagcctgtcgaacgcgggtgcaagcgtaaaattcttgaatttgagcacgccgacgccctctatggtcagcacgtcgccctcgcgcgtgcgggaaagccagcggtcgtaaacatcctgtgctccggcagcgtcgcagtgcagcgtacgtgccaattcatcggcaagcgataccccctgctgctgcgaagagaaggataccacgcggcagggaggaaggactgtacgtttggaaagccgcctggcaccgcgccgctcgacaaagagcgaccctacgccaggcaggaacaccccgctgccggcggcaagcaggttgccgacaaggcggttcacttcatcgaccatcgggtaattgctcatcgtttcttcttttttggagtcgctgccggggctttcggcaccggagcgggggaaacttcgggcccggacacaccccggtaaatcatgtaaatacccagcacgataaacggaatgctcagccattgccccatatcgagcacccatccctgttcgaacgcctcctgctcggtcttgataaactcgatgaagaagcgcgtcaggaaaatcccgagcagcccgatgccgaacaggatgcccggacggcgccgcgcgatgtccttcgcataatagagccagcaaaggatgccgaaggtgataaggtagcagagcgcctcgtaaatctgggtcgggtgtaccgccgcgggggcgaactcgttcacccacttggccgagcggacgaattcgaagccccacggcagggtcgtggccatgccgaagatctccgaattgaaaaggttgcccagccgtacgacggcaccgccgatgcccaccgcgatcatgatgcggtcgagcgaccagatatagggcagcttgttcttgcgcgagaacagccagaggccgatcaagaggccgatggcggcgccgtggctggccatgccgccgtcccggaaacccgtgatgatcgtccacggcttgctgaggtattccatcgggtcgtagaagaggcagtgccccagccgcgccccgatgatcgtcgccagcgtaccatatataaaaatcgactcggagaccttcggcggaagcccctcgcgcttgcagaagttatcgaaaaacttggcgccgatcaggattgccagcgcccacatcaatccgtaatagcggatgtcgagcgacccgatggagaagaacaccgggtcgaaattccaaacgatgcttaacggtcgtatcatttattcagttcttgcaggttgacttttttgagcgtaaacgagaaggtactccccacgcccggttcgctgcgcacgctgatgcgttcgccgtgcgcttcgatgatatgcttcacgatcgccagtccgaggccggtaccgccctgctcgcgcgaacgccccttgtcggtacggtagaatcgctcgaagacgcggggcaaatcctccttactgattcccaatccgttatcctccacctcgacaagtattttgtcgagcatgtcgcggaaatggacgcgcgtcagaccgccctccttcccgtagcggatcgagttgatgacgaggttcacgatgacctggccgatgtaatgtttgtcggccagcacccagaacggcgagggaaggttgtcggcgcccttgatcgaaatccggatgccttttttgtcggcctccatctcggcctgctcggcgatctccttcgtcagcgccacgatgtcgaacttctccatttcgaggcggttcatgttgctctccagcttggagatggtatccaggtcgttgacgatattgatcaggcggtcgatgctcttctcggcccgctcgaggtatttgcggttgatgagctcgtcctccaggcctccgtcgagcagtgtcgagatatacccctggatattgaagatcggggttttgagctcgtgcgccacgttgcccaggtactgtttgcggaactgctcggtctccttgaggcgggcgatctccttgtcgttcgtatccgcccacgccgtgagttcctcgccgatattctcgacgtgcttgtccttcagctcggagaaaatctcgtgcgtatgcacgtcgcgcgaaagcacgatggaatagatcggtttgagcttgtaagccacatacttgcggatgatgaacagcgccacgagcgccacgacgacaaagacggcgccgcagacgcacagcgtcacccaccacaccgcatcgagcagcgtcatcgtcccggccacaatggccgttgcgaggagcgcgatccacagcgatgcgccctcttttgttttgatgtacaccataggcttacttcgtataattttgcatgaggcgggcaatgtacttgcccacgatgtcgaattcgaggttcacgaccgaacccacgcctatgcggcagaaattcgtatgctcgaacgtatagggaatgatcgccacgcggaacgacgactccttcgagtcgcagaccgtcaggctcacgccgttgaccgtcaccgaccccttctccacggtacagagcccaccgccctgcggttcgtaggcgaacgtatagtaccagctgccgtcggcgtcctcgcgggccgtgcatacggccgtctggtcgacatgcccctggacaatatgcccgtcgagcagcgcatcgggtttcatcgagcgttcgaggttcaccagatcgcccacagccagcaggccgaggttgctcctgtcgagcgtctccttcatcgccgtgaccgtatacgtatcatcgcggatgtccacaactgtcaaacatacgccgttatgtgctatactctggtcgattttcaactcgcggcaaaagtccgcgcgcagcgtaaaatccttattctgacggtcggtacggatgtccacgacctccgccatgcgttccacgatccctgaaaacatattctcaactgtttattatcaatttgcctttaactttatacaccgagcttatatcactgacattcaaaattatgtcgtcataattttcccgatcgccggccaccaggcggagtttgtcctccccgtcggcgagccgaactatccgcaaagttacaatttttcggctgacaatcacatattcccccccgggaataattgcatcccggtcgacggccttcagcaagaccaccgcacccggcggcaaggcgtcccccatggcacgtcccatgtaacacatggcaagatcgcactcacccgcctgcgggatgaccaggctgctctcagcctcgaggtgggtgacgtgcgcgatggcctgttcgacgtccacattataaaaaggtatctgggcgccgcgcagtttcccgtccgcgaacatctgcccctcccccgtcagcagccacaatttatccacctgcgggaatttggagacgatgcggtcggccacgtcgagcgaaatgccgttgttaccgcgtttaatctggtagaggttttcgccgcgtgcaagcccgatatggcgggcgaagtagttggttgacatgttcgcccatttgattacggcttcgatcctctgccaattattttgcttttctcgcattttattagtaaaaattaaaaaaaatttgcatctttgcactcccggtcccgtagttcaatggatagaatataagattccggttcttacgatatgggttcgattcccgtcgggactacaaaggcacaagtgcacagattgctgcacttgtgcttttttgttagcgtcaattcacaatcttttattcaacaaaaataagaacaaattttcattagtcaataaaaaatagcataattaagccacaaaataacacattcggacagatcacaaaaaagtccgtatcgcttcgggtacggacttctccaagtcgtatttcacgtcccagggacgtgcaaacaggatatatcagttgaatgtcagaatgaaaggcgtactccgagacggagggtcagcgacagggaagaatcggtgcgcgatgtacgcagggtggtttccgtaaagtagtgcgaaacctcgggctcaaagtaaagcccgacataattgccgaggcggtactgtgccccgacggccccggccaccgaccactggactttgggttcgtcgacggatttggagccgaacttggcggacacgcatttctcgagcataccgcctgcgcccacgtacatcgagaaacgcccggtttcgaggaactgccagttcaggcgcaggggaaccccgatgaagtgaagcttttggctgatatcctcgccgccggactgcatgctcacgtccgaccataacaacgtatagttcacaccgctttcgagcgacaacccgtacgcgaactccttgcgcaccgaaaggccgaagctgagcggctgatggtggcggaacgaataatcctcgtaattgtatttcaattgcgccatcgtgccgttggtaccgcctacaaatatgtcggacatcaccagattggggccgacaccgcccgacgcccccgatgatccggtcacaccgcctgcggcgaagagcgaaaccgaagtcttgcgccggggacgcctgtattcctgcacgccatcggccaggtaatcgtacgtgcccgggtatttgcggggctgaacggcctgcccggcagcctcttctcccgggttcccgtccgtggcggacgcctgtccggcgactgccgcacgcacggccggccgcgtgccgtccgccgcggcatccccggtagcagcagccgctgcggaggcctttccggaagcctcgctccctgccaccgcattttccgcaaccgaattaccggtgacggcgtttgcagcaaccgcctccccggcgggcgcagctccggacgtcaaagccgctgcacggccgtcctcgaagccccgcatatcggcggcggcaagggcattccgtcccggtgcaatcccgggagccgtccccgcaccgggctcctcgcccggcagcgccgcagcccgcacggcctcttcggtcggaacggctgcgcggagcgcccccgcgagcgtcccttcaccatctcccgccggtgtcccatcgacctgcgccatgtccgcagcagagctgccgctgtccgtcgccgttgcaataacaaaccctttatcccctaaatcccggttttcatgcagcaggtatcccccgccacccaggaaaatcagcacagcggcggcagcggcagcaatccgcggccaatggctacgcaacacggagatacgcgggtgaggcccgagctcgcgctccagccgcgcccaaccgtcggccgggggtgtcacctcggtgccccggagcgcactccgcattacgtctgtccagtctttattttgtttcataatttaatgtgtctccatataggcccctattctgcgggccagcagtgcccgcgcgcggaataactgcgacgaggaacttttttcgttgatccccagcatctgcgcgatgtcgcggtgcgaatagccttcgatgcagtagaggttgaacaccgtacggtaaccgtcaggcaattcgctgacgaaccccatcagcacgtcgcgcggaatacgcgccacttccgacgggtcgggctccgggatgtcgggcaactgccttccgtcgtcgagcaccgtcatgctcagtttgttccggctgcggagccattcgagcgccacgttcaccgtgatccgttccatccaggcacgcagggaaccggggccgcggtaggaaaaacggtcgaaagcaccgtaaatcttcaggaacgcatcgtgcatcaggtcttcggcggtagaccggtcgcccgaatagcggaggcagacagccaacagacggcctgcataacggtcatacagctcacgacgggccgcattatccccttttctgcacccctcggccagtatctgctcctccattcccatatttgcgttcatcttataaacggtgtagccaccaaaagactgcacggcacccgaaaatttttatgcccgtgcagtattccgccccgccctgcatttaattagtgaagataacgcaaaaataattataaatatgaaaagattcggattatttcttctcgtgaccatggctgcggccattttcacctcctgcaacgattcggacggggactaccccaggctttcggctttcgcttcggtaaagccgctcgaaaataacgatttctatgtcgttctcgacgatggcaagacggtgtacccgggcgacaaaagccgcataggcagctataaggccgaggaagaccagcgcgtcgtcatatatttcaacctgctgaataacaaagtggaaggatacgattacaacatggcgctctattacatacaggacatctactcgggcggcacgaaagtcgtgaccacccaagaggaactcgacgcgctggaagacgacaaaaccagcttcaaggaggcattcctcaacagcaattacctcaatgtctgggtcgggttcaatgcctgtgacctcacgaaacacaccttcctgctggtacgcaacaacgtgacggagatcgctcctgaatacacggaagaggggtacctgaacctcgaactgcgccgcgacgcccacggcgacgaaggcggatacaactacgaccgttatgtctcgttcaagctggattccttcaaggaggatctcgaaggcaagaaaggtatcatcctgcgtgtgaacacccgcatgaacggggtgaaatacataaagatcgggctgccgcgtgagcaatagccggagcttccggcagcgaccccggcccgcatatcctgcgggccggattttttttcgccccgccgcggcaaagtagcacaaaatcgttatctttgcaacatgtcaatcgtacgcaacacagagagcgatctcgaattcgaaaacaagatacgtccgcaggagttggaaaccttttccgggcaggacaagatcgtcgacaacctccatattttcatcaaggcggcgctcatgcgcggcgattcgctcgaccacgtactgctgcacggccccccgggactgggcaagacgacccttgccaacatcatcgccaacgaaatgcacgcgcagctgcgcgtcacatcgggtcccgtgctggacaagccaggcgacctggccggactgctgaccaacctcaaccccggcgacgtgcttttcatcgacgagatacaccgcctgagcccgatcgtcgaggagtacctctactcggcgatggaggactacaagatcgacatcgtactcgacaaaggcccttcggcacgttcgatccagatcgagctggcgcctttcacgctgatcggcgccacgacccgcagcgggctgctcacatcgcccctgcgcgcgcgcttcggcatccagtgccatctggaatattacgacgccccggtactggccggcatcgtcaggcgttcggcacgcatcctcgacgtctcgatcgacgacgatgcggcgcacgaggtggccctgcgctcgcgcggcacgccccgcatcgccaacgccctgctgcgccgcgtgcgcgacttcgcaatggtcaagggcgaagggcacatcgacctgggaatcaccagaatcgggctttcggcgctcaacatcgactcgcgcggcctcgaccagatggacaacaagatactcggcaccatcatcgaaaagttcggcgggggccccgtcgggctgaataccatcgccacggccgtcggcgaagacgccggcacgatcgaggaggtctacgaaccgttcctcatcaaggaagggttcctcaaacgcacgccccgggggcgtgaagccaccgaactggcctaccggcacttggggttcaccccacccggtaaccccgaaaccctgctgttttgaggcatccgcccgaaccggccggcagccgtcaccgccgcactccccgattccgaaccagacatttttaaaatatgacccgcattcgtccatacctgctcacgtgctgttgcaccgcatcgctgttactggcttctggcagagccacgcaactcagggcggagacgcccggggcggaacccgcggtacaggaagtgccttgcgctgcattgggcggcccgttcgccgccgtacccggggaaacggcaccatcggccgggaagcaggtcgcgcagcggggcagggcgcagtccctccgggcgcagcacctggccccgcgcaaccgctcgcagcacacgttctttgccaacgcggcgtatacggctgtcatctcgacgctttacctggccgaaagctcctccggctcgctgaacgaaggctacgacatcagtgccgggtacaactggacgtcgcgccggggcttcggcgccggaatcgtctactcgggcggattcctcgcggccgaacgcaatgggatccggcgcacgagccgtatccactacatcgcgccggagttcgtcgcccggcagcgggccgggcgcagatggctcttccgggaaagcgcgggcatcggctacggccgctacatccgcagctacggcgatacatcgggcagcaggggcggcgtaggcatccatgaatcggcctcggtggagttcatgctgggacgccacatcggcctgggcgcggggatcagcgggcaatggctgatcgtcgactcgccggacgtggacgacggcgccgaactgagcctgttcggcatcttccgcttccagttcgggggagggctgcgggtttatttttaactccgccccgtacgatgcccgttccgggacggaagggcgcaataattgcaggatttttcacgttgtgtctcttagacacaagcaaaacagttaggataatgagaaaaggtaaaatggatcaggaggctctgcgctatcacagcgaaggccgcccagggaaaatcgcgatcgtaccgacgaagccctatcacacgcagcacgacctgtcgctggcctattcgcccggcgtcgcagctccgtgccgcgaaatcgaagctaaccccgaagaggtttaccgttacacgaacaaaggcaatctggtagcagtcatttcgaacggcacggccgtcctgggactgggcaatatcggagctctggcaggcaagcccgtcatggaaggtaaaagcatgctcttcaaaacttacgccgacatcgacgccttcgacatcgaagtcgacgaaaccgatcccgaggcattcatccgcacggtgaaggcgatagccccgacgttcgggggcatcaacctcgaagacatcaaagccccggaatgcttcgaaatcgaccggaggctgagcgaagaactggatattcccgtgatgcacgacgaccagcacggcacggccgtcatctcgaccgccgcaatgctcaatgccgtaaagatcgccggcaagacgctcgacaaactccgcgtggtggtcaacggcgccggggccgcggccatcgcctgcgcacggctgttcatcgccgtaggcgtccgccgtgagaacatggtcttctgcgacagccgcggcgtggtcacgacttaccgtacggatatcaacgaaatcaaacgtgaattcgccaccacgcgccgcatcaccacgctggccgaggcgctgcacggcgccgacctcttcctcggggtttcgacggccgacgtgctgacgcccgaaatgctgcgtacgatgtcgaccgacccgatcgtcatggcactcgccaaccccgaccccgaaatcgcctacgacaaagccgtcgtatcgcgtccggacatcatcttcgccacggggcgctcggactaccccaaccaagtcaacaacgtgctgggcttcccctacattttccgcggggcgctcgatgtccgggccacgaagatcaacgaagcgatgaaactcgccgcggcacatgcgctcgccgggctggcccaggaaccggtgccgacaatggtactgcgggcctatgcgctcgaaaaactcgaattcggccgcgactacctgattcccaagccgttcgacccgcggttgctatgtaccgtagcgcccgccgtggcacgcgccgcgatcgaatcgggcgtcgcacggcagcccatcgccgattgggacgcctacacggaaaaactccggacgctgaccgagatatagtcccggaagggtatcgtgcaataaaaaggcccggctttcggccgggtctttttattgcacgatgatgcctgtaccagccgggtcacgcaaacagcgccgcaaactcgtcgtgcgacatccggcgcacgtcgcaatcgccgatgcctataggcaccacgatacgcagcatgccgtcctcattcttcttgtccttgcccacctctttgagcagccgcttcacatcgacgggcggcgtgaggtcgaaccccagttttttcagcaccccggcgatccggtcgcggtcttccgccgtcagtacgccgagcttcaccgaggcatcggcgatcagcgccgtgcccaccgccacggcctcgccgtggttcaggcggttggtacacttctcgatggcgtgcgccagcgtatgcccgaggttgagcttgcggcggtcgcccgactcgcgctcgtcgcgttcgacaatgtcggccttcacgcggatcgacgccgagacggcatccgtaagcaggtcggtattggaacgcaggtcgtcgaaggtcgtggcttcgatccgcgcgaagaggtcggcatcggcgatgatggccgccttgacgacttcggccagcccggcgcggaactcccggtcggagagcgtgcgcagcatcccggggtcgcagatcacgaacctgggctgcgagaatgtccccgccatattcttgtagccgtcgacattcacgccgttcttgccgcccacgctggcgtcgacctgtcccagcagagtcgtcgagacgaacccgaaatcgaggccgcgcatgtaggtcgcggcggcgaaacccgccacgtcggtcacgataccgcccccgatccccagcacgaaagtcgaccggtcgacgcccagttcgatgaagcggcggtagatcgattcgacggtttgcagggtctttatactctccccgaggccaatcagcaccgtatcgtaaggagccagcatcgggtggtagagccggtctatcgtggcgtcggatacgacgaccacgcgtccctcgggcagtactcccggcaggatgtcggccgtgggcccgatataaatctcgctctgctgccggacattgaagatgggttccataataattaaacttttttaataagccaacaaatttagtatattttcccgagaaattgttacctttgcaccacaaattcttttcacatgcaaaaactacgcaatattgcaattattgcacacgtggatcacggcaagaccacgctcgtagacaagatgatcctggccggcaacatcctgcgcgacaacgccaagcaaaccggcgagctgatcctcgacaacaacgacctcgaacgcgaacgcggtatcacgatcctctcgaagaacgtctcggtaatttacaaggattataaaatcaacatcatcgacaccccgggccacgccgacttcggcggcgaggtcgagcgcgtgctgaacatgtgcgacggcgtactgctgctggtcgacgccttcgaaggcaccatgccccagacccgcttcgtgctgcaaaaggcgctggcgctgggcaagaagcccatcgtggtaatcaacaaggtcgacaagcccaactgccgtcccgaagtggtcaacgaacaggttttcgacctgatgttcacgctcgacgccaccgaggagcagctcgactacaagactatctacggctcggccaaacagggctggatgtcgcacaaatggaacgagccgaccgactcgctcgtcccgctgctggacgccatcatcgacgagatacccgaaccggccgtggtagaaggcacgccccagatgctcatcacctcgctcgaatactcctcctacacggggcgtatcgccgtgggcaaggtgacgcgcggctcgctccgggcgggacagaacgtcacgctggccaagcgcgacggcacaacgatacagaagaccaggatcaaagacctgatggtcttcgaaggtctcggcaaaaagaaggtcgacgaagtgccgtgcggcgagatttgcgccatcatgggcatcgaagggtttgagatcggcgacacgatctgcgactacgagaaccccgaaccgctgccccccatcgccatcgacgaaccgacgatgtcgatgctcttcacgatcaacaactcgccgtttttcggcaaggacggcaaatacgtcacctcgcgccacatcaaggagcgcctagaccgcgaactggagaaaaacctcgcgctgcgcgtgacgcccggcccttcggccgacagtttcaacgtattcggccgcggcgtattgcacctctcggtgctgatcgagaccatgcgccgcgaaggatacgaattgcaggtcggacagccccgcgtgatcgtcaaggagatcgacggcaagaaatgcgaaccggtcgaggaactgaccgtcgactgccccgaaacctgttcgggcacggtgatcgaactggccaccaaacgcaaaggcacgctcaggaacatgacgtcgaacggcgaccgcgtgcggctggagttcgacatcccctcgcgcggcatcatcggcctgaggtcgaacatgctgacggcaacggccggcgaggcgatcatgacacaccgcctgaaggatttcgaaccgtgggtcggcgaaatcgagatgcgcaccaacggctcgatcatctcgggcgaaaccggcacggccttcgcctattcgatcgacaagctgcaggatcgcggacgcttcttcatcagcccgatggatcaggtctacgaggggcaggtgatcggcgagcacacgcgccagaacgacatcacggtcaacgtcaccaaggccaagcagctcaccaacatgcgcgcttcggggtcggatgacaagacctcgatcgccccgccgaaggtctttacgctcgaagaggcattggaatacatccaggcggacgaatacgtcgaggttacgccccacgccatgcgcctgcgcaagatattgctgcacgaggtagaccgcaaacgcgcttcgaagtaaacggccgcccataacgcataaaccgaacccggaaaatggatcatttcaccttatcgctggccgtcggcgccgtcgcagggacgctggacatcatcccgatgattttccagcggctgccgctgcgttcgtgcctgtcggcattcttcatctacttctttgcggcggtcatcgtcttttacagtaacctgccctacctgccttggtgggcggacggcatggccgtcacgctgatgctgatgctccccgtactcttcaccttctcgggcaaggagcgcaaagccatcccggtggtgctgttcaacgccctgctgttcgggttcctgatcagcgccgcggaaaaatacctggcctgaggcatccgttttttcacctatcacatgcagtatcaggagatttctccgtttataggaaagaacgcaaacggaaaagaacagacatgaaaagatatatactgacactcctgctggcggccttcgcatgcacggcatgcgacaaggacgacgaatacgaaatccgcgaatggacggtcgcctcgcaactgggaatcgcccacgggccgcatacgctgcaacccgtgctgctggtcaaggccaacgacgacacgtcgtggcgcgcactttacggaggcatcgaagggttcgaataccagccgggctacgaataccggctccgcataaaggccgaacaactgcccgatccgccccaggacggctcttcgatccgctacaccctgctggagcaaatttcaaaagccccggcgacctcggtcatccccgagcggttcttcccggctttcacgatggaggtcgctccgcagccgatgaattaccggggacagcggtttctgggcgtacggttccctgagtccgggctgaacgaatggcagccatggccgttccgcatcgaagggttcgaatacgaaccgggatacgtctaccggctccgcatcgggacttcggtcgtcccggcgccggacagccctgcgggctattactccgtccgctactcgatgctcgacatggacaggcagcccgcagcggactaaacgcaagggaaaccggacgaaaaatgccgacgattctgaacacacaaacgacccttccgggtcgttttttcatgcgggcaatcgttccactctcgtgagcccccttcagccgcgtttccaccccttgcggcggaggttattccccttcggggtcttcctgcaccagcaccccctttttcagggtggcgaacgaaaggatatgccacgtcacgccaatggcgacggcaagcagggccgcctgcgcccaccaccaggcggtaagcagcgcgaaaatgcagtaaagcatcgtcccccacatgagcgtcagggaaatgatcttggcacggagcggtatggcgcgattttcgcggaagttccgtacatactcgccgaaacaggggtgttcgagcagccagccgtaaagccggggcgaagaacgcacccaaaaggccgccgatagcaacaggaacggcgtggtaggcagcagggggacgaatatgccgacgatgcccagcacgcacgagatgcatcccaatacgacgagaagaattttcatggggcaaaaatagcacaaattcgggagccggaagcacggcgacggttatttttccttatatttgtagaatagaaacggaatacgatacaaaaccaaaatacgatgattaaaataggtattgccagcgaccacgcaggctatgaaatgaaagaatttctggtaggttacctcgacgccatgggttacgaggtgctcgatttcggtacgcattcgcccgacagcgtcgactatgcagacttcgcgcatccgctggccgaggcgatcgaaaacggcgaactcgaacgcggcatcgccctctgcggctcgggcgaagggatgacgatgaccctcaacaagcaccagggcatccgcgccggcctggcctgggagcccgaaatcgcgtcgctcatccgccgccacaacaatgccaacatcatcgtcttcccggcgcgttttatcaccaacgacgaagccgtggcgatgctcgacgcctatttcgcagcccagttcgaaggcggacgccacgaacaccgcatcgaaaagatggcgatcccctgcggcgcagccggggatgcggcaaaataagggacaaaacctgcgggcgcggattattccgcgcccgtcgcatgccaggtcgggcaatgaccgaccccacgtccccgacagatgaagaaaatggttcgtcccgaatgcgggagcacggccagtgcggctttttgcccgtagtgcggactgcgctacggcaaggcacgctccccgggaactgtgtcccgggaagctgcataacaaaacgaatatgcccaaacaccaactctgccgcaactgcggccacgaaatcgaccacaactactgtccggcatgcggacaacgcacgacgaccgaccggctgacctgggcgtcgctggtggacagcgtctcttcgaccttcatcggcgacgaagcgtacggcctgcggggcatcaacatgcgcaagggcgccgtgatgacatggctggcgatcctgatacacccctacgtttcggtctcggagttcatcctggggcaccgccgcaaatatttcaacccggtggcgatcctgctcatgctctcgaccttctacgccgtcgtattcgccctcgtgggcaaggagttcacccctacggcccgggccgactcccccctgttccggtggcttatctgctcctactacgactacgccacgctgcaccccgcggccaacatgctgctgatgctgccgttctatgcactggcgatgaaaaccgtgttccgcaggcgctccgacctcaaatatgtggaatacctctacatcggcatcttcctgtcggtgttcgaaatcacgctgatgatcctcgcgctgcccgccgaactgttcatcccgtggtacagttccttctacatgcagatgctgcccgttttcatctatacaggattcgtattccggaaactgttcgggctgaagaagaaaggcgccgtcctgcgcacgctgctggcgaacggactgcaatatgtctatgcatttttcgcagccctgggcttgttgacgctgtcgctgggcatctattatctggtcgcccccgaaaaattcaaggaggagctcaatatccgtaacagggacgccaggacagaacaggtcgaagggtcgcagcagggagaaggcgcgctgaacgacatcctgaacggattcttggacggactcctccatgaggacgaagcggataaaagctccggaaaggacggggaggacaccgcaggcacaagagatgaaccacaaaaagatgtcccggaaaacagaccagaaacggaaaaaaccgcagcagcaggggacaatccccctgcgggaaacaccgcaggtcgtcagggcggcgggaagaccttgcctggaaagtaagttgcggggagcaccccgaagcggcgatgcggcaaagcggtagcccgggaaagcggcgaattgctaaacgcgcgcaagttcagacgggcatacaacccgggataagggaaaaccgagatgcggcaagggcggaagaacagggatcgcggagcaattgacccacactacaacgtatagacaaagggggtctgcagccgcaggttccctgctttttgcgcatcgtcgaaaagtccgaacacggccgagccgctgcccgacatcgaggcatagaccgctccggccgcaagcaggctgtcacgggcttcgcggatggcaggatgcgccgcgaagatatgcggttcgaaatcgttggtcaccaaaccctgccactccgccacaggccgccgcaagcgctccgcgaggggcacttcgggcacatgcggacgtacccctgcgtaagcctcgcgcgtcgaaacgcccacgtcgggttttacgacaacgagcgtcattcccgccaggcagagcgggtaaggctccatgatctcgcccctcccggtgcaaagctgcggggtattgcgcacgaaaaaagccgtgtcgctacccagctcggcggcaagggcgaccagctccgcctcggcaagccgcaggccgaaaagcccgtcgagcgccagcagtacggcggtgccgtctgacgaaccgcccccgagcccggcaccgaaaggcacccgtttgtcgaggcgtatctccacgccgtccacgccatagcgctcccgcatcagctggaatgccttgacacagatgttctccccgggggcgcaatccaccgccagcccttcggagaggaaccgcacgccgggcacggccgtgcgcgtcaccccgaccacgtcgtacagtccccgcacggggaacatcacggtcgacaactcgtggtagtcgtcctcacggcggcgcaggacatccagccccagatttattttgcagtttgcatgcaggatcatacggcaaagatataaaatttgtacttttgccctatgaaattccgcaccgaaatcgacattgcgcccctcagggtgaaaatcggatacgggaaccgcatcctggccctcggttcctgcttcgccgaacacatcgcgggacggctcgccgaagcccggttccgcatcgtcacaaaccccacgggcatcctgttcaacccgctctccatcgccgccgcgctgcgcagctatgcggacgaggcgcccgtacagcattccgagctggacttcgacggcgaactgtggttccactacgggttccacggctctctctcggccgcgtcgcccgacgaggcgctggctgcgatgaacgccgcccgcaaggcaggcgccgaagccctgcgccgtgccaaccgggtattgctgaccctgggcacggcatgggtctacgaacacaacgggcaggtggtagccaactgccaccggcagcccgcgaccgaattcgtacggcgcaggctgggcgtcgcggagatcaccggggcattttcggccctgctcgcagggccgctcgcagggaaagaggtcatcctcacggtcagccccgtgcggcacctcggcgacgggctggaaggcaacgccgtaagcaaggccacgctccgcctggcggccgaagagctggccgcggcgcacgccgccgtccactacttcccggcctacgaagtgctcaacgacgacctgcgcgactaccgtttctacgccgatgacctggtgcacccctcggcgcaggccatacaatacgtctgggaaaaattcatccccgcagtgctctcggacgaggcacgacgcctgctccccgacgtgcggcacatcgtcgtcgcggcggcgcaccgtccccgcaacccccgcagcaaggcctaccgggagttctgccgccgcaggataggcgagatcgcggcactgccgcaggtcgattttcaggccgaggaggaatatttccgcagatgtatcgaaataaattcgtaaatttgcggccaatcacacacacgcaatgaagcacaggatcattttacttgccatagccgccctggcggcattcgaagccgcggcggcacgcccccgcctggtcgtcaacatcgtcgtaggctcgatgcgcgccgaagacctcggccggtatgccggcaactacggcgaaggcgggctcaggcgactgctggacgggggcacggtcttcgccgacagccgctacgactaccagcagaccacgacgcccgtatcgctcgccacgctcaccacgggcgccatgccttcgacgcacggcgtaatcggcgcccgctggcgcgactacgtcgaaaacgacgccgtggaactgatcgccgggcgcaagggcccggggccctacaacctgatcgccccgacgctcgccgaggcgctcctgcaacacgagcccggagccaaagccgtctcggttgccaccgaggcgatgtcggcggtcatcatggccgggcacggcggcgaggccttctggctcgattcggcgcgctgcggctgggaaacgtcgccctattacgcccccgaagtacccgaatgggtagcccgcagcaaccgcgaacgctacaacctctcatacatcacccccgagtggcgcacgctctacgaaaagggacgctacctcaacacccgcaactgggacatcgttctcacaggcaaaagcaggaaagacaaggacgagccgggggaagggcgcctgaaactcacgtcggactacgacaaaatgctctacaccccggcgggcaacaccgccgtgctgggcttcgccaagcaggccatcgcccagttcaaactcggcgacgacgcgacgcccgacctgctgaacatctgcctcgacacgccgcgccgcatcagcgaggcctacggccccgagtcggtcgaggtcgaggacatgtactaccgcctggatcgcgacctggccgatttcctgaccttcgtcttcgcccaggtcagaaacggcgaggtgctcgtcgtcttcacctccgaccacggcaccagcccttctttcgacacggggcacgaagagagcgaccggttcaacacccgccagttcgaggtgatcgtcaacggcttcctcaacgtccgctacggcatgggcgactgggtgctggagtacgaggacaaatgcgtctacctgaaccacaacctgatctacgagcgggggctcgacctggccgaggtacagaacgaggtggcgatcttcgccatgcagttccggggcgtatcgcacgccctctcggcgacggccatgcgtacgagctacttcgggagcggctatgcccgcaagatgcagaacagcttctacccccgccgttcgggcgacgtcatcctgaacctgatgcccggctggatcgaggaacaggagcgctgctggtcgtcgtcggggtcgatgtacggctacgacacgcaggtgccgctggtattctacggcgtcggcgtcgggccgcagcgcataaagcgccgcgtggacatgacagccgtggctccgaccgtggcacgtatgctggagatcaccgagcctgcggcatcggaaggcgaagtactgccggaaataatagatttgtaaggttttaaagcaaaagatatggacaagatacaggaggagatcatcggggagttctcggtattcgacgactggctcgacaaatacgactacctcatcggcctgagcgactcgctcccggccatcgcagccgagcaccgcacggaacaatacctgatcgacggctgccagtcgcgcgtgtgggtagacgcacgcctggaggacggcaaggtctactatgccgccgacagcgacgccataataacgaagggcatcatcgcgttattgatacgcgtgctgaacgggcgcacgccgcaggagatcctcgacaccgacctctatttcatcgacgccatcggcctgagcgccaacctctcgcccacacgctcgaacggcctgctgtcgatggtcaaacagatgcggctctatgcgctcgcgttcgcaagcaaaagcgaaaaataacagacagccatgacacccgaagacatacttaaggtagagaaggacatagtccttacgctcaagaacatatacgatcccgaaatcccggttaacatctacgacctgggattgatctacgaaatagactacacgcccgacggcgtggcgaacatccgcatgaccctcacggcgcccaactgccccatggccgacatgctcgtggaggatgtcaaccagcaggtcgccaaggtcgacggcgtaaaggcggtgaatgtcatcctcacgttcgaccccgtatgggacaagagcatgatgtcggaggaggcgctgctcgaactcaacatgttctgacatgggcgcggaacaggagcatcggatgctgaaccggctgcaggccggggccggaacgtacgcctgcggcgggtacctcgccgggctgggctccctgcagcgcagcgaaatatgcacggcactgctcttcagtcggctggaacgcaagatgcgcatggtcgacgccctgcgggaagaggcttccgagaactggaaccagaccttctacctgctctatttccgcacgctgggcgaccgccggaaccaggaggcgtacctctcactggcacgccgcgtcccctacaaggtcgtcctgcgcgaacggctggcgccgcgggccgtcgaagccatgttcttcggggcttcggggctgctgacgctctatccgcacgacgcatacacgctcgacctggcgcgcgacttcgaatacctggcggccaaatacgacatcgaaccgctggaggccggagtctgggaactggacgaagttcgccccgccaaccatcccgtactgcgtctggcgcaggcggcggagttcttcatacaggacgaattcgtaatggaacgcgccatgtcatgccgcacggaggaggatatccggcggctgttctgcatcgaagcgtcggcttactggcgcacgcaccacatcccggggatcgcaagcgacgaacaccccaagcgtttgggagcattcaaggccaatatcatcggcatcaacctcgtttccgtcctgcaattcgcctatggcagcgtcaccgggcgcgaaacgctgcgcgacagcgccctcacgctgctcgaacgcctgccagccgaggacaaccgttacatgcgcaactggcgcaacacgggcatttcgatccgcaacgcgttcgaatcgcaggcgctactgcaactcgccacggaatactgccctgcaaaacgctgtacggaatgccccgtcggacggcgcatcctgcaaagcataagttcaaccgaataacaggcaacgatggaaaagcaatcccccctcataagcgtcatcatgccgctctacaacgcagagcggttcgtcggtgaaagcatcggcaacatcctcgggcagaccgtcggggatttcgagctgatcgttatcgacgacgcctcgacggactcctcgtacgacatcgcaagccgttatgccgcgcaagacgcacggatcgtcctgatgcgcaacaacgcgaaccacggcgccgcctatacccgcaaccgggggctggagacagcgcgcgggagtttcattacgttcatggatgccgacgaccgctgttcgccggaacgtttcgctcgccagacagcattcttcggacagcacccgcagatcgacctgtgcggcagttactatacgatgttcgggccggacgatgcccggaaacagaagatccaggatcccaccacgcacgaaggaatccggatacagatgcttttcggctgcccgttcgcaatgtcgggggtcatgatgcgccgcggggccttcctgcgctcgggcgtccggttccgggcgaccatggcggaagactacctgttctgggcggaactttccgggcacatgcgcatggccaacatcccggaacacctctcgttctaccgcaggtgggaaaaccaactttcgaccagccagttagaccgacaaaccctcagcgcgcaagctatccagcgggatctgctgcgcacaaccctcggcatgacgctcactgacgaggaatcgcggatatacacgcagatgaacctccgggtcgggacactgcggcgcgacgaacttacgacctaccgcagcctgctcaaacgactctaccgcgcgaactccgaacgcagggcctacgatccgaaactgctgcgcaaacggttggtttaccgttacaagctcgcctgcaaatgtttctatccctcgtggatcgtaaaaatcaggaaacgcctgctgtggctcgaactccggtgatatgaaaaaagtcagcatcataatcccgttgtacaacctcgaaaaactgatcgggaaatgtattgcctcggcccttgcgcaggatttatctcccgaggagtacgaaattctggtcatcgacgacgggtcgacggacgggtcgctcgcagccgccgaaaaggcggcgcaggggcaccccaacgtacatgtatataccaaacccaacgaggggctgagccgcacgcgcaactacggcaccgaccgcgccgcgggcaggtacgtcatgtatctcgacgcagacgattacctcgaaccgaatgtcctcgggcgcctggtggaaaccatggagtgcggagggctcgacatgttgtgcttcgaaatagcgggaatcgacgaaaacggcaacgacgtcccactctggagcgacgggatttccgcaggaaacggctccgacgtgcagcgcggagtcgatttcctgcaacgcgaccggttcctgccgatggtatacgcctacctctactcgcaggagatgctcgacgccaactcgctgcggatggctccgatttggcacgaggacgaagagttcacaccccgcgcgttgtattacgcacggcggatccaatacctccccgtccgggtttacaactacctgcaacgcagcgattcgttcatgggcaattacaagccgcaaagtcgcttagacctcgtacgcgccatgaaaagcctgacctgtttcgcctcccgcatcggggcggaagacccctcaggcgcccgcctgatgcgcctgcatgtgggcaagaccatgagcctggcatgcaaacagaccgtggtgaggcaactcggcaacgcccgcgaaatgctccgggaagcccgccggcaaggcatcatgccgctccaattccgccgccgggacttccggcatttcctgataaaccgcctgccgggcctgtacgtcctctactacaagctgcacaagcgccaaaaataactgcaaactattgccgggacggcagttccgcagatgaaaaaatattgcggcggggagtgatgtccccgccgcaatattttgtggttttgaaagaaatcattacttttgtaagatttacgtacacaaccccgaaataactgaaatcacatatggaaatagttgcaagtttaatcaaacttttcttcggctcgaaagccgacaaagaccgcaagcagatcgagccttacctcgagaagatcaaggcggtatacccttcgatagaagccctttcgaacgacgaactgcgtgacaggagcgaagcgctgaagaaacagatcgccgatttcatcgcccgggacgaggccgacattgtggaactgaaggccaagcttgaactgcccgaaacctcgctggaggagaaggagcgtatctcgaagcagatcgacgagacgaccaaacgcatcgacgagaagatcgaggagaaactcgacgagatactgcccgaagccttcgccatcatgaaggatacggcacgccgcttcgcgcagaacgacgaggtggtcgtcacggccaacgatttcgaccgggatctggccgccgagaaggatttcgtccgtatcgagggcgataaggccatctacgccaaccactggatggcgggcggcaacgacctgaaatgggacatgatccattacgacgtacagctgttcggcggcgtagtgctccacaagggcaagatcgccgagatggcgacgggtgaaggaaagacactcgtggcgacgctccccgtattcctcaacgcactggccaagaagggcgtgcacctggtcacggtgaacaactacctggccaagcgagactcggagtggatgggcccgatgtaccagttccacgggctttcggtagcctgcatcgacgacacgcagcccaactccgacgcccgccgcaaggcatacatggccgacatcacgttcggtacgaacaacgaatacggcttcgactacctgcgtgacaacatggcctcgtcgccggccgatctggtgcagcgcaagcaccacttcgccatcgtcgacgaggtcgactcggtgctgatcgacgacgcccgtacgccgctcatcatctccggcccggtacccaaaggcgacgaccagctcttcgagcagtactgcccggccatcgaccatctctacaacctgcagaaaaacctcgtgacgggcctgctggccgaggcacgccggcttatctcggagggcaagaacgacgagggcggcgtgaagctctaccgtgcccacaagggcctgcccaagtacaagccgctgatcaaatacctctcggaaacgggcgtcaaggcactgatgcagaagaccgagaacacctacatgcaggacaacaaccgccgtatgccggagatcaccgacgacctgttcttcgtcatcgacgaaaaactcaattcggtggaactgaccgataagggacacgaggcgctgtcgaaatatttcaacgaggacgggttcttcgtgctgcccgacatcggcgccgaggtggccgagctggagaagagcaacctctcggacgaggagcgtgcgcagaagcgcgaccaggtggtcaacgactattcgatcaagtcggagcgcgtgcacacgatccaccagctgctgaaagccttcgccatgttcgagaaagacgtcgaatacgtggtgatggacaacaaggtgaagatcgtcgacgaacagacggggcgtatcctcgacgggcgccgctattcggacggcctgcaccaggccatcgaggccaaggagcacgtgaaggtcgaggctgcgacgcagacctttgcaacgatcacgctgcagaactatttccgcatgtaccacaagctggccggtatgaccggtacggccgaaaccgaggcttcggagttctggagcatctacaaactcgacgtcgtggtgatcccgacgaaccgcccggtgatccgcgacgaccgccaggatttgatttacaagaccaagcgtgagaaatacaacgccgtgatcgaggagatcgtgaagctggtcgaggcgggacgccccgtactggtgggcaccacctcggtcgagatttcggagttgctgagccgtatgctcaagctccgcggcatcaagcataacgtcctcaatgccaagcagcaccagctggaggcgcaggtcgtggccgaggcgggccgctcgggacaggtgaccatcgccaccaacatggccggccgcggtaccgacatcaagctgacgcccgaggtcaaggcagccggaggtcttgcgatcatcggcaccgaacgccacgaaagccgccgcgtcgaccgccagctgcgcggacgtgccggacgtcagggcgaccccggatcgtcgcagttcttcgtatcgctcgaagacgacctgatgcgcctgttcgggtcgggccgcatcgcctcgatgatggaccgcatggggctgaaagagggcgaggtgattcaggccggcatgatgacgcgggccatcgagcgcgcccagaagaaggtcgaggagaacaacttcggaatccgcaaacgcctgctggagtacgacgacgtgatgaactcgcagcgcgaggtgatctacacgcgccgccgccacgcgctctacggcgagcggatcgaaatcgacctgaacaacatcatgtacgactacgcggacaacttcgtggaggtcaatcgcggcatcgaattcgaggatttccggttcgagctgatccgcgaagtggccatcgagccctcgttcgacgaggcgacctacggctcggcgaaacctgccgagctggccgaactgatcgtaaaagacctcaaggatgcctatgcacgccgcgcgaaatccgtggccgacacggtacgccccgtgatggagcgcatctacgaggatcggaaagagcagttggattcgaacatctatttcccgatcaccgacggccacctgggttacaacgtcccggtaaacctgctgaaatgcaagaattcggacggggcggagatcttcagggtattctcgaaggtggtgatgttcacctcgatcgacgacgcatggcgcgagcacctgcgcgagatggacgacctgcgccagagcgtgcagaatgccacctacgagcagaaagacccgctgctgatctacaagttcgaatcgttcgggctgttctcaaagatgatcgtcaaggtcaaccgcgacgtgctggccatcctcaacaaagcctacatcccggtgcgcgaccagaacgccgaggccgtacagcgggagcgtcaggagcgtgccaaagtcgacgtcaacaagttgcaggcctcgcgcatgcaggctgcggctcaggccgggcagcaggacaaacagaaaccgatgcccctgcatgtcgagaagaaggtcggccgcaacgacccgtgcccctgcggaagcggcaagaaatacaagcagtgccacggaaaaggaatttaaccaaatttaaccacctgcaaacaagttcgcccgtacggtgaaaaccctgataaaatacagcataacagccgcggcattctgccttgcctgcggggcgggccgcgcagctgcgcaacagcaaggcaaagccccgaagcaatacgacgtggcggcctatgtctaccccgcctatgcatcggacgacccgcgcctgcggcctttctggccgatggggatcggggaatgggaaaccgtcatgaccatgcagcaacgcaatccggggcactactgggatcgcaaaccgctgtggggctatgtcaacgaagccgacccggcggtgatgtcgatggagatcgagcaggcgacccgtcacggcgtgaacgtctttattttcgactggtactggtacgacggacggcctttcatggagaccacgctcgacaacgggttcctgaaggccggcaacgtggacaaaatgcggttttacctcatgtgggccaaccacgacgtactcaaccactgggatacgcgcctggcgcgcgtacacgagcagaatgtgatctggacgggaaaggtcgaccgcgaggagttcgaaaagatatgccggcgaaacatcgaaaagtatttcaagcacccgcaatactacaagatcgacggcaagccggtcttcatggtttacgacctgccgcaactgatcgcgggactgggcggcgtggagcagacggccgatgccctgaaatggttcaagaaggaggtgaagaaagccggattcccggggctggaactccagtttgccatgtggtcgatcaacctcaattacagcgggttcgatggcggcaaaaccgaaaacccggagaacgattttatcaggacgctgggattcaccggcaccacgcactaccagttcgcgcatttcgccaatgtagaccaggactacctggccatcctggagcaggtgcgcgacgaatgggcgaggatcgacgccacgtacgatttcacctactacccgcatatcagcgtcggctgggacaacagcccccgcacggggcatagcgccgtggtgaagaacaacacgccggaaaattttgccagggggctccgcatggcacgtgagtacatcgacgcacatcccgaccgggcaccgctgattacggtcaacagctggaacgaatggacggagaccagctacctgatgccttgcaacgtattcgggtacgggtatctcgaagccgtcaaaaaggtattcatcgacatacaataagcctcccgcacggagggcgacaacggattatgggttacaacgaggaaaaacaacgccagctggacatgcgttacctgcgcatggcccgcatctgggctgaaaattcgtactgcgtacggcgcaaggtcggggcgctgatcgtcaaggacaagatgatcatttccgacggttacaacggcacgccctcgggcttcgagaatgtctgcgaggacgagaacggcaagaccaaaccctacgtactccatgccgaagcgaacgccatcacgaaggtcgccaaaagcgccaacaactgcgacggctcgacgctctacatcaccgcggcgccctgcatcgaatgttcgaaactcatcatccaggcaggtatcaagcgagtggtttactgcgaggagtaccgctcggaagaggggctcgacctgctgcgcaaggtcggcatcgaatgcatacagcgcgaaatcgacgaacgctgacatccggcctgtgaaacggatacccctgttgctcaccaccctgccctgcatatccggcgggctcatctcctcgcggggtcaggagccttccgcacagcaccctgcaagcattgaggcgctcaactacatggtcggccggagctggtaattcgtacaggcctacgtttcggtgaatgagcaccaaaccacgcatttcctgctgcgacgtgcctcctcgtgcctgtccgacacggaaaaacggctgttgcttgctgaaccccgcacgcataaggaggcgcccgaaaagagaaaaaagggaaaacgacaggaaaagagccgaatcacggttcttttttactttcctcattcccggatgcgcaacggagagttatttgcatttcccgaataaagcctttatctttaaaaggtgaatcatctaaaaccgaccggtatgaaacgtatcgtcatcgtaggcgccacatcaggcatagggctcgaagtggcgaaattgtgcatccgcgaaggatggcgcgtaggcgcagcaggaaggcgtgaagaggcgctcgaggcactccgcgccacagcccccgaacaggttgagaccgaaccgctggacatcacgcgcgacgacgcacccggacagctcgcccgcctgatcgacaagctgggtggcatggacatctacctgcattgctcgggcatcggcaagcggaacaccggcctgctgccggagatcgaactcgacaccctgcgcaccaacggcgaagggttcgtgcgcatggttacggcggctttcggctatttccgggccaacggaggcgggcacctggccgtcatcagttcgatcgcaggcacgaagggactcggcagcgccccggcctactcggctaccaagcgcatgcagaacacctatatcgacgcgctggcgcagctcgcgcacatggaaaaactcggcatccgctttacggacatccgcccgggtttcgtcgccaccccgttgctggcaggcgacgggcactacccgatgctgatgaagaccgaaaaggtcgctgcacgcatcatgcgggtattgaaacgccggcgccgcagggtggtcatcgaccgccgctatgccgttctggtatttttctggaagctgatccccgaatggctgtgggagcggctcaacatccgcaaaaacgagtgaccgcaaacggccccaggccatgcagacagcaacgggtcaaacggcaacaggccgtgttaacggcgaacggttgtgcaaattacaagtcgtgcaaacagcctgccgcccatcgcatcattcccgccaccggccgccgcccgtaaaaaactatcgctccggacgccatcgccgcaccagcctgccacatagcccccgggtcatggcgacaagtacgagacaggttacccgaccaaaccgggaaccttccgacgcacccgcgtgatacgggcgggaagaagcacggttcgacacataatcgaatgacacgaaaaaggttgtctaacaagtctaattttaacgatttcacccctgtcagaataaactctggcaggggtgattttcgattttcgggactggttagacagcccattctttccgaaaccctcagaacggcaagtcgtcgggatcgtccgccggaacggccggcgccgcgggttgctgcgccgcaggctgctggaaaccgcccgcagcaggttgtcctccgtaagccggggcctgctgctgcgaaccgtaccccgaagaggcactgtccgaagccgggttgtcactgcgccgccccaacaggttcatcacgtcggccatgatctcggtcgtataacgtttgttattgtccttgtccatccactcgcgggtgcgcaggcgcccctcgacatagatctgggttcccttgcggacatatttgtcgaccacgtcggcaaggccgcgccacagcgtgatggtgtgccactcggtatgctccttggcctcgttggcctgacggtcgaacaagcgctcggtcgtcgccaggcggatgcgggcgaccttcacgccgctctcggtggtgcggacttcggggtctatacccacgttgcccaccagaatcactttgtttaccatatcttacagctgttttatcatacgtttgaagagtacctccatcttgatgccggccttcttgccctgccgctgcacatcctcgtggtcacccacctcgtccgaaaggccgcagttggtgatgaccgagacgccgaagaccgggatcgacatgtggcgcgccacgatcacctcgggcacggtagacatgccggccgcatcgccgccgatgttcttgaaataacggtactcggcctgcgtttcgaacgtcgggcccgtgccgccgacataaacgccgtactggagtttgatgttctcctcctcggcgatggccgtggccttggcgatcagcgccttgtcgtaacagttgtgcatgtccgggaagcggggccccagctcggcgatgttacggccgatcagcgggttgggcatcaggttgatatggtcggtgatgaccatcaggtcgcccacgcggaacgaggtattgatcccgcccgaagcgttcgacacgaagaggtatttgatgcccagctgctgcatgacgcgcaccgggaaagtcacctgctgcatcgtgtagccctcgtagtagtggaagcgcccctgcatggctacgaccttgcggccctcgaccgtgccgaagatcatacgccccttgtgcccctcgacggtcgaaacggggaaacccgggatatctttgtattcgatggcgaatgcagtgtcgatcttatcggcgaaaccgcccaggcccgtgccgaggatgatgcccacctccggggcgaaagagctcgtggcggcgtcgataaaagccgctgtttttttaatttcctctaacatcttcttccagtttttgcagaaaatccgtcgccgaatcctctatgaatgaaatatttatcggtaaatagtatatcctgcgctgtatctcttgggggatcttcgcgcggttggtcagttttacagcatccttttccgtggtcacgatgaccgccccgggaaacctgtccagcaattcgcgcaggcggttcaggtcgcgcaccttgtagacgtgatggtcgtcgagcgtcatctcggccaccacctcgtagctttcccgcaacgccgcgaggaatggcttgggactcccgatgcccgaaagcgcgatcacccgctgtccctgcacgagcggttcgccgggcgcggcatccgggaagagcggctgcggcatgaaactctcgaaacgggtgaaatagacccgctggtaggcgacctgtatgagcaccttgcgcaggatacgccggtcgatgggcgccatcttctcggggcacttcgtcacgacgaaatagtgggcgcggtgcagttcttcgggcaggtcgcgcagggttccgagcggcaacatcctgtcgtgctgcacggggcgcgtggcgtcgatcatcacgatattcaccttcggctctacatagcggtgctggaacccgtcgtccatgatgatgaggtcgacgtcggggtgctcggcacaaatgcggcggatcccgtcggcgcgcttctcgcacacggccaccaccgtatcggggaatttgagtttgatctgcaacggctcatcgcccacatcccggtaacgggagtcggccttcacttccagataccccttggtacggcggccgtacccgcgcgacagcagggcgacgcgatgcatctgcgacatataggcgattaccatctcggccatcggggttttgcccgtaccgccgacggtgatgttgccgatacagatgaccgggatgtcgaacttctcgcttttgaggataccccagtcgaagagacggtgacggaaagtcacccccgccttatagaggagagccgcaggagcaagcaagcatttcaacatttcgggtcggtttatccatacaatttttcaaaggtagcaataaatctccggaacacaaaacaaaaaaagcaaatcccgggcctgaatgacaaaggaataataaaattggggattcctgcgtttttttcatatctttgcttgcgtctatgagaagttttaaattaccgatatgcgccctgctgctcgtagccgcaggggcgtgcgacagaactacgcaacaggccgcggccgaaaaggaagaagccgcgccgcagaatatcgtttacggcatcaacgccgacaactaccgcaccgaaacgggcgaggtgggcagcggcgaaacgctggggaaaatcctgaacgggtacggcgtttcggcccttacggtcgacaggctcgacaaagcctcgaaagagattttcccgctgcgcaacatccgcgccgggcataaatacaccgtcttcatccacgaagattcgctctatgccccccacctggactacctggtctacgaacgcaacatgtctcaatacgtggtgttcgggttccatgaggattcggtcagcgtccagacgggagaaaaggaattcacggtacgtcgcaccaagaagagcgccacgatcaattcgtcgctgtggggtgcgatcatggaggagcacctgccctatgcgctggccgcggaaatggaggacatttaccagtggacggtcgatttcttcggcatccagaagggcgacaatttcacggtgatctatgacgagcgcttcatcgacgacagcatctcggccggcatcggccgcatttggggcgccaaattctgccagggcggcaaggagtactacgccatccccttccggcagggtggcaaaatccagtattgggaatacgacggcggaagcctgcgcaagcagatgctcaaggcgccgctgaaatacacacgcatcagttcgaagttcacctatgcgcgcaagcatccgatctacaaggtataccggccgcatacgggcgtcgattacgcggcgccgaaaggcacgcccgtacatgccgtagccgacggtgtggtgaccttcaagggctggggcggcggcggtggcaacacgctcaaaatcaaacatgccggcaacctgatgacgggttacctgcacctgagcggctatgccaagggcatctcgaagggctcgcgcgtttcgcaggggcagctgatcggctacgtcggttcgacgggcgcctcgaccggcccccacctcgactaccgcatctggaaaaacggcacgccgatcaatccgctgaaaatcccccaggaaccggccgaaccgatctcgaacgagaaccgcacgacattcgaattcgtgcgcgaccgtatcgtggccgaactgaacggcgaggtgaaggacggggagcgcatcacgcagctcgattcgctcgtcatcccgcagccggcagcaccggaggcggcgaaataacaggggaaaatggccgcaacgacaggcaagggacatctgccggccgacatgccggaaagccgggatcaggaaccgttcgataacaggcccgggggcaggacgaggccggaagccatccgggaaacagacaagacacccgggaaagccggggaacagacaggaacgccccggaaaaagtccggtataccggaaaaaaccggaaatccggaggatacagcggaaagcaccggggcgcaggaagccaaacacaaagccggcgtcgatgcgcgaatcgtacggtttctgaaaaaacaccatgtgctgacgctggcgacgagcggcgagggagcgccctattgcagcaacgcattttactgctacgatgcggaacgcaatttgctgatcttcacgtcggacatggcgacacgccacgcgcagcagatggctcgcaacccgtgtgtcgcagcctcggtagtcctcgaaacgaaggtcgtgggacgcgtccaggggctgcaattgtgcggtaaagccgaaagggccgacgaggcggcgaggcgggcatacctcaaacggtttccctatgccgtactggcagaactgaccctgtgggcgatcgcgcccgactttatgaaattcaccgacaacacgctcggattcggaaaaaaactgatatggaacaacagataggagtcatcatcgtagcaggcgggggcggaacccgcatgggaggttcgcgtcccaagcaattcatgatgctgggcggcctgcccgtcctggcccatacgatcaacaatttcgccggggcgctgcccggggcagagatcgtcgtggtactgcccgcggcgcacgccgatttctggaaggacttcgcagcacgcttcgacatcgcggcacacacggttacgacgggaggcgacgaacggttccattcggtgaaaaacgggctgaaagccctgaagcgcgatccggaattgatcgccgtacaggacggcgtacgaccgctggcctcacacggcatgatccgccgtgcggtggccgctgccgccgaacacggcactgcgatcccggtcgtcgaagccgtggattcgtaccgcgaaacggacggcacggcttcgcgcatcgccgaccgccgccgcctgcgcatcgtacagaccccgcaggtattccgcgccgacctactgcgccgcgcctacgaggcagagtaccgcccagaatttacggacgacgcatcggtcgtggaacaggccggcgaggccgtattcctgtgcgaaggcgagcgtacgaacctgaagatcacgacccccgaagatatggtcatcgccgaagcactgctggccgggcgcgaaaagacggaggaaagcgcggatggagaaaacctataaataccgtttcagccgccgggcgatctactggacgctggtctatctggtggtcttcgtactgctgggctggttgttgtaccacctctacgaaggaggctacctctcggcctggttcacctcgttcatcgtggcgctcatcgccctgatgtcgctgtcgatcccccgcaggatcgtggtcaccgacgaaaaggtcgaggtgcgctgcctgctggacatcaccgaaatccgccgcgacgagatcgcctcggttcgccgggtcgaccctcggcggatgaaatggttctttccggtattcgggggctgcgggttcttcggttattacggacatttcctcgacctcaggaggttcgaacgcgtgaaactctacgcctcggagtggaaaaacttcgtggagatcaccgacatttacgaagaccgcctgtacgtctcgtgttcggatgccggccgcctcgtggaggagcttatgccccccggaggcaaccgcccggcggaagacgacgaagaggaagagcaggcgcaatagtatcgggatccggccaaaaagtcgacagaagacgcccggggattgcgtatttccggaaaatgatcttatatttgcaaccgaggccggaacggcccgtaaaaacgaaaaataacaaataacgcattaaaaaccagaagaaatgaaaaagtaccgttgcaccgtttgtgagtgggtatacgaccccgcagtgggcgatcccgacggaggcatcgcccccggaacgcagttcgaagagattcccgaagactgggtttgccccgtctgcggcgtcggcaaagacatgttcgaagaggttgcggaataaccccggcactgcgaacggaatcaggcgcaccccgtacggggtgcgcctttcgtttggaaccacatgaacccggatgaattccgcccctccgaaagacggcatgcacgcacagttgcgacccgatatttttcgtatatttgtcggcagaactgcccctcacacctaaaatttcatgcagatgaaacatctattgcttttagcctcgatcctgaccttcatgggcgccggcgcccagcaggctacgttccgcaacccggtcattgcgggtgacatggccgacccgacggtcatccgggtcggcaacacctattatgcaacgggcacctcgtcggaatgggccccctactacccgctgttcctctccaaagacctggtcaactggcggcagatcgggcacctgttcgagcagcagcccgcatggacgagatcctcgttctgggccccggaacttttccaccgcaacggcaaaacatacgcttattatacggcacgccggaaaaccgacgggacgtcgtatatcggcgtcgccacggccgacaaacccgaaggcccctataccgaccacggcccaatcgtcgagtacggcaccgaggcgatcgacgcattcgtgctggaagacgccggcgagttgtatatctcgtggaaagcctacgggctggatcaaaggccgatcgaactgctggcctgcaaaatctcggacgacgggctgcgcatggcgggggaacccttcacgctgctgcgcgacgacaaacggcagggcatggaagggcagcactggctgaaaatcggcgattactattacatcgtctactccataaacggctgctgcggccctgggagcgactacgccgtggcggtcgcccgctcgaaaaacctgcggggcccctacgagcgttacgccgggaacccgatcctgcacggcggcggcgatgtccagtccatcgggcacggcaccatcacgacgacgcccgacgggaggatgttctacctctgccacacctatctggccggtgagaatttctttctgggacgccagccgatgttgcagcagatcgtcctgggcgatgacctgtggcttcatttccggggcggggaaacagcatccctgacgcagccgatgccttttgccggcatggcacagcagcccgtattcgatttcgcagatgacttcacggccgaccggctccgacccgaatggacgtggaactatccttacgcgacgcccgagatcgagcttgccgacgggcgcctctgcctgggcgggcggcccaaagagggcgtaaaaaccggcacggcgctctgcctgagggccgtaagtcccgactatacgctcgaaacggcactctccgaccgcaacgcaggatggagcgggctcacggtatacggggatgcagcgaacctcctcgtatggggattgcagggcgacgaggtattgttgaagctctacaaggacggcagggaaacgctgctgggcagctccgggcagatcggggcgcacctgccggtctacctgcgcatcgaggtacgagggaatgcccccgcagcattcgggtacagtaccgacggacacacctggaaacaagtggagaacctgcccgtaggtgccgaagacctgctgcaatgggatcgcgtagcacgcccgggattgtattaccaggggccggaaggccaggcggccgaattcgaatacatgcggatgaccaaccgctgagagaaattgcagcccccttccgcaaggcaagccctctgcggaagcacggcagaatcccggccggaactttccgataaaaagagccgccccgaattgttcggggcggctttctcttccgggactgcgcccgtcaattgatattgggcaggaaagaatagttcttcgaatagccgagcatctgctcgacgtagttcgccggataggaaattttcacatcgaccaccctgccgtccttttcgacaagttcgaactcggggttcacgaagccgccgtaaggttcgatgccgagtgcatagtaacggtcgcgcacctcccggtgcagctggggatcgacctggacggcataccgctcgacaagcgccttgccggcctcgtagtcgccttcggacttgatgcgctgcacctcgcggagcatgtcgccgaacagtcggcgcagtttttcataatcgttgaccacgacatacgttttgccgttttcccgaaccatctcgatcacgttgtcggccttgccgcgctcatagcaccactcgcagatcagcttgcggttgcgcatatgcgactcctcgacgtttttgcccggctcgatacgcgccagctgggtcatcatgccgttcaggatatatttcgcatagccggccttcgccacgtcgaacgagggcaccagccccagttccaccatcttcgggtcacccaggtagtagaggccgaagaggtcggcgcgggtctcctcgagcgtcgagctgtaactcttcagctcgttgcccttcacgcccggcgccagctgtccagaaccgtgccccagacactcgtgcaggtcggtatgcaggtcgtcggccagtttgccgtacttgtccatcacctcgcggtccccggcacgcagcacgaactcctcgttgaagccgttgccgtgggcggccatgtcgtaggcataggtgatgttgtcgatcgtgaccgacttcgaaccgtattccttgcggatccagtcggcattgggaaggttgatgccgatgggcgtggcgggatagcagtcgccgcccagcatcgccaccgtgatgaccttggccgaaacgcccttcaccttctccttgcggtaggcgggagcaacgggcgaatggtcttcgaaccactgcgcgttatccgaaatcacctccgtacggtggcaggcctccttgtccatgaaattcacgatgccctcccacgaagccttgcggccgagcggatcgccgtaatcctcgataaagccgttcacgaagtcgacgttcgacacggtgtccttcacccagccgatgttatagcggtcgaactcgcgcaggtcaccggtcttgtaatagtcgatcagcgctgcgatattgcttttctgcggttcggcggctacggcctgcgctttttcgagccagtagacgatcttctcgatggcgggcgaatacatgccgccgaccttccatacgcgctcctttaggacgccgttctccttcaccagcttggagttcaggccgtaggagatcggttccgggtcgttgtgatcgaccatgtcggcgtagaatttctcgacctcggcctgcgtcacgccctcgtagtagttgttcgacgaggtggcgatcaggtcttcgcctgccgtctggttcaggcgcgttttatagagcgccggatcgaagatagccttgcagacttcgccgcgcagcgggttcaggtcgccgaacttctcctcggggatcgtctctatcacgtcgagcaggtaaccttcggtgaactcggggacgaacttgtcgttcgaatagtggtgatggatgccgttggcgaaccacacctttttcaggtatttctccaaggccttccattcggccgccgagcggtcgccccggtagttctcgtaaaccgtttcgagcgtacggcgcacggcgaggttgtatttgaaattctggtcgaaaaggatgtcccggccgcacttggcagcctcggcgaggtaatagaccagttccttctccgcaagcggaagctgctcgaaaccagggacttcgtaacggatgaccttgatgtcgtcgaaacggtcgacgatccacggggcttcgctcttcgatgccccgcagcacgaagtcagtgcaacagcggtaacagtcatagatgtcagtgtaaataaatttttcatgtcgttcgggtttgaatttccccgaaatatacgttttttttacgaaaaagcagcatacggacgaatatacgcatggatacatatacaatatgtgccggcaaacgcacctccccgccgcacccggcagcgcttgccattcgggcattattctcaaaaaacataccagctcgtaccagtatgacgaaattttatttatatttgtccacaaagcacgcaccatgccggaaaaattcggaaacaacataaacccacattgatgaaacctatcaaaaccgcacttctggccctgccgctcctggccgcagggtgcaaccgggactccgggactgcaaaaatccggccgctggaggccggaagcgtccgggtcgaagacgctttctggagcccccgctatgaaaaatgggaacacatcaccgtcggcgacatgctggacaagttcgaagggaacgacccggcgcatttcgcgtgcggcgtcgacgccttcgaaaatttcgacctcgtagcctcgggcgcccgcaatatcggccgccacgcggggccgccgtggtacgacgggctggtgtacgagacgatccgggggatctccgacctgctggcacaacgtcccgacccggcgctcaaagcccgtgtagacggttacatcgcccgcatcgaggcggcgcagaagagcgatccggacgggttcgtcggcaccaacacccagttgacggaggacaaccatcgctggggcgcgaacggcgggttcctgcgcatgcagcacgacgtctacaacgccggcatgctcatcgaagccggggtacactattacgaagccacgggcgacgacaggctgctgaaagtcgccacgcgcatggcggactacatggtgcggacgatggggcccgccccgaaaaagaatatcgtcccggcgcactcgggccccgaggaggccctggtaaaactctacaagctctaccgcgaccgccccggcctgcgcgcgcaaaccggggcgcagtccgcagccggcgactacctccggctggccgagttctggatcggcaaccgcggcgtgcactgcggctatccgctgtggggcacgtggggcaacgacagcgcggagcggtggatccacgaggagctctacaccgcggaattcggccccgaagcgcggcccgcatggggcgattacgcgcaggattcgatccgcgtattcgaccagcccgccatcgtcgggcacgccgtgagggccaccctgctggcgacgggcatcgccgcggcggcctatgagaacggcaatgcggactacatcgccacggcgaaacgctggtgggacgacatggccgggaaaaaactcttcgtcacgggcggtgtcggggcagtgcatttcgacgaaaagttcggccacgactactacctgcccaccgacgcctatctggaaacctgcgccgccgtaggcgtggggttcttcagccaggcgatgaaccagctcacgggcgacgcgaaatacatggatgaattcgaacgcgcgctatacaacaacgtgctggctggcgtcgccgcctcgggcaggcagtatacctaccagaacccgctcaacaccgaccgcagcgaacgctgggaatggcacccctgcccctgctgcccgccgatgttcctcaagatagtctcggcgacccccgaattcatttacgcccgggacgacaggacggtctatgtcaacctgttcatcggcagcgatgccgacatcgcgctcggcgacacgcaggtgcatgtccggcagcagacccgataccccgtgaacggaaaggtcgtcctcacgcttacgcccgaaaaggcggcacgcttcaccgtgaaggtacgtatcccgggctgggcccgcggcgaggaaaacccgttcgggttgtacgtatccgaaagcccggccgcgccggtgctctcggtgaacggcaccccggtcgaaatccgccccgacaaagggtacgccctcctcgaccgggtatggaaccccgcagaccgtatcgtgctggaacttcccgtcgcgccgcgcctcgtccgggcacataaagccgcccgggagctggacggcatggccgccatcgcggccgggccgctggtatactgcatcgagcaggcggacaacgcggattacgcccggctgaggctcgacacggccggcagcatggaactcggataccgcagcgacctgatggacggcacgccggtcatcacgggaacggccatcgacggcaagggcgcgaagagcaccttcacggccatcccctactacgccttcggcaaccggggaaacggcggctaccgcgtctggctgccgacccgctgacaacccgaacagcgcgggcacaaaaaagcgccggaaaggttcgacgccttccggtgcttttttatttccggccgccatccggccgcccgttcccgggatcagaagttgtaacccagcgaaacgaagaagctgccgttcttggccttgacctcgtcggcatccttcaggatattcagcaggcccaggtcatacccgaggctgacattgtaatgcttcctgaatgtcacgttggcaccgaagcgcaggcccaggtcggagcgtttgaacatcgcttcctcctcggcgccatcccccaggtcggtggacttgaacaggtcggccttctcgcccttgaacttcgccttgccatggataccgaacccatagaagacacccgccaggggctgtatcgaaacgctcctgacattgaaatgccagctgaccacgacgggtacctgcaaatagagcatattgaacttcaccttgccggacaactcctcgtcgaatcccagatcgaaattggaggtattgaccgatccgccgcgtcccgtcaggtaaaggcccgtttccaggtagagcggcagcgtccgcagcaacggctgttggtaggcaaagcccacattgtacgacgcacgcgagtcgaacgagaagctgttactgcccgcgctcaggtcgatgctggtcacattcagtccggcgcgcactcccatcacgcggccctggccgaatgctgacatgctggcagcaacggccagcaaacaaagaataaatttcttcataactttaaaattatgccccggctcccgtgaggcgtttaagtttggattgccggaatagggaaccgccgcgcccgtttccattccggaacgggaagcgggtaccccgccattgtttcatcggttgtaaatataggcgcattatgcgatatccggaaataaaatcaatgaatgccaccctttttcacacgaaagccgcattttacagaaccgcatccgcctccgaggccggaaaaccgggatttcggaacggcatggtgcgcataagaaaaagatacggcttatttttccgacttttttcttcgttatgtctgatggaatttctacctttgcccgcacaactcgcatcaagaaaggatgaaagtatttgaaagtgtcaaggagctccgtgcagagctggacaaggcggagcagtcgggaatcggcttcgtaccgacgatgggcgccctgcatgcaggacaccgctcgctcgtggaacgtgcccggcgggaaaacggcaccgtcgtggtgagcgtcttcgtaaaccccacgcagttcaacgacaaaaacgacctgaagcattacccccgcacgccggaggccgatgcccgcctgctggaagaggccggggcggatttcgtgctgatgcccacggtcaaggagatatatccccagcccgacagcaggcagttcgatttcggactgatcgacaaggtgatggagggcgccacgcgccccggccatttcaacggcgtagcgcaggtcgtcagccgcctgttcgacatcgtgcgccccgcacgcgcctatttcggggaaaaggatttccagcagatcgccgtcatcaagtcgatggtggcccagctggcgctccccatcgagatcgtcgaatgcgcgatcatccgcggcgaagacgggctggccctctcgtcgcgcaacacgctgctcgacgcagcgcaccgggccgcagcgccgcacatctacgccacgctgcacgccgcagtgtccaaatcgcaggagatgacacctgcccagctcaaggcgtgggtcacggccgaggtggagcgcaacccgttgctgaaggtcatctattaccagtcggtcgacgcacggacgatgcaggaggtcgccgcctgggacgactccccccgcatccagggctgcatcgcagtacaggcgggagatattcgtttaatcgacaacatccgtatccgataatgaaattccagattgaagtcatcaaatccaaaatccaccgcgtgacggtcacacaggccgacctgaattacgtggggagcatcaccatcgacgaggcgctgttggaagccgccaacatcatcgagggcgagaaagtccagatcatggacatcaacaacggagagcgtttcgaaacctatgtcatcaagggcgaacgcgcaagcggctgtatctgcctcaacggcgccgccgcacgcaaagtacaggtgggcgacgtcatcatcatcgcatcctatgcgctgatggatttcgaggatgccaagcagttcaaaccctgggtcatcttccccgacacggcgaccaaccatctgatcggataatgcatccggagccgccggacgtaaaaaatctcccctaaagggagatttttttgctataaatgtttatatttgtcgaagttaacgctctttttttcatcccggataatatggacatagcgctttccgtactcgcattcctgttctcgatcgtcggcatcatcggctgtatcgtcccggccctgccgggcgtggtgctcagttacgcagggcttctgtgcgcctacttcacctcctattcgcacatgtcggcttcagccatatggatatggctggccatcaccgtggccgtcagcgtggccgattatttcctgcccgcatggatgacccgcaggttcggcggttcgcgggcgggcgccatcggggccacggtcggcgtattcgccgggtttttcatcttcccgcccataggcatcatcctggggccgttcgtcggcgccgtggcgggggaattgctcaacgaccgcggggacttcccgaaggcaatccttgtaggcttcggttccttcctctcgttcgtcgtcggcacggggctcaaggtcgtggctgccgtcgggatgctcatacacgtcacggccgacacataccccgccatacgggactggttcgcaactctattttaaccctttcgataatgaaaaaactcctactctttgcggtagtcatcgcagcgatgctggccgcggcttgttctaattctaagtacaagtacgaaacagtgaagggcgatccgttgaacaccaaaatctacaccctggacaacgggctgaaagtctatatgagcgtcaacaaggagacgccgcgcatccagacctacatcgccgtgaacgtgggcggcaagaacgacccggccgagaccaccggactggcgcactatttcgaacacctgatgttcaaggggacgcagcagttcggcacatcggacttcgcagccgagaaaccgatgctcgatgagatcgaaaacctcttcgaagtttaccgcaagaccaccgacgaggccgagcgtgcggcgatctaccaccgcatcgactcgatcagctacgaggcttcgaaaatcgccatccccaacgagtacgacaaactgatgtcggccatcggcgccaacggcaccaatgcttttacgtcgcaggacatgaccgtatacgtcgaggacatcccttcgaacgagatcgacaactgggccaggatccaggccgaccggtttaagaaccccgtgatccgcggcttccacaccgagctggagactatttacgaggagaagaacatgtccctgacgcaggacagccgcaaagtctgggaggccatggacgccgccctgttcccccaccatccctacggcacgcagaccgtactgggtacacaggaacacctgaagaacccctcgatcaccaatgtcaagaattaccacaagacttactacgtgcccaacaacatggccgtctgcgtatcgggtgatttcgatcccgacgaaatggtcgctacgatcgaaaaatatttcggcgacatgcagccgaaccccaacctgccgaagctgcacttcgagcccgaacagccgatcacggctcccgtcgtgaaggaagtatacgggctggaagccgccaatgtgatgctgggatggcgcctgccgggtgcgaccgacccgtcgaccgacgtggcgaacatcgtgggctcggtactttataacggccaggccggactgatcgacctcgacctcaaccagcagcagaaggtgctttcggcatacggctacgcatcgtcgcagcctgattacgggacattcctggtagcaggccgcccgaaggccgggcagtcgctcgacgaagtacgcgacatgctgctgtccgaagtggccaagctgcgcaacggggatttcgacgaaagcctgatcgaggcgaccatcaacaattacaagatgcagatgatgcgttcgttcgaagagaacgaaagccgcgcgatgctctacgtctactcgttcatcaacggcgccgactgggccgacgaagtgcagcagctcgaccgcatgtcgaagatcaccaagcaggacgtcgtggactgggccaacaaatacctcggccccgaaagttatgccatcgtctacaagcgtgaaggcaaagaccccaacgagcagaagatcgcagccccgaagatcacgccgatcgtgaccaaccgcgactcgcagagcgagttcctcaccgagatacagaactcgaaggtcgagcctatcgagccggtattcgtggactacaagaaggacatgtcgcagttcgaggcgcagaagggcgttaacgtgctgtataagaaaaacgaaaccaacgacatcttcacgctgatctacgtattcaacacgggtacggagaacgacccggcactcaacctcgccttcgactacctgagctacctcggaacggacaagatgagcgccgagcagatcgcagcggagatgtacgccatcgcctgctcgttcggcctgagcgccggaaccaaccagagctggatcgagatatcgggcctgagcgagaacatgggtaaggcgatggaaatcgtcgaagggctgatcgccggggcgcagcccaacgaggagatcctgcaaaacctcaagggcgacatgataaagagccgcgccgacgccaagctcaaccagagccgttgcttcggggcgctccagcgctacatgatctacggcagcgatttcatccgccgcaccacgctcaccgacccggcattgcaggggttgacctcggaacagctgctcgcaaagatcggcgacctgatgggcaagcagcacgaggtgctctactacggcccgcaggacgaggccgaagtgaaagccgccctggccgcgcaccacaaggtggcagccgacctccagccgctggaaaaaaagttcagcacgctgcaacccaccgatgaaaacaaggtcatgcttgcccagtacgacgccaagcagctctactacatgcagtattcgaaccgcggcgagaaattcgacctcgcagccgacccgcagatcaccctctacaacgagtatttcggcggaggcatgaacaccatcgtcttccaggagatgcgcgaagcccgcggcctggcttactcggcatgggccaacctcgccatcccgaccaacgccaagggcgactattactacatggccttcatcgccacgcagaacgacaagatgcagaaggccatcgaggcattcgacgagatcatcaacaacatgcccgaatcggaaaaggcgttcagcatcgccaaggaggcccttatctcgcgcctgcgcaccgagcgcacggtgaaggacggcgtactgtggagctacatccgcatgcgcgacctcggcctgacggagccgcgcggaaagcaaatcttcgagaaggcgcagcagatgacgctcgccgatgtcaaggccgcacaggaaaagtgggtgaaaggacgcaaatacgtctacggcattctgggcgacatccaggatctcgacctgaactacctcaagaccctcggcccgatccagaccgtgacacaggaggagattttcgggtactaaaccgcccctgctccaggataacgaaagccgccggttccccggcggctttttcgtgcccgctcccggccaaagtacaaaacgggcagtccggcaagccggcgggatccgaaacagcgggaacggaaacaccggaaacgcaagccactgggaaaggaaaacacccctgccgaaggtttttccgacaggggtggaatcataaaacaggtcttgacttcccgcccggccagaaaccggacgggcgcaggaaacttcccttttcgccggggaagagccccgaagcccacgcagcctcctgccgctaatagcggtagtgctcggctttgtaagggccatcgggatttacgccgatatagtcggcctgtttcccggtgaggtgcgtgagttccacgccgaggttgtccagatgcaggcgtgccacctcctcgtcgaggtgcttgggcaggcggtacacgcccacttcgaggttctcctgccacagctccatctgcgcaaggcactggttggtaaaggagttcgacatcacgaacgaggggtgtcccgtcgcacaaccgaggttcaccagacggccttcggccagcacgaagatcgagtgtccgtcggggaaggtgaacttgtcgacctgcggcttgatattggtcttgacggcccccgatttttcgagacgcgccatctggatttcattgtcgaagtggccgatgttgcaaacgatcgcctggtcgcgcatcttctccatgtgctccagcgtgatgatgtcgcagttgcccgtgcaggtgacgtaaatattgccttcggggagtgcgctctcgacggtcttgacctcgaagccttccatggcggcctgcagggcgcagatcgggtcgatctcggtcacgatgacacgtgcgccgtacgaacgcatcgaacgggcacagcccttgcccacgtcgccgtagccgcagaccacgaccaccttgccggcgatcatcacgtccgtggcgcgcttgatgccgtcggccagcgactcgcggcagccgtagaggttgtcgaacttcgacttggtgcaagagtcgttgacattgatggccgggacgagcagctcgccggcctcctgcatctggtagaggcggtgtacgcccgtagtggtttcctcgctcacacccttccactcggccaccgtgcggtgccatttgtccttgtcttcggcaaggatcgtcctgagcgtaccgaggatcacctcctcctcgtaggacgaaggctcgtagtcgagcgtcgaggcgtcgttctcggccttgtaccctttgtggatcagtagcgtggcgtcgccgccgtcgtccacgatcagctgcgggcccttgccgccggggaacgagagcgccatggcggtgcaccaccagtattcgggcagggtttcgcctttccaggcgaaaacgggaaccccggcctcggcgatggccgcggcggcatgatcctgcgtcgagaagatgttgcacgagcaccagcgcacgtcggcgcccaactcgacgagcgtctcgatgagcacggcggtctggatggtcatgtgcagcgaccccatcacgcgcacgcctttcagcggcttctgcgggccgtatttgcggcgcacggccatcagtcccggcatctcgtgctcggcaatctcgatctctttacgcccccactcggccagcgacatgtcggccaccttgtagggcattgtcaaatccaaatacatagtattatcttttaattccaatatatattccttgtctctggcgatctgcgcccgcagctcctcgatcgtcgcgaaacgacgttcgtcacggatcttacgcaccagttccacgcgcagcgtacggccgtagagcgaacctccgaacccgaagatatgggtttccagatggcggacggcaccgccgaccgaagggttgcttcccaggttggacatcgcgtcgtaaagcgtcccgtccacctccacgcgggagtaatagaccccgtccgcggccgtcacggaatcaggcacggccatgtttgccgtcgggaatcccaactcgcgcccgagccggcgtccgtgttccactacgccctctatcgtcaccccggccatcagattttctcggtcagtttacgcaccagccggaactgcgagaagaactccttggcaaagacacgcagtacggtataggaggggattgccagcagcatgccgaggattccggccatcgacccggcgatgaggatcacgaggaagatttcgagcggatgggccttgacacgctcggaatagagcgtcggctgcaccacaaaatcgtcgatccccttgaggatcaggagcgaacccgcgattataaaagcagtatgtcccacggtcatccccccgatcggggttacgatacccacgaagacggaaacgataccgccgatcagcggcccggcatagggcaccacgttcatcacgcccatcacaaggccgatgaatgcagcgtcagccgccttcatgccgaaggccatcatcgtgagcgacacggcgaccatcagcatcaggctttccgagagaatacccgtgaagtagcgggccagcagcagcgtgacggaatcgagtgcgcgggtgatattctcgtggtaacgctcggggaacatggccgtcaccatggcatagaacaacccttcgtcccggaggaaaaagaaggtgatgaacgtaatggagaaaatggcgatgaccgacgagagcaccacgttgacgatcgaggagaacaccgaattgagcgattcgatgtcgataatctgcttgagcgccgatgcgagcgcctccgagagggagaacgtgctttcgggcacagcgaagaactcatgcaggtatccctgtgcttgggctatcggctcctcgatgctttgcacgacggcggcgaaatcgaggttcgacagctggtaaatcttattgaacacaagcggcacgaacagcgagcacagcgtggccagcaccacccagatgacgatcagcgtcaccagcgcagccagccagcggggtaccttccagcccttgatatgcagcgccgcgaggcgtttcacgagcggattgcccatgacggccagcacggcggatatgagtatgtatacgacgatcgaactgaaataccagaccagaaagaggacggccgcagctacggctgcgcccgcgatgaacttcaggaaggtctggggagtcgttttcatccttcgaaagaggggttaaatcttatgcaggcgtgcgatgggggtctgcgaacccacgaccggatcgccgatctcgaccagcagttcgctgtccttggggatcaggacgtcgacgcgcgagccgaatttgataaagccgcagacgctgttctgctccacgggctcaccgactttcatgtaggagatgatgcggcgtgcaatcaggcccgcaatctggcggaaaagcaccttccggccggaggccatcctcacgacggtcgtcgtgcgttcgttctcggtcgacgacttgggatgccatgccaccagaaaacgccccggatggtatttgaaatactcgaccgtgcccccgaccggcacccagttcatatggacattggtcacggacatgaagatcgagatctgcaacatctcctcgttcaggtattcggtttccttcacaacctccgtcacgaccacgcggccgtcgcagggagagaaaaccaggtcggcatcgtgtatccgcacacggcggggttcccggaaaaacgcgacgataaagaaccagaacaacagcaaaagcacggcgctcacccacaacagcgaaatattcgaatcgctgaccagcaggtgatagatcagccaaaatataaatacacagacggcacccgagatacagataatcttgtagccttccttatttatcctcataactcttttttaggtttgcagttacatcacaaaaagcatatagacgaatacgaacggcgccgagagcagcatggcgtcgaaacgatcgagcaccccgccgtggccggggatcagccgccccgaatccttaacgccggcagcccgcttgaacatcgactccaccaggtcgcccagcacgcccgaaacggcggcgaccagtgccagaccggcccaaacccacatattcccgtccagcatccgtgcagccacgatgcccatgacgacggcaccggcgatcccgccgaagaacccctcccaggatttcttgggcgaaaggcgttcgcaaaggcggtggcgtccgacggacatccccaccaggtaggcgaagacgtcgttggcccagatgatgaagatataggcgaccatgatccacgggttccaggtatcgctgccgacgatcgggatatagcacatcagcgacaggggcaacgccacgtagcagattcccatgatcgtcgtgccgatcccggaggccgggttttcacccctgcggtagagttcgcagatgaacatggcgggcaggagcagcaacaggaacgccagcccgcagccgaaggcctgccgggcgtcgccgagaatctcgatgtcgtccgagacgaacgcgaaattgagcacgaaaagcacaacacccgcaacaagccctacgactttctgcggcgcattgccttgtttcccggccagcgcatagaactcgtacatgcctcccacgagcagcaccgcgagcagcgcgccgaagctccactgcgaccagacgatcgcccccagtaccaccgctgccaggacaaggccgctcagcgtgcgtaccacgaggttcttcatagtttcattcatcagttaatgcgggttaggttcgtcttattcggtcttggaaatcgcggcggccgtattaccgtcggcaggggcttcgggcgtctccgtctgcgcaaccgcgggagcggcctcttccggggcgggcttcgccgccggggctgcaggagcctcgggctcccccttcacggcagccccgtcagccttgactttggcctcggcctccttctgctcacgcaggatgtccttcttgcggcggccgaagatacgctccacgtcctcggtgaagaccacttcgcgctccaacaacagttcggccagctctttcaggccgtcggcatgctcacggagcactttctcggccatctcgtaagccttcccgatgacgagtttggcctcggcgtcgatctgctgcgcggtcagttccgaatagggcttcgtgaacgccatgtcgctctgccccgtggaatcgtaatagctcagcgtcccgacgttttcgctcatgccataataggctaccatggcataggcctgcttggtgacacgttccaggtcattgagcgccccggtcgatatttcgccgaaggtcagctgctccgaaacacgtccgccgagcgtggcggccagctcgtccatcatctgctcgcgcgtggtgatctgccgctcttcgggcaggtaccaggctgcgccgagcgccttgccgcgcgggatgatcgtcaccttgatcagcgggctggcattctcgagtatccagctcaccgtggcgtggcccgcctcgtggtaggcgatcacacgcttttcctcatcggtgatgatcttattcttgcgttcgaggccacctacgatgcggtcgatggctgccaggaagtcctccttcgaaatgaatttcttgttgtggcgcgcagcgatcagcgcggcttcgttgcagacatttgcaatgtcggcacccgagaatccgggggtctggcgggccaggaacgaccggtcgagctgaggatcgagcttcagcggacgcaggtggacgttgaaaatctcctcacgttccttgacgtcgggcaatcccacctcgatctggcggtcgaaacggccggcgcgcatcagcgccttgtcgaggatgtcggcacggttcgtggccgcaaggacgatcacgcccgtattggtctggaagccgtccatctccgtgaggagctggttaagcgtattctcacgctcgtcgttgcccgagaacccggcattcttgccgcgggcgcggccgatggcgtcaatctcgtcgatgaaaacgatgcacggcgccttctgcttggcctgttcgaacaggtcgcggacacgcgaagcacccacgccgacgaacatctccacgaagtcggaacccgaaatcgagaggaacggcacgttggcctcgcctgcgacggccttcgccagcagggtcttacccgtccccggagggcctacgagcagcgctcccttgggaattttggcacccagttccttatatttgtcggacttcttgaggaaatccacgatctccatgatctcgaccttggcctcctccagcccagccacatccttgaacgtgacgcgtttggagttatccttgtcgaacacctgcgccttggccttgcccacgttcatgatgccgccgcccgcaccgcctccggcaccgcgcgacatcgaacgcatgacgaaaatccacacgccgataatcagcacccacggcagcaggttgatcagcacgttcgtccagtcgttggccttgttttcatagaccacgggaacgacttgcccggactgctgctcggcggctttcaggtcttcacggaacgagtcgaccgacccgatcgtgaagaggagctgcacacccgtctcgggaagccggcgaaagcgtttgtctaccgtatccctgcggtactgctcgaccgcttcttttttcaggaatacctgcgcctggtcgcggttgacgacctggatcttctccacctcgcccttttcgaccatccgttcgacggtagcccagtcgctgggcacgggcgtgtcgttgacatccccgaagacgtagtagccgataatgaacgcgccgatcagaccgtagagccacagcatcgacggtcgcgacatgttcatattcatcttattattgttcttgcgttgatttgccatatttaaaattactcttcgtattcatatttggtcatcggcgcatcagcccacaactcttcgagccggtaaaacccgcgcagttcggtctggaaaatgtgcaccaccacgtccacatagtccatggcgatccacacggcattctgctgcccctcgatacgccagaccttttcgcccagcacttcgagcaccttctcttcgatgcccgcggcgatggcccctacctgcgtcgtggaatcggcgttgcacacaatgaaacgggaacatatcgccccgtcgaaccccgaaaggtcgagcgatacaatattcttaccctttttatcttcaatcgcaccaacgatagtttcgatcagtttatccataaatagtcaataggtgtctataaccttgcaaaggtacgaaaagagaatgatatttgaaaattaagccccgtaaaaaagcagccggacgggcgacaatcgcagaagtccgcacttttatccgccacagcgccgttacagcggattaattcttaattatatgcccgagcccctcccctgtaaacggcagggtgcccggcgatgcgatcgccgggcaccctgccgtttacaggcatccgcctacccctttacttcgggtatattggccatgatcgtgtcggtcagagccttgatgatcgaactcttgacgtacgtgcggcgtaccgccacggcgatcttacgcgacgtggcgcctttggcgagcatcttcagccggtcgtggtgatccgcggggatgtactcgatggccatttcggggatgatcgtcaggcacgacgtgcagtcgacgatgcgcatcagcgtatcgagcgaccccgactcgaaggagtagtgcgacggcatgtcgcgcttggcctggcacagctcaatgatctggtcacgcatacaatttccggcgctcaggatcaccaggtctttcagatcgatgtcctcgatgcggatgttctgccgttcgtacaacgggttttcgggcgaaacataggcgaaaaaacggtcgttgaaaagttcctgttcgaggataccgtcgccacacgtgccgctggcgaccagtgccgcgtcgatccggtcgcgcttgagcgcctcgacgatgtccgaagtgaccatctccgagatttccagttccaccttcgggtaatcgcgcacgaaatccgggatgaacttgtgcagcaggtagggcgcgatggtcgggatgacgcccagacgcagtttacccgaagtttcgcccttcagttcggcgaccgactcgcggatattgttgtaggcccgcagcgtttcccgggcgcgatccagcaccacttcgccggcctcggtcgggatcacgggtttcttcgaacggtcgagcagcacgacgcccagctcctcttcgagcgccttcacctgcatgctcagcgacggctgggtcacgaaacaatgctctgcggccagcgaaaaactaccgcagttcgccaccgccaggaggtattcaagttgaattatagtcatagcagccgattatttcaatacacaaaaatataaaataaatctataacagacaactttattaggtcacccgcgcggtttttcgtaagtttgcccacaaaatatatataaagttttatgggaaagatcattcttaccggcgaccgtcctacgggccggctccacttgggacactacgtcggttccctgcgccgccgcgtcgaactgcaggaatcgggcgaattcgaacacatattcatcatgatagccgacgcgcaggccctgacggacaacgccgacaaccccgagaaggtgcgccagaacatcattgaagtggcactcgactacctttcggtcggcctcgacccgcaaaggtctacccttttcatccagtcgcaaatcccggagctctgcgagctctcgttctactatatgaacctggtcaccgtacagcgcctgcaacgcaacccgaccgtgaaggccgaaatccagttgcggggcttcgccgagaatgccgccgaaggcgacacgcagcagaagcagggcatccccgtgggcttcttcacctaccccatcagccaggcggccgacatcacggcattcaaggccacgaccgtccctgcgggcgaagaccaggagccgatgatcgaacagacccgcgagatcgtccacaagttcaacacggtatacggcccggcactcgtcgagcccgagatcctgctgccggagaatgcggtctgcatgcgtctgccgggcaccgacggcaaggccaagatgtcgaaatcgctctgcaactgcatctacctctcggacagcgccgacgaggtgaagaagaaagtcatgggaatgtataccgatcccgaccacctgcgcgtcgaagacccgggcaaggtggagggcaacacggtgttcacctacctcgatgccttcagccgccccgagcatttcccgaaatatctgcccgactacccgtcgctggacgagctgaaggcgcattaccgccgcggcggcctgggcgacgtgaaggtcaagaaattcctgatcgccgtgctcaacgagacgctggagccgttccgcgaacgccgcaaatactacgaaggccgcatcgaagaggtctacgagattctccgcaccggttcggaggcagcccggcaaatggcctcgcagacactcgacgacgtgaagcgcgccatgaaaatcaactatttcgacgacaaacggctcatcgccgaacaagccgagcatttcgctcgcaaacaataggatgcagttacgcaccgagcatatctaccgcgagttcctccgcctgacccggcggttgagcaacagccagatcatgatgctgctggctgtcgtggtcggtatactcgccggactgggcacctacctgttcgaaatactgctgcacggcatcaagagcggactgatacgctggttcccggtggacagtgcgcatgtcctgttcctgatctaccccgccatcggcatcatactcgccacgctgttcgtaaaatacatcgtgcgcgacaatatttcggagggcgtaacacgcgtgctctatgccatgtcgagccgcaattcacgcatcccggggcacaattgctggacgtcgatcgtaggcggcgccacgaccatcgggttcggcggttcggtgggccccgaggcaccgatcgtactgacgggcgcggctatcggctcgaacgtcgggcggctggcgcgcctcaattacaaacacaccacgctgctgctctgctgcggtgccggtgcggcgctggcggccatcttcaaggctccgatcacgggcgtggtcttcgtgctggagatcctgatgctcgacatcacggccgggtcggtgatcccgctgctgatcgcctcgatcacggccacgacgatggccttcatgctgcgcggcttcgaccccatactggccgtgacgctccagccgcaggacgccttcgagctgtggcagataccgcttttcatcctgctgggcgtatgctgcgggctgatgtcctggtatttcacctcgaccaacctgcgcgtgggcaacttcttccgtaagatcgacagccaatataagaaatggctcgtcggcggcgccgtgctgggcatcctgatcttcatcttcccgccgctctacggcgaaggctacgaagggttcatgtcgctgatgcacggccgcgcacaggagttgttcgacaattcgctcttctaccggttccgggagatcgattgggtggtcatcctcttcgtcatcgccacgatgttcttcaaggtcattgccatggcctcgaccaacgccgcgggcggcgtgggcggaaccttcgcgccgtcgctgttcgtgggggcgttcacgggggcttcgatcgccctgctgtgcaatgcatttttcgactgggacgtctcggtcgtctcgttcacgctggtgggcatggccggcgtgatgtcgggcgtgatgaaggcgccgctgacctcgatcttcctcatcgcggagctttcgaacggctacgggctgttcatcccgctgatgatcacggcctgcatctcgttcgccgtggactactacctcgaccccgactcgatctacaccaagcaactgcgccagcggggcgaactgctcacgcacgacaaagaccagtcggtattcgtcttcctgaagctcgacgatctgatggagaccgatttcctgcgcatcaaggagaatttcacgctgggcgacatcgtgcacatcatctcgacggcacgccgcaacatcttccccgtgatcgacaacttcggacacctgctgggcgtcgtccagctggacgacctgcgcgaggacatgttcaaacacgaaaaatacgggcacccgatctccgactacatgatccagcccccggacaaaatcctggaacacgagtcgatacagggtgtcatggagaaattcgaggacaagcatacctggatgctgcccgtggtcgacaaacaaaaccgctacctgggcttcatttccaaatcgcgcatcttgaacgcctaccgcgaacaattggtgaagatacaacagtaaaccggggtttagcgccgtatcttcgctacaatgcccataatcactccgaacctcccgttgaaaagggaggctttccccgacgataaacctacggcaatatgacgacagaaaatccctacccctgggccgacggcatggactgcgcggttacggtatgcgacaccgggggcacgatcctctacatgaacgacaaggcgcgcacgaccttcgcacggcacggcgacatggtcggcaaaaacctcttcgactgccacggcgagcggtcgcgcgaaatcatccgccgtctgctcgccgacgggggcacgaatgtctatacgatcgagaaaaacggcgtccgcaaaatgatctaccagacagcctggcgcgtggacggcgtcgtgggcggactggcagaaatctcgatggagattcccgccgagatgccgcattacatccgcaactgatcccggaaaggagaagcaccaggggtgcaggggttccccgagccgtgttacgactccgggattccaaatcttggatttcgacttccggattacgcctccgtatccggaattccgcatgcagcctccatcccatacccgattcccggggttcagggtgtgcgtgcccgggaattcgggatacatccggagccgccctgcgcaattccgccccggtaaatcataccgccgaacaaaatttttagagggtctaaaagaccctctaatttttatgccgcaaaaattttgtcgtgtttatttgctaaaatgtaaaatatactttacatttgtcctgtctaaaacctttaaacaaccacgttatgacaaaggaattactacttccccacagttttaagaaaatcggctgggtcatcctgatcccgacgttgctgttgggcgtactgatgctcatcgacggcttcaacggctacccgacctacctgatgccggcccaaggaacggcctgctacgaaacgctctgctcggcaacgacaggccgtgcgctgaacaacatcgctctggtgggcatctgcatcggcgggatattcgtagcctgctcccgcgaacggatcgaggatgaaatgatctcccgcatacggctgaacgccctgctgacggcactttacgtcaactatgccctgcttatcgccacggcgctatgcacctacgacctcagtttcctctacgtcatgatctacaacctgctcaccatgctgctgatattcctcgcggtattccgctggaaactgtggcgcctgaaacacgcggtcgcagatgaagaataggatccgggtcgaacgcgccgaagtgcgcatgacccagcagcagttggccgatgccatcggcgtaagccgccagaccgtaaacgccatcgaggccgggcgcttcgtcccctcgacggtactggcactgaagatcgcccggatcttcggcaaacccgtcgaacaggttttccagctcgaagagggggactgaccgcggagacataccggcagacaagacatgaggggacggtaccgcatggtaccgtcccctttgttttcacggcaggcgctccgttccgaacagaccgtccccgtctatgcggcgtgacgcagttgcgaaagccctataacttgatgtcgtaaatctggatcacgccctgcaacttccctgcatcgtcggtgacgagcagcgacgtgaccttgttacgggtcatcatcttctcggcctcgatcagtttcttatccgcggagatggttttcgggttgggcgtggcgatatcggcggccttgatattgaaaaactcggcgcggcggcgctccatcgcacggcgcacgtcgccatcggtcacgatgccctcgatcctctcgccgtcgcagatgatgatgagccccagcccgcccttgctaatggcgtggatcatatccgtcgccgagcagtcgggcgccacgactgggaggtcgtgcgaacgcatcacgttgcccacggtcatcagcaggcgccgcccgaggctgccgcccggatgcaggcgtgcgaaatcgacgctcgtaaagccccgcatctgcatgagcgacacggccagcgcatcgcccatggcgatctgcgccgtggtcgaggtcgtcggcgcgaggtgcaggatgcaggcttcctgctcgacgctcacgtcgagatggatatcggaattcttcgccagcgccgattcgggattgcccgtcatcgacaccagtttgttgccgttggagtggatgaaaggcacgatcttcaggatttcgtcggtctcgcccgaataggagagcgccagcacgacgtcgtccttcgagatcatccccaggtcaccgtggaaggcctcgccggggtgcaggaagaaactcggggttccggtcgaggccagcgtcgcggcgatcttgcgcccgacgagccccgacttgcccatgccggtgacgatgcatttgccgctgcatgcgaggatcagctccacggcatcggcgaaattgtcacccaaggtctccttcatgtgcttgagcgccagcatctcagtattgatggccttgcgggccaggtcgaggatctgcgctttggtggtatcggtcattatagcaaggttttaatgagattctccagatcgtcgagttgcaacatgttggggccgtcgctcctggcgcagtcggggcaggggtgcacttcgaagaagaagccgttggcaccgaacgcccgggccgcccgggccatggccggcacgaactcgcggttgcctcccgtcgtaccgcccgcaccgccgggacgctgcaccgaatgggtacaatccatcaccacggtctgcgcgatgcgcagcatgtcggggatattgcggaaatcgaccaccagattgttgtaaccgtagatattgccgcgttcggtgagccatatttccgaagcccccgcatcgcgcgccttctcataggggtactgcatgtccaaccctgaaaggaactgcgcctttttgatattcacggtcttgcccgtcctggccgcggcggtgagcaggtcggtctgccggcagaggaaggccgggatctggatcacgtcgacgacctcgcccacgggcgcggcctgccacgcctcgtggatgtcggtcagcagacgcagcccccatttcgcccgcacatcggcgagcatacgcaacccccgttcgagtccggggccgcggaacgaggagatcgaggtgcggttggccttgtcgaacgaggccttgaagataatatccgtcccgagggccttgttgatcgccacgaggcgttcggccacggtgtcgagtaactcggcggattcgatgacgcaggggccggcgatgaatttcatagctgtcattttataaattccggatggtgtgaaaaaaactcctcggcacgtgtgaggtcttggggcgtgtcgatgccgatggtctcgacgtcggtgatgcccacgccgatcctgtagccgttttcaagccagcggagctgctcgagcgactcggccttttcgagcgtggactgcggcaacgccgtgacggcacgcagcacctccgtgcggaaggcatagaggccgatgtgcttgtagaacgtatggtgcgcaagccactgcgagcgttcgacgccgcgcaggtaagggatgaccgaacgcgaaaaatagatggcccgcgactgcgcatcgagcaccaccttcggcgaattggggttttccagcgcggccaggccgtccgcctcggcaaagggtttcacgagcgtggcaatgtccgtcgcgggatcgtcgaagcagcgcttcacggcttcgagctgcgacgcccggatgaaaggctcgtcgccctgcacgttgacgaccacgtcgtagggtttcccctgcttgaggtaggcttcccagcaacggtcggtgccactcttatggtctgccgaggtcatctcggccttgccgccgaacgccagcacggcatcgtaaatccgctcgtcgtccgtggcgaccacggcatcgtccagtacgcccgccacctgctcgtagacccgccggataacgggtttcccgcccagcacggccaacggtttggccgggaagcgggtcgacgcataacgcgccggtatgattgcgataaatttcatcggcagaggaattgatccataaaattaaaaaagtaaaaggtgaaaaacaaaactttccaccttttacttctttcgggctgctatatgagcgcctgtttcagcacttcgtcgttggtcttcacgtaatggaaggtcagtccgtcgatgtattcgggcttgatctcggcgatgtccttgcggttctcctccgagaggatcagctcgttgatcccggcgcgtttggccgccagaatcttctccttgacgccgcccaccggcatcacacggccgcggagcgtcgtctcgcccgtcatggcgatacgatcccggactttccgccccgtgtaggtcgaaacgatcgaggtcaccatcgtaatgccggccgaagggccgtccttcgggatcgcaccctcggggacatggatgttgatgtcgttcttctcgaacagtgcggggtcaatgcccagctccttgctgtgcgccatcacccactcgtgagcgatcgtagcggactccttcatcacgtcgcccaggttacccgtaaggctgaccttgcccttgccgggcgtcagcaccgactcgatgtagaggatatcgccgccgacctccgtccaggccaggcccgtcaccacgcccgtcatgccgcccacctcgtactcctccttgaggaacttgggcatgccgaggatcttttcgacctcccgggccgaaacctccggggcaaacacctcgtcgaaggcgatctgcttggctcgggcgcgggcgatcttggccagcagtttgtcgagcgagcggacacccgactcgcgagtatagccggcgatgatgccttcgactacctcgggggccatcgtgagctcctgctccttgatgccgtgcgcctcgcgctgcttgggcagcaggtggtcgagggcaatgcgcaccttctcctcgatcaggtaaccggggatattgatcatctccatgcggtcgcgcagcgccggtgcgatgttggcgatattgttggccgtggcgatgaacagcactttcgacaggtcgtactccatgtcgatgtagttatcgtggaaggtggtgttctgctccgggtcgagcacctcgagcagcgcgctcgacgggtcgccgtggttcgaaacggtcaccttgtccacctcgtcgaggatgatgaccgggttggacgaaccgcagcgcttgatggtctggatgatccgtcccggcatggcgccgatgtaggtgcggcgatgcccgcggatttccgactcgtcgtgcaggccgccgagcgagatacgcccgaacttgcggcccagcgccgccgccaccgacttgcccagcgaggtcttacccacacccggagggccgtagaggcagagtatcggggatttgaggtcgcccttgagcttgatgacggccaggtgttcgaggatacgctccttgacctcctccagcccgaaatggtcgcggtcgagctgctcgcgcgcgcaattcagatcgagattgtccttggtcacctcgttccacgggagttccagcagcagttgcaggtaggtcatctgcaccgaatattcggccacggcgggattcagccgctcgaccttctgcaactctttctcgaaggtttcgccgacctccttgggccagttcttcttcttggcctcctcgcgcatcttctcgatgtcggcatcggcgccgtcgcccagttcgtcctggatcgtacgcatctgctgctgcaggtaatagtcgcgctgctgcttgtcgatctcctgcttcacgcgctcctgtatctggttcttcagctcagccagctgctgttcgcggatcagtatttcgagcagcttgcgggcacgggccagcaggccgggggcctccagcaacgactggcggtcttcgtccgtaagctccatgttcgagcagatgaaattgatgatgccgcgcttggagtcgatattcttgatggcgaaggccgcctccttgggcatcgacggcgaaacgttgatgatgttgagcgccacgtcgcggatcgaatccacgagggcctcgaactcgatgctcttcaggtcgggcgtcgtatcgcgcagggcggtcacccgggcccggaaatagggctcggtcgttatgtattcgcgtatttcgatcttctccaggccgttcaggatcaccgtgaggttcccgttgggcatttcgaggattttgatgatgcgcgctgcggtgccgaccttgtacatgtcgtccggcgcggggtcttcgacgtcgctctcgcgctgcaacacggcgcccaggatgccgccttcggcattcacggcacgtacgaggctgatgctcttgtcgcgtcccacggtgatcggggtgatcgcaccggggaagagcaccgaactgcgcagcgtaaggatcgggatgatctccggcacttcgacctcctcggcaacctcgtcgccgccggtcacgatcggaatcacgtggtgtttgccgtcgagcagctcgggaagcaggctcgcatcttcgacttcgatggtttcgattatcttatcttttttactcatagtttacagatacaaatatataatggtgcaaaggtaacgattttttatagatatttattttatctttgacagaatgttaataactttgcaggccaaataacgaagcaaaacattcacacctttatgcaaatcgctgataaatattcgccgcaggagatcgaacagaaatggtacgactactggatcgacaaccggctgttccattcggaacccgacggacgcgaaccctacacgatcgtcatcccgccgcccaacgtgaccggtatgctccacatggggcacatgctcaacaacacgttgcaggacgtgctgatccgccgtgcccgcatgtcgggcaaaaacgcctgctgggtgcctggcatggatcacgcgtcgatcgccacggaggcgaaagtcgtggcgatgctgcatgaaaagggcatcgagaagtcgtcgctcacgcgcgaggaattcctcgaatacgcatgggagtggaaggaaaaatacggcggcatgatcctcaggcagctgcgcaagctgggcgcctcgtgcgactgggagcgcacctgcttcacgatggacgaaccccgcaccgagagcgtcatcaaggtattctgcgacctttacgagaaaggcaagatctaccgcggcgtacgcatggtcaactgggatcccgcggcgcagacggcgctgtcggacgaagaggtggtattcaaggagtcgcacggcaagctctactacctgcgctacatggtcgaaggctcggacaaggcggtcatcgtcgccacgacgcgccccgaaacgatcctgggcgacacggcgctgtgcgtcaaccccaacgacccgcgctacggctggctgccggccggggcgcgcgtcatcgtaccgctggtgaaccgcgcaatccccgtaatccgcgacgaatacgtcgatatcgagttcggtacgggcgcgctgaaagtgaccccggcgcacgacgtgaacgattacatgctgggcgagaaatacaacctcgaggtgatcgacatcttcaacgacgacggcacgatcaacgacaaagtggggctgtacgtcggcatggatcgtttcgacgtccgcagaaagatcgaaggcgacctggcggaagccggcctgctggagaagaccgaggattataccaacaacgtgggctattcggagcgcacgggcgtggccatcgagccgaaactctcgatgcagtggttcctctcgatggggcaattggccgaaccggcgacgaaggccgtcatggaggacgcgatccgcttcgtgcccgagaaatacaagaacacctaccgccactggatggagaacatcaaggactggtgcatctcgcgccagttatggtggggccagcgcatcccggcctggtacctgccccaaggcggcttcgtagtggccccgacggccggggaggcgctcgaaaaggcgcgcgcgaaaaccggcgacgcctcgttgcagccatccgacctcagacaggacgacgacgtgctggacacgtggttctcgtcgtggctgtggccgatttcggtcttcgacggcatccgcaaccccggcaacagggagatcagctactactaccccaccaacgacctggtgacgggccccgacatcatcttcttctgggtggcgcgcatgatcatggcgggttacgaataccgcagcgaaaaacccttcggcaacgtctatttcacgggcatcgtccgcgacaagatcggccgcaagatgtccaagcagctgggcaactcgcccgacccgctcgacctgatcgccaaatacggcgccgacggtatgcgcatggcgatgctcatctcctcgtcggcaggcaacgacgtgatgttcgacgaggcgctctgcgagcagggacgcaacttcggcaacaagatatggaacgcctaccgcctggtgaacggctggtcggcggacggcaaggccgcacaggacgagaacaaccgcctggcggtcgcatggttccgccagacactcggcgtcgctttgcgccagatcgccgacgatttcggctcctaccgcatttcggaggcgttcaagacgacctacaagctcttctgggacgatttcagcggcctgtacctcgagatggtgaaacccgcctacgggcagccgatcgacgcgccgacgttcgaagccacgcgcacgttcttcgactccctgatgcgcgtgctgcaccccttcatgcccttcgtgacggaagagatctggcaagacctcgccccgcgcaaagaaggcgagtcgatcaccgtcgccccgatgccccagccagacgaaatcgacggacagttgctggcgcggttcgagctggccagggaggtgatctcctcggtgcgtaacgtccgcaaccagaagaacctgccgcagaaggaagcgctgacgctcaaggtgatcgccgacgaaaactacccggccgagtacgcccccgtgatgcggaaaatggccaacctgacggccatcgagacggtgacggagaaagacccggcggccgcagcgttcatcgtcaagacgacgcagtacttcgtgccgatggcgggcaaaatcgacgccgaagcggaacgacgcaaactgacggacgaactgtcctaccaggaagggttcctcgcgagcgtaatgaaaaagctctcgaacgagcgtttcatgcagtcggcccccgagaaggtggtggccaacgaacgcgccaagcaggccgacgccgaggccaagatcgcggccatcaaggcgcaactggaagccctttcgtaaaaaagccggacatgccctgtcccgaaccctggggttcgggacaggtattttccaccgcggccacgccgcaaacgaaccacacccgctccgcagggccgggtttaacgacgacacgatttgccgacaatcaccatatataccgacggctcggcgctcgggaaccccgggccgggaggttacggcgcggtactcctttcgggacagcaccgcaaggagctgtcgcagggattccgcctgacgaccaacaaccgcatggagctcatggccgtctgcgtggcgctcgaggcgctcaagttcgacgggtcggacgtcaccgtgtattccgattcgaaatacgtcgtggatgccgtgacgaaaggctgggtcttcggctgggtgaaaaaacagttcgccggtaagaaaaaccccgacctgtggatgcgcttcctgcgcatataccggcatcacaacgtccgcttcgtctgggtcaaggggcatgccgacaccgtggagaacaatcgctgcgaccaactggcggtcgctgccgccaacgacaaggcgcatttactggaagatacgggttacgagccctgaaaaggggcggacagcatgtctgccccttcgtttttttcggttctaaactccccggaacttcgcacttttaagccgggaattccgaatttcacattattattcctatctttgtcacgattatcacataaactgcaaataatccgcccgtaatgtttaaaatatacatgaggcttctgggtttcgcccgacccatccgcaaatacgccatcccctatttcttctactcgctcttctacgcactgttcaattcgctcacgttcctgctgatcatgccgatcctcaagacgatgttcgatgcggattacacgttcgtatacgtggagaaactccccccgctggcgttcaaccaggaatacctgacggcgctgttcaacttcacctattcgcacctgttcaacgaatacaaccccgaaaacgtcctgctgctgctggccatcgtcaccattttcgtgagcctgctgagcaacctgttccgctacatgggggcctggacggtcgagaacatgcgcacgcgcaccctgcagcgcatgcgcaacgagatgttctccaaagttgtggacatgaacgtgggctatttcagcgaccagcgcaagggcgacatcatctcgaaaatcacctcggacgtcggcgtggtgcagttctgcatcaccaacaccttgcaggtggctttccgcgaaccgttcctcatcatcggctatacggtcatgatggtcgccatctcgtgggagctggcgctcttctcggtgcttttcctgcccgtcgtggcactgatcatcggcagcatcgtcaagcgcctgcgccatcccgcacgcacaagccagcagcgcatgggcgaactggtctcgacactcgacgaatcgctctcgggcatcaaggtcatcaagagctacaatgccacgggttatgtcaagcagaagttctacgacctgagcgaagacctggcgcggctgaccctttcgatggcccgccgccagcagctggcttcgccgatgagcgaattcctgggcatctcggccgtaggcgtcatcctggtattcggaggttcgctcgtattcaaggacgcgctcagccccgaaggcttcatcgccttcatcgccatgttctcgcagataacgcgcccggtgcgcacgttcatcgaccagttctccaacatcaaccagggtatcgccgccggcgaacgcatcttctcgatcatcgacgcccagagcgaaatccaggacaagcccggggcgatcgaactcgacgggctgaaagacaagatcgaattccgggacatccacttctcgtacgacggcagccgcgaggtgatcgaaggcatctcgttcgagatcaagcgcggcgagaccgtggccctggtaggcccttcgggcggaggcaagtcgaccctcagcgaactcataccgcgtttctacgacgtgacggcgggtgacatcctgatcgacggggtctcggtgcgcgactacacgcaggacagcctacgcgcccacatgagcgtcgtggcacaggacaccgtgcttttcaacgacaccatcgaaggcaacatcgccatgggcaaggccggggccacgcacgacgagatcgtcgaggcggcccggatcgccaatgccgactgcttcatacaggaagcacccgaaggctaccagaccaacatcggcgaccggggcgtcaaactctcgggaggccagcgccagcggctttcgatcgcacgcgccgtgctgaaaaaccccgagatactgatcctcgacgaggccacctcggcactcgacacggagagcgaaaaactcgtgcaggatgccctcaacaagctgctcgtcggccgcacatcggtggttatcgcccaccgcctgtcgacgattcacaacgccgacaagatcatcgtcgtcgaccacggccgcgtggccgagcagggcacccacaccgaactgctcgccaagggcggcatctacgccaagctgatcgagttgcagtcgttcgactaaaaatgcaggcatgtaccgatgagaggcgagaaggagaagatgctggcgggcgaatggttcgacccgcatgacgcggagctgacggccgaccgcgaccgtgccacgcgcctgatgcatcgcctcaacgtcgaatgctgcggccacggcgacgactaccgcaccacgctcggggaattgtgccccaacgtccgcggggtcatccgcgaacctttccactgcgactacggctacaacatccacatgggcgaaggttccttcgtcaatttcgactgcgttttcctcgacctggcaccgatacgcatcggctgcgggacgctcataggccccaaagtgcagctgctcacggcgcaccatccgttcgacgccgcgacacgcgggacggccctcgaagcaggcaaacccatcgtcatcggcgaccactgctggctgggcggcggggtgatcgtatgcccgggcgtcacgatcggtgacagggcggtcgtcggggccgggtcggtcgtcacacgagatatccccgcggattcggtcgcagcaggcaaccctgcacgtatcatccgcccgctctaaatatccccagacatcccattgcaccatgttcacacccgacacccctaatttccaatccctgatgctcatgctggacgccgcccacatgggttggtggaaagcggatttccaggccggcgaactgcatgtctccgaatatatcgccaagctgctggggctcgacggcgacaaagtccggatcgggcaactgacacacctgattcgcgaagactaccggatgccgatccacaacgaattcatggcgctcaaggtcgacagcaaatttgacaggacgttcccgatcgaacttcccgagggcgaagtctggctccacgcccagctcgtcggacggcagaccgaccccgcaacgggtacgcaccttttcggctacatgcagcgcgttcccgtgcacgaccggcgcgaagcagaaatcctgacgctcgaaaacaactaccacacggtcgtaaaggaaaacaagcatatggacatgctgctcgaccacctgccgatcggatatttccgcatccggctgctttacgacagcgacggacgcgccatcgactacctttttctctcggtcaaccgcgcggcgcagcaaatcgtggggatagaaccggacgcatatataggcaagacggcacgcgagaccgggcaccccgtcgatgcccatatcgacaaactcgcgcacatccgcctcggcaattacaagaccgacgaatggttcgcgaaaaaaaccaggcgccattgccgcagtttcctgtacaatacgcccaacgacggaagcgagattgtgatcctgatcctcgacatcaccgacgccataacggcacacaaggcactggacgagcaggaaaaactgctgcgcaacatcatccagaacgcccccgttggcatcgagatctacaacgaccggggacggctcatcgacatcaacacctgcgacctggagatgttcggggtgaaagatcctggcaaaatacgcgggctcaacctgttcgacaaccccaatttcccggaggagacgaaaatccgcatccggcacggcgaaagtgcggatttcaccgcccgttacgaattcggaaaactcggcggctactacgaaagcatgcgcccggggcatttcgactggacggggcgcatacgctgcctgtacgacgaccggggcgaactcacccactacctgctcatcaatatcgacaacaccgagttgcggcagatccagaaccgagtttcggagttcgaagccctgttccgcatcatctccgaatatgcccaggtaggatatgccaactacaacctctacaataaagagggctatgcgcaaaacgtatggctgcgcaactacggggaggccgactcggcgcagatcgtcgacgtgatcggcaaataccgccacatccaccccgaagaccgcaaaatcctgctcgatctgctggcgcgcttctctgcgggtgaagtgcagtcggcaacggccatctgccgcgtgctgcacgacgacggccggaaaacctggatcaagacccacctcatctgccgggactaccgccccggggaacagatcatcgacatgctggggatcaattacgacatcacggcactcaagcagaccgaacaggagctgatcgccgccaaggagcgcgccgaggagtccaacaagctcaaatcggccttcctggccaacatgagccacgaaatccgcacgccgctcaacgcgatcgtaggcttttcggaactgatggctacggaggccgaccccgaccagcgcaaagagttcgccgacctgatcctggtgaataacaccctgttgctgcaaatcatctccgacgtactcgacctggcccggatcgaatcgggacgcatagagatcgtccgcacggaattcgacgcccgcgatttatgccgcgaggtggccgagacattccgcctgcaagtcgccgaaggggtcgtcctgcggctggaagacagcctgccccggctccagctcaaggattacaagcagggactgcaccagatactcggcaatttcgtacgcaattccttgaaattcacgacaaaaggtttgataacgatcgggttctcgcaacgccccggatgggtacggttctacgtccgcgatacgggcatcggcatccccgaggaggaacgcgccaagattttcgaccggttctacaaggtcgacaccttcacgcagggcaccgggctcgggctgccgatctgcaagaacatcgccgaacagctcggcggccgtatcggcgtcgattccgccgtcggcgcggggtcgtgcttctgggtcgaaatcccggccgggagatagcccgcgccgggcagatgccgccacggacggaataggtgcaattttgcacgcttttcaaatcttttttatatctttgcaagttgtcggaaaaagaggaatctttccggcacttccggccatgccggcgtacgaccccgaacgaaataaaaaacacatataccatgaaattcaatgagtataaaggcctcgacctggcccagatagccgccgacgtgctcggcgaatgggacgcccgcgacacattccacaagagcatcaccacgcgcgaggggcaccccgcgttcgtattctacgaaggccccccgtcggccaacgggatgcccggcatccaccatgtcatggcccgcacgatcaaggacgtcttttgccgctacaagacacagcaagggtatctcgtgcaccgcaaggcgggctgggacacgcacgggcttcccgtggagctgggcgtcgaaaagaagctcggcatcaccaaggaagacatcggcaggaagatttcgatcgaggagtacaaccgcacctgccgcgaggccgtcatggagttcacgggggcatgggaagacctgacccgcaagatggggtactgggtcaacatggacgatccgtacatcacctacgacaacaaatacatcgagaccctgtggtggctgctcaaacagcttttcgacaaggggctgctctataagggctatacgatccagccctactcgccggctgcgggcacgggactttcgacgcacgagctgaaccagccgggctgctaccgcgacgtgaaggacacgacgtgcacggcgcagttcaggatcatccgcgacgcgaaaagcgaaaagctcttcggcgacgccgaagggccgctctatttcctggcgtggacgaccacgccgtggaccttgccttcgaacaccgcgctggccgtaggccccgcgatcgaatacgtgaaggtcaaatgccgcaacccctataccgacgaaccccagacggtcatcctcgccaaagacctcgtcgcatcgtacttcaccaagaagatggagggaacctaccaaatcacgggagaaagctggatggggcccgaactggaggggatccgttacgagcagctgatcccctgggtaaagccgacgggcgacgcattccgtgtgatcgtaggcgactatgtgactacgtcggacggtacgggcatcgtgcacatcgcaccgacgttcggcgccgacgacgaccgtgtggccaaggccgcaggcatcgccccgctgttcatggtcgacaaagccggcaaaaaccagccgatggtcgacaagcagggcaagttcttcgtactcgaagacctcgacccggaattcgtaaaaaacaacatcgacgtcgaaaaatacaaggagtatgcgggccgctacgtcaagaacgcctacgacccggagatcgcctgcgatgccgagacaacgctcgacatcgacctggccgtgatgctgaaagcccagaacaaggcgttcaagatcgaaaagcatacccactcctacccccactgctggcgtacggacaagccggtgctctactacccgctcgattcgtggttcatccgcaccacggcgctgcgcgagcggatgatcgagctgaacaagacgatccgatggaaacccgaatcgaccgggacaggccgtttcggcaaatggctcgaagggctggtggactggaacctttcgcgctcgcgcttctggggcacaccgctgccggtatgggctacggaggattattcggaactgaagtgcatcggttcgatcagggagctgatggatgagatcgaaaagtcgatcgccgcgggcttcatgaaggagaacccctacaagaatttcaaggtcggcgacatgtcgaaggagaactactcgacccgcaatatcgacctgcaccgcccctatgtggacaatatcgtactcgtgtcgtcgaaaggcgagccgatgaagcgcgaaagcgacctgatcgacgtgtggttcgactcgggtgccatgccgtacgcgcagctgcactatccgttcgagaacggcggcgactatttcaagtcggtctacccggccgatttcatcgccgagggcgtcgaccagacgcgcggctggttcttcacgctgcatgccatcgcctcgatgctcttcgactcggtagccttcaggaacatcatttcgaacgggctggtgttggacaagaacggcaacaagatgtcgaagcgcctgggcaacggcgtcgacccgttcgaggttctcgcaacctacggggccgacgccacgcgctggtacatgatctccaactcgcagccgtgggacaacctcaaattcgaccgagacggcgtggacgaagtacgccgcaagttcttcgggacgctctataacacctactcgttcttcgcgctctacgccaatgtggacggatttacgggcaaggagccggaagttcccgtcgaaaaacgcccggagatcgaccgctggatcatttcgttgctcaatacgctcgtcaaggaggtaacccgctcgctcgaggattacgacccgaccccggcggcacgcgccatccaggagttcgtgggcgaaaacctctcgaactggtacgtgcgcctgaaccgcaagcgtttctggggcggcggtatgaacgacgacaaactggcggcctaccagacgctctacacctgcctggagaccgtttcgatgctcgcggcaccgttcgcacctttcatcaccgaccgtatcttccgcgacctgaatgccgtcagcggccgccacgcggacgagtcggtacacctctcgacttttccgaaggccgacgaaaagctgatcgacaccgacctggaagagatgatgtccctggcacagcgcgtatcgtcaatggtgctcgccctgcgccgcaaagtgtcgatcaaggtgcgccagccgctcaccaaaatcctcatcccggtgctcgacccggccatggcacagcatatctcggccgtaaagaacctcatcatgaacgaggtgaacgtcaaagaggtcgaactgatcgaagacactacgggcatcatcaccaagcgcatcaagcccaacttcaagacgctgggcccgcgctacggcaaatacatgaagcagatcgccgccatgaccgcggagttctcgcaggagcgtatcgcccagatcgaagccgcagcccagaccgtactcgacctgggggctgaaaaaatcaccgtaaccccggccgatttcgagatcacctcggaggacatgccgggatggctggtggcatcggaaggcaaacttaccgtagcgctggacattacgctgacggaagagctccgggcggaaggcgtggcacgcgagttgataaaccgcatccaaaatatccgtaaggactcgggattcgaggtgacggacaagatccgcgtcgagatcgaacagaaggagttcgtagccggcgcgatcgccaaatatgccggatatatcgcatcgcagacgctcgccgtcgaggtgaaagcggccgcacggcccgagggaggcgtggtcgtggattcggatgtcgacgacgagccgatccggatcgccgtaacacgcatctgacgggcgaacaagggcggcaaaaccgcttcgggaacggcaaatgcgtcttgctgagaacgatatatagggtgcgtccggacgatatcgtatataacgatataaaatttggtgtttacggaaaaattgtttaattttacataaaaccaacaaggagaagacgactatggcagacgaaagaaccagatacagcgacgccgaactcgaggagttcaagcagctcatcctgaaaaagcttgagaatgcgcgcgcggactatgagctgctgcgcgccactatcacccacacggccgataacgacacggaggatacctccccgacgttcaaagtcctcgaagagggcgcagcgaccctctcgaaagaggagagcggacgtctggcggcacaccagatgaaattcatacggaacctggagatggccctcgtgcgcatcgaaaataagacctacggcatctgcaagacgaccggcaagctcatccccaaggagcggctgatgaaagtgccgcatgccaccgagtgcatcgaagccaaagaggggcgcaggtaaacctgcaatccgaatatgacagaaaaaagacgactttcggggtcgtcttttttattcgggcccggccgtctgtcccggcacatgcccgccgacaggcagccgctatgtcagccgcaacggctgctggatcgacagtcttcacaacagccgcaatgccagctgccttaacaggtgcattgtcagtctcaacggcagggcagaccggcacccggcacctcccgttttttgccaagggtaactcctgcgggccagaaactgtattttagcaggttcaggcgcactttttcatcaaaaaatacgttatctttgacgatatgtatcgccggatttgcatactcgtgctgaccctcctcgctgcgcaaagcgtctgtttcgcccgcacggtcaatcccggcatgcgggcgccggacagggtttcccccggcggattctcccccgacagcctgaacacggcgacctcggagcgcaaccagcgcctttacgacagcatacaatccaaaaccaaccgccgcgcagttccgcgcatgctttacaggatgctcttcgtcaaacccgtactcgatacgacgatgaacgggcgcgtattggacgaaagcaggctgctggaaccttacgccgggaaaaccgtaggcgacatcatcatcgagcgcatgatgccgttcgactcatgcggcaactggttcgagcgcgcaggcaacaaaacccacatgctgacccgcgaacgggttatccggcgcgacctgctgttcaagccgggcgacaagttcgatccccagctggtcgtgcgcaacaagcagctgctgcgttcgcgcccctacatctccgataccgaggtgatcgtcgtacccgactcgctcgattcgacgcgcgtgaacatggtcatccgcacgcgcgacagctggacgatcagcgtcgacgctggcatacacggcgaggggcgcaccatggtcgggctttcggacgccaacattttcggcacgggcaacaccctgaaattcaagaccaatttcagccgcagggatttctcctacggcggcaacatcgtggaatacaaaatccccaacgtgctggggacattctacacggccgacttctcggccggccgcgacttctataactcggaactgaacctcgggctgcgcaaggagttcatccggccgacggactacgagatcggcctcacgtacagcgacataaaatcgaaacgctacatggtagacctcgacacctcgctgctggtgaaagtccgcaacctcgacgtatggggcggcaagtcgcattacatccgctccatcaaatcgagcgtcttcctgacgggccgttacagctatgcccggttcagccgccgcccgcccgtcacggccgactacaaccccgcgctgcacgaccacgacgccatgctcttcggcggcggcctctaccgggaaaaattctacacggccaacatggtctacggattcggtacccgcgagtatctggcgacgggttacaaagccgagctggtgagcggctattcgtggggcgagttcaacgacgagatgtacctcggcatgtcctaccagaccggcggcttccgggggataggctatatcatgggcggcttcacgctgggaagctacatcgacctcaaaagcggcatgtggcgccacagtgccgtcgacgtagacctgaaatggttctcgaacctgtttctgttccggcgcagccgcatccgccagttcctggcgttcaactacacgcaaggctggaaccggggcgaaggcagcgacgaaatgatccgcttcacccacgacaacgggttgcaggcgctcaaagagtacgtcaccggaaccaaccgcatgatcctcaacacggaaacggtggtcttcaccccctaccagcccctcgggttccgcatcgcggttttcggattcgcggacttcgggctgatcggctattcgcccaatatcttcaagaacgattttttcacctcgttcgggctgggtgtacggctcaggaacgagcggctcgtattcaacacggtgcagatccgcctgggaatcgcattcggtaaacgcgggctggtcaagagcgaatatttccgcctgtccaacgccacgcgcgtcgaacagtaccgctaccgccccacccgccctgagatcgtagggttcaagtaagcgcaacgcgccgcaacaggcccgcaagcgaaagccgcaggcatgaaaaaacggaggccgcggcccccgttttcgccataccccgcccggggagcgtcactgctcgacgatctgtcccgtctcgtcgatcgtcagcacccggtcgtattgtttgaccttggccctgaaatcgtggaaatcttcggcctcctggtacttgcaggggacgacttcgttcccctgccggtcgatatacccgtacccgagccccttgatgaagacacgcgccagcccgcagctgaacggataggcctcgtggtacttgagcggcacgaccagttggccgttcgtggcgatatagccccaacgggcatcgtagaaatcctcggcattggtgccgaagcgcatcacggcggcacgcatctcgctgaactcggcggcatcgtcccacttggccgggatcacttcgcgcccctcggtgtcgatataaccgcaacggggctccataccttggaaattcatgccgtagaggtcggtattgaaaggcgccagcccgtcgttgaacctgccgatgcgtttatagcggaacgagctgacctcaccgccgttgcggtcgacgagcccgaaattgacattgttgtagctcaccacggccaccccgcccgagaagggccgcgccacagagaaacggggcgaaatagccacattccccttgacatcgacatacccgtaattgccgaactgctccagcctgaacgccgcgagcccctcgcccggggtgtcgaggtagtagtagcggcacgggatcgtctcgtgccccagcgtgtcgataagtccccactgaccgccgtagggctcgtcgcgcagcaccatgttgccgccgtagttcgtccgggcataaccgtccttgaaatcggaaatataggagaagaaacaaggcagcacctcacgcccgtcggcaccgaggaagccatgtttgccgtcgctcgtcacggggatcagcccgtaggcgttcggctcgccgatcaggttataggcacaggggactatcacctcgccgtcttggcgcaggatgccccatttaccgtcgcgcaggacacgcatccatccccgttcgtcgggttcgccgatctcggaataaaggcagggaatgacgattttccccgttttgtcgatacgtccccagagctcgccggactgaacccaggccatgccgtcgtcgaacgccccggccaccgtaaattgcggagccacgaccgcccggcctgcggtatctatatatccccagagcccttcgggctcctgcacggcggccagtccgtcgtcgaaactccgggcatcggcataacggcattcgatgaccagccgtcccgtcccgtcgacatacccccaacggccgaccccttcgttaatatcgagcaccgcagcacggttatcgttcacggatccgacctcggcatatttggccgtgcgctgctcgaatgtccggccgcatgaaacgagcgttgcgaccgtaagaaaaaatagcaggcgtttcatagcttctgttttgtattttacatgcaaagataactttttccctcctaattctgcaagtttcacgcccgtatcgtatggccgacgaaaaaacccgggcggcagaaccgtcccgggcacgaactttttatatatacttatggcctgattattttttcttagtcgtaatctcgatgacaccgttgcgggctttcctgccgtatttctcgaccgccgaggcatccttgagtatggacatgctctcgatccggccgggatcaagcccctccagtttcttggtatccttatacaccttgccgtcgatcacgagaagaggttcctttcccttttcaaacggcgacttgcccgatccgcggatcacgatcgtactactcttcagcgtacctgcatcctccgtctgctccatatgttcggtgaccttgcgacgggcctcgacgccggctgccgtcgacccggcctcggcagctttcgccaaggccgcctgtacacgggggtcggccaaatgctcctgcgcctgctgaatctgcttccgcgcctctttccactcgtcgctggccatatacttgcgcacggcctcctcctgctcgcggacggctgcgagttgcgcggcagacagcttgcgtgccgaggagagttccttctgtgccttgtcgagttcggcctgtgcctttttccactcctcgcccgacatatattcgcggacagcctccagtccggcacgggcagccttcatcccttcctctgcggctttgagcccggcttccgcagcctgggtcgcctgccccggcgacaatccgtcaacctgcaccgcgtccggttgcgtcttcatgacggtcacgcccccgtcgtcggtgacggtcacccggctctggctgacgacagtcttcttcccgtcgctgccggtaacggacacgacacgtccgcgggttttcgcaccggcgtctatcccggccttatctgcgggcaccgtagaactgccgaccaccctaacatccgacatcttcccggaaccgcgcaccacgaccttgacagagccgtcctcggcgtcgaccgaataatcctgcgcaccaccgacggcatccttcgtcgtcacgataattacgccgttcttgcctttctcgccgtacagggcctctgccgaagcgtccttgagcaccgttatggaagcgatccggtcgggcgacagcgactctatcgactccgcttcgaggccgtcgaccacaaaaagcggcttgccggattttccgtccgaagagtaaaaattcgtcccttcgatgcggatcgaaacattttcttttttacctttgtcatcaggaaaaacataggcggtgcgggcgaacgccccgagggcaagccccgtcaacggcagcaggaaaagcactctggcccctgcccaccgcgacgatcttttacgtaacatcatggtaatacggtttttaagtttactgtgattaaagctgttggcgactgagtaccacctcccgccggcagctttccttattaataacaattggtattgccgggcatcgacgccgctgtccagcaccgcctcgtcggcttcgtattcatggatggcgcgcaactcacggcgcaggagccacatcgcaggattgaaccattgcaggcaccccgcaaggtcggtcaccaacaggtcgaacgagtggcgcagcctcaagtgagccttctcatgcagcacgatcgcttcgccgctttcggccagatccttttccgacatcacgatataccggtaccaactgaacggtacgaccggctggtcggtgcgtacgagcacggagccgtcgcccagccgctccctgtgcccccggcggatcatgtgcaatacaccgcataccgacccgagcgtccataacaacgcagcggcggctcccgcaaggaaagcggccgtcgccgccttatcccacgggaaaggttgggattccggctccgcggacggggcgtagcccgcatcctccgtcaccgggagttccggcatggccgggagttcgcggtagaccgtaatgacacacagcggcaacacgaacgacaacaccatggctgccagcaccacgatccggttcaggcggtggaaggtctcacggctcagcagcaatttgaagaaaaggtagaacaccgccaggcaggcgccgaccttcaggctgtacagcatcagtgtgtacatggctaacgacggttttgggtttcgatacggtcgatcagctcgcgcagttcgtcgaccgagattttttcctcctcgaccagggcagaaacggccccgaggtaggagttctcgaaatatttacggatgaccccgcccagcgtgcggcgcgaaaattcctcctcggtcaccaccgggtaatactggtaggtgcttccgaaggtattgtgggcgacataccccttggcttcgagggcgcgcaccatggtcgaaagcgtattgaaatggggcttgggttcggtggcgagcgccacgagctcgcgtacgaaaagcgggccgtgctcccagaagcagcgcatcagttcctcttccctgcgtgtcagtttttccatcataccggttttggtttctgttatccgccctgctccgatcggccggccgggcttacaggaacaaaggtaactaaaaaaattttatttgcaactattttaaatagttttctaactatattttttagttttcacaaaaaaatagcggaaataccggaaggaaaaggagccgggaaagggctgggagaggagagggaaaaactgggaaagaagattttacaggccggcaagcatggaagggcccggcaagcccagggggggggctgaagagggagacaaaaaagccccggctatttcagccggggcatatggatacgggtaccaacagggactaatcctcgtcgcggtacatgtgctctacgtaaacagcgtgctgcatcgcctcgcgcttggcgatcgaaggcttggtgaaatactggcggcggcggagttccttcaggacgcccgtgcgctcgtatttacgtttgaacttcttcagggcgcgctcgatgttttcgccctcttttaccggcatgataatcatagtagtattctttttttgttttttttaatttcgtcgtttacttaaattcctccggggttcgcatcacctgatacctcgccccatgtcgtgtcgttgtccgtatcgtcagccccgcttcgggtaccgaaccgcaggtaaggagccagccgtgctgcctcttcgcgggtcaatatgttgtcttcaaccaattccttagcggtactccaacctcctttcaactgtcttgttttaagtaatttccgaagcttctgcggcggaatatacggatgccgcctaaggactttcggggttgcaaagttaatatcaattttccgaatttcacaactatcgcagcaaatttgtttcaaaattttctcataattgcgttccgtgactcccggaacctctgcgagttgctccagacggacaaatccgccgagcctcgcgcggtagttcatgatcgacaccaccgtccgcgctccgatccccaccacgccgcgcagcgtcgcggaatcggccgtattgatctccacgggttcgtcgaccggcgcagctccgcgctcgggaaagataatatagggttcgagcgccgcagccaccgaatcgctcacgacatagcaggcgcgcaactcctccatgtcgtagatcccgctcaggtcgcgccagcggatgaaggcctcggcctgccgcttggacaacgccccgatggcccgcaggtaacgcgcccccacggtgtcgatgcgaaagcgcgagggcggcatgggctcgggcacgacacgccccgtacgatactgccggggcgcgatggcatatttgcgcccgatacggatatagggagccaggcggcggtagatcgaatcgctgatgccgtagcaaagcgtcacatcctccgggatacggaagatcttccccgcagcacggtatttcagcaggctcacggcttcgtgcttcgacaagcccagccgccgaagtccgtcgtagtccacggtattggggtcgaacggccgcaggtcgaccgaatcggcccgtccttccatctccatcccggccacaaaagccgcttcgggatcggccttcgggcgcaggagcacgatgccgcctataagcaatcccgccagcggcaggaacaccgccacggcgcggatttcacggtctgaaaagaattttaccatatgcagaaactatttatcaccgtcattccccggcaggatgccctgaaaacacccccggcgccacggcatgggctgcggtacccgtcagcccccccctcaacgccactgcgccccgtcggagagcagcaggcggcggtaacgccgcgacggcgaactgacaaatgcccccaagccatattccggccagcggcggtcgaccaaagcgacagtcgcttccgacgcggtcacgacgttcgggaaacggccggggttctcccccgccccggggcgtttgctccgggcatcgatcaccaacgccgcaccttccgtccgcacatcacgccgcggatcggtattggccgcagcgagccacaaaagttcggcagccgtgagttcctccgccgccgggtcgaacacagcgaggtatttcacccccggcggaaccggcacttcggcatccggcgcggcgaaggcgaccgccacaccccatttttcgagcaagtcagtgcggtagccggccggaaggaggggctgcccgccgtcaccctgcccggcacaagccccggatattgcgccatccgctgcgggacgcacgccctcaccaccccgcacggaatcggagagcacatgcgtggcagactcctgcggattcacgcacccgcccccggcaccgcaggccgtagcatccaatgcaatttttccgccgaagcccggcgttgccgtcgcgtggtcgaggacatcgagaatcccctcgctgcggactatgtcgcgcagcgggtcgaggttgcgcacgagccgcgccaatgcatccgtatcgcgcacgtcggtcgcggccggaacgacgagcatgtatttgttgaacatcatctgcccggcgccccacagcgcctgggcgaccttcatggcctgtccggcatagcggctgtcgatcgaaacgacggcgatgttatgcgccgttccggcctcgggcatcgtcatgtcgcggatttcgggctgcagggccatgcgtatcggcgccaggaatatccgctccgttgcctgcgcgatacaggcgtcctcctgcgggggaatccccacgaccgtggccgggtataccgcatcccgtcgccgcgtgagggccgtgacgtggaaaagcggataacggtcttcgagcgaatagaaccccgtatggtcgccgaaggggccttcgacagccttttcctcggcagggtcaacataaccctcgatcacgaaatcgcagtcggccgggacataaatatcgttggtgacgcacttcacgagtttcacgggacggcggcgcaggaacccggccagcaggtattcgtccatgttgtcgggcatcggcgccgtcgcggcataagtataggccggatcgccgcccagcgccaccgacacgggcatccgccgccccgagcgtttccaggcatcgtaatgccgggcccccgtcttgtggatatgccagtgcatgcccgtcgtatggtcgtcgaagacctgcatgcggtacatgccgacgttgcgcacgcccgtctggggatcgaccgtgttcaccatcggcagggttacgaaacgcccgccgtcggccggccagcacttcaggatcggaagcgccgcgagcgacgcctcagcacccgtctgcacgacctgctggcattcgccccgccccgacaccgtacgcggaaaccagcgggacatcccggccagcagcggcaacgcccgcaacttgtccgcgaacgacgggcgcggcgccatggcctgccgcagcaatccgtcgacccgttccgagagttcgccgagcgacccgacacccagcgccagcgccatgcggcgtgcggaaccgaacatgttggtcagcacgggaaaatccgtgccggtattttcgaacagcaacgccttgccgccgccgggcattttcgaaacccggtcggttatctcggcgatctcctccaccggcgacaccggagccgctatgcggacgagctcaccctcgcgctccagcagcgagatatagtcactcaggcttcggtgcatgctccaacgcctttttcaccgacccgtattgcagcagcaacgcccgtgcctgcgcctcggaaagccccgaagcctcggccaccatgcgcgtgccgcgccccacgagtttatcgttcgtcaactgcatgttgaccatgcggttgccctcgacacgccccaggcggatcatcacggccgtcgacagcatgttgagcatcagcttctgtgccgtgcccgccttcatgcgggtcgaacccgtcacgaactccggccccacgaccgcttcgagcgcatattccgcctcggccgccacgggcgacgagggattgcaggtaatggaggcggtcaacaggccgtgctcccgcgccatgcgcaggccgccgaccacatagggggtggtacccgacgcagcgatcccgaccaggatatcgtccgccgtgggatggtagggcgccatgtcgcgccaagcccctgcggtatcgtcctcggcattctccacggcacgccgcagtgcaccgtcgccgccggcgatcaggccgatgaccctgtcgaagggcacgccataggtcgggggaagctccgaggcgtccgtcacacccagcctcccgctcgtaccggccccgatgtaaaacatcctcccgccgcgctccatgcgttcgacgacccgctccacgagccgttccatcacggggatggtcttggccacggcctcgtggacgcgtgcgtcttcgcggttgatgcccgtcaggatgtcgtgcaccgacatccgctgtaaattatcgtaggccgaagcctgttcggttattctattttccataatggtatttgataagtccttcggcaggtgatgcggcgatcaggccgacccggtaacccccatgtgcgagcacctcgcgcagcagcccctcgaatgcggcggcaacgccgccgatgcaggcgaccgtcagatgcacgggatagcggctcaggttgcgttgggcgaaatcggcgaaggtttccgccaccatagcccgcacctcggggcaatccaggtacgcatgtacgaacggcgcgaacgacgccaggaaacggttggcatacggctcgcggtagacccggaggatgatctcctcataggtcagcccatgcgccgcgaggaactcctcccgcagggggatatgccctttgaaaataccgttcaccaggttgcgtcccagcgccgcaccgctgccctcgtcgccgaggacataccccagcggcgggacgttttccacgatttcgccgccccggcaccagcacgaattggagcccgtgccgaggatgcaggccacgccttcgccgcggccgaacaacgcccgggcagcccccagcaggtcggtctcggcctcgatccgccccgtgccgaaatgcgcgcggagttcccgcaccatcttctccgtcgcttcggggaaggtgcccccgcaccctgcgccgtagaaatagacggcctcgacggggccgcacggcggcagttcggcaagcgcttcgcgtatttgctccggggagtgctgcacggcattgattccccgcgtccggtattccgaggtatgcacgccgtcggtcacgagccacgtgcatttggtcgatccgctgtctgcaatgattttcatactatattgttacttcctaatacatcagaaccgccagccgcacgtcagcgaaaacccggcatccgtaagccagggcgtcacatcggtcggcgcaccgagttcgacgggcgacaccgagaattccgaaggcacaaacaggatcgtcggcgaaaatttcagttcaaaccccttcgtcacccgcagaatccacgcacattcgacattgaagaaaggcaataccctatccttgtcaagatcgttgtctacatgctttagtatccggtggtatcccgccccaactccggctccgaaacgcagaaaaagcctgcttttcaccaccggcagccgataataggccattgcatccagtttataaatatcctgcgcaaccgtattgcggtaagggtcagatccgtggccgctccaatcgtagctcatcaaactccccagatgccaccgggccgaaaaatccacgccccaataaaaatttcctttcaattggcggctgtactccaccttcacgccgacagtcacctgattatgcgccgtgattcccgacgcgcccgtcacaaagagattattctctttcgaggcgaggcgatgacgttcgatacgcgccgctgtttttgcattccgcgtccgatctgttgccgacggcgggctttgggcatatgctgctgcggtgacgcataccgtcaataatactgtgcctatttttcgcttcattcacaagtgggttacatgttcatcatgcaagaaagcaataaaattcggaatagcaatgtcccaatgcaaatgcattgccggtttgctcctcaaacctgcactccttcccgtctggcgcagcgccttttcggaaaatttgctgccgccaaatcggctccgaaccctaatccaccccattcccttttcacagcttcggaaaacaaagataacgaaaaataatccgagcggcaaacccggatcattacacaattatataaggaggcgatcagcgcaggaaaagcagctcgcggtatttgggcagcggccacatctggtcgtcgacgatctcctccagcttgtcgatgtggcggcggatctcgtcgaaacatgcggctacggtatcatggtaggcgatcgccttctcgcgctgatcctcgatcctgttggccaccttgcgggcgtcgaccatcccggccgtgagccgctgtatttcggccgtatggtactggatcttcttgatgagttcgatgtcggccgaagcgttcagccccgggatctgcgacatcttgtagaccttgtcgagcagcaatgcctcgtacttcgaagcaatcggcacgatatggttcatcgccagatcgcccagcacgcgcccctcgatctggattttcttggtgtaggtctcccacttcacctcggtgcgggcttcgagctcgaccttcgagaagacgcccgtgtcgccgaacatccggagcgtctgcttgtcgaggtaacggtcgaagatcagcggcgtcgaggtttcgcagtccaggccgcgtttgcgcgcctcggccttccactcgtcggaatagccgttgccgtcgaaacggatggccttgcaggccttgatcatctgtttgagcacctcgtagatggccttctctttcttcatgccggcctcgatcttggcatcgacgttctgcttgaactcggccagttcgtgcgccatcgccgcattgagcacgatcatcgcctcggcacagttgtccgaagaacctacggcgcggaactcgaaccggttgcccgtaaacgcgaacggcgaggtgcggttacggtcggtattgtcgagcagcagcgtcgggatatgcgaaatcccgctcatcttgaacacgttcttggcatcgaagcggatcgcgtcgtcgcccttgctggccgccagtttgtccagcacggccgacacctgcgtcccgaggaaggtcgagatgattgccgggggcgcctcgttagctcccaggcggtgtgcgttcgtggcgctcatgatcgccgccttgagcaggccgttgtgcttgtgtacggccgaaatggcattcaccaggaaggtgatgaactgcaggttctccgaagcggtcttgccaggccccagcaggttcacgcccgtatccgtccccagcgaccagttgttgtgtttgcccgaaccgttgatccccttgaagggcttttcgtgcaacagcacccggaacttgtgacggcgggcgatcttgtccatcacggtcatcagcagttggttgtggtcgttggcaagattggcctcctcgtagaccggcgccagttcgaactggttgggcgccacctcgttgtggcgggttttgacggggatgcccagtttcaggcactcgtattcgaggtctttcatgaatgccatcacacgggtcgggatcgcaccgaaatagtggtcttccaactgctggttcttggccgattcatgccccatcagcgtacgcccggtgagcatcaggtcgggacgtacggcccagaggctttcgtccacgaggaaatactcctgctcccagcccagatacgagatgacccgctgcacgtttttgtcgaaatagtggcacacctcggtcgcggccttgttcaccgccgagatcgagcgcagcagcggcaccttgtaatcgagcgcctcgcccgtataggcgatgaagacggtcgggatacagagcgtcgtgtcgacgatgaaggccggcgaggtcggatcccaggccgaataaccgcgcgcctcgaacgtattgcggatgcctccgttggggaacgacgacgcatcgggctcctgctggacgagcagtttgccggagaactcctccagaaccccgcccaagccgtccgggtcggcaaacgcatcgtgcttctcggccgtacctcccgtcaggggctggaaccaatgggtatagtggtcggcaccgtgctccagcgcccactggcgcatgcctgccgcgataccgtcggcaacctcccgcgtgaggggcgtaccgttctccatcgtatcgacaagggcgtcgtaagtagccttgttcaaatacttgcgcatggctgcgcgcccgaatacccgtttcccgaaatagtccgaaggacgtccttcgggagccttcacctcgacggcggtgtggtttatggccgcatcgaccatcttgaatctgagcaatgatgacatagatgtaattgaattggattagcattccattaaaaacatacgcgcaggggcggaagccgaataattgctgaactaaaacctaacctaaaattccggagggcaactgcctcgcggcatactccgcccaacctgactaacccgcggcttcacccctgccgccgtatgtatcgatctcgcttgcaaatgtaatattttttcagttacgttgttttcacaaaatcggcattttttcgaaaaacgccctattttttcagcattttccgaaaaatcacatgcatttttccataaaaacgccgaatttcaatgcaattttccgaaaaacacccttaaattttcgtcatatccccgaattttcacatttttagtttttcgtaatttccatggctattaagaacaatattaaactatttcaccacaactaaaaaaacttcttccggcggttgccgaaagcaaacgaaatcacctatattataaaaagaaattatatagtgttattttattaacaatttcttgtttcaatcactaataattttgtacctttacgtgcaattttgaaactacacttatactaatctctaaatagttatggcaaataccaaaagtgaaaagctgttcaccgaattcccgccggttccgaccgagaagtgggaggaggtgattacggccgacctgaaaggtgctgattacgagcgcaagctggtatggaaaacgggcgaaggtttcaacgtccggccttactaccgcgccgagaacctcgagggcatcaagttcctgggctcgcaggcaggcgagttcccttacgtacgcggtacgcatgcgcacaaccgctggcgcgtacaccagaccgtgagcgtcgtatgccccaaggaggcaaacgccgaggcactgaaaatcctcaacgcaggtgtcgactcgctcggcttctgcatcgcgtcggcggatttttcggcggcagacctcgacatgctgctcaaggacatctgcattccggctgtcgagatcaccttctgcggagagaagacggcccatgtcgccgagctcgtcctggccaaagtcgaaaaggagggcatcgccaaggaggatgtccgcatcgcattctgcatcgacccgctggtaaaagggctttcgtcgaaaggcgaattctgctcgcccaacggtgaaaagtgcatcgcccgcatcgtcgagctgatccacaagaccaaggagtacaagcacgtgcgcatcgtaaccgttgcgggacagaccttcggcaactcgggttcgaccatcgtcgaagagctggcattcaccctttcggcaggccacgactacctcgtacgcctgacggacgcagggctggacgtcgacgcggccgcacgcaaactgcgcttctcgttctcggtaagctccaactatttcatggagatcgccaaattccgcgcggcacgtatgctgtgggccaacatcgtcaagggctacggcccggcgaagaactgcgcctgcaagatgcacatccacgccgagacctcgcggtggaaccagaccgtctacgacccctatgtgaacatgcttcgcggcacgaccgaggccatgtcggccacgatcgccggcgtacattcgctggaagtaacgccgttcgacacctcgttcgaaaacccgaccgagttctcaaagcgcatcgcccgcaacgtcgagctgctgctcaagaacgagtcgcatttcgaccaggtcgtcgacccggcaggaggctcgtactatgtcgagaacctcacgcaatcgatcgcagccgaagcctggaagcttttcctcgaaatcgagcagaagggaggctacaccgaggcttacaaggccggcctgatcgtcgagcgtatcaaagcgtcggccgcagccaaggacaagaacatcgctacgcgccgccagacgctgctcggcgccaaccaatatcccaactttacggaggtcgccggcaaggagatcaccgccgagtccgttacgcgcaagcaggccgagggcaatgtactcgtcccctaccgcggcgccatggcgttcgaagagatgcgcctgcaggtggatcgcagcggcaaggagcccaaggcattcatgctgacgtgcggcaacctgggcatggcccgcgcccgctcgcagttctcgtgcaatttcttcgcatgcgccggcatcaaggtgatcgacaacacttatttcaagtcgatcgaagagggcgcgaaggccgcactcgaatccaaggcgcagatcgtcgtggtctgcgcaagcgacgacgactatgcggaggcagccccgaaagtcaaggagctgctcggcggcaaggcgatcctggtggtcgccggggcaccggcctgcgcacccgaactggaagcgcagggcatcacgaacttcatcaacgtgaagtcgaacgtgcttgaaacacttaagttctaccttaaagagatgggaatctaatcatgagagctaaattttcagaactgacatacgacgcaggccagcagaaaagttgctgcgcctcgaaaggctgcggacaggtcgagccgtggctgacggccgagggtattcccgtcaagggcgcctatacggcccaggatctcgaaggcatggagcacctgaactatgcggcaggtatcgccccgttcctgcgcggcccctactcgacgatgtacgtgatgcgcccgtggacgatccgccagtatgcgggtttctcgaccgccgaggagtccaacgcattctaccgccgcaacctggccgccggacagaagggcctgtcggtggcattcgacctggctacgcaccgcggctacgacgccgaccacccgcgcgtggtgggcgacgtgggcaaagccggcgtgtcgatctgctcggtcgaggacatgaaggtattgttcaacggcattccgctcgacaagatgtcggtgtcgatgaccatgaacggcgccgtgctgcccatcctggcattctacatcgtgaccggcctggagcagggctgcacgctcgaccagctggccggtacgatccagaacgacatccttaaggagttcatggtgcgtaacacctatatttatccccccgagttctcgatgcgcatcattgcagacatcttcgagtacacctcgaagaacatgcccaagttcaactcgatctcgatctcgggataccacatgcaggaggcaggcgccacggccgacatcgagctggcctacacgctggccgacggactggagtacctgcgcgcaggtatcaacgcaggcatgtcggtggatgccttcgcaccccgcctgtcgttcttctgggccatcggcatgaaccacttcatggagatcgccaagatgcgcgcggcacgtatgctgtgggccaagatcgtcaagcagttcgagcccaagaaccccaagtcgttagcgctgcgcacccactcgcagacctcgggctggtcgctcacggagcaggatccgttcaacaacgtggcacgtaccgccatcgaggccatgggcgccgccctgggacacacccagtcgctgcacaccaacgctttggacgaggccatcgccctgccgaccgacttctcggcacgtatcgcccgtaatacgcagatctacatccaggaggaaaccaatatctgccgcgaggtcgacccgtgggcaggctcctactacgtggagtcgctcaccaacgagatcgcccacaaggcatgggagcgtatccaggaagtcgagaaactgggcggtatggccaaggctatcgagaccggtattccgaagatgcgcatcgaggaggctgcggcccgcaagcaggcacgcatcgactccggcgaggagaagatcatcggcatcaacgaataccgcctggagaaagaggccccgatcgacatcctggccgtagacaacaccgccgtgcgcgagagccagatcaagcgtctgcaggagctgcgcgcttcgcgcgacgaggccgccgtgaagaaggccctcgcagcgatcaccgagtgcgtgaagaccaagcagggcaacctgctggagctggctgtcgaggccgccaaggtacgcgcttcgctgggtgagatttccgacgcctgcgaggttgtcgtaggccgctacaaagccgttattcgttcaatttcaggagtatatagttcagaagtgaaaaacgacaaacagttcgaacgtgccaaggagctgtgcgccgaattcgccaagaaggaaggccgccagccgcgtgtcatgatcgcgaaactcggccaggacggccacgaccgcggtgccaaggtagtagccacgggttatgccgacatcggtttcgacgtcgacatggggccgctgttccagaccccggaggaggccgctaaacaggctgtcgagaacgacgtgcatgtagtgggcgtttcgtcgctcgccgcaggccacctgacccttgtgccgcagatcatcgcagagctcaagaagctcggccgcgaggacatcatcgtgatcgttggcggcgtaatcccccatcaggattacgacgaactgtaccgcgacggcgccgccgccatcttcggccccggcaccccgatcgccacggccgctatcaagattctcgaaatcctgctcgccgaataacggttcggcagaatacggtaatccccgccgagacatctcggcggggattttttcatggatacagacggtctcgggacaagttacaggcaggcttccagaatcctgcgcgccatcgccccatcgacattgtgcgcctcgccgaacctgctgcccgcagcgttgaagcggcgttcgatttcggcgatcgtagcctcgccgataccctcctgcgaaagatgcgtcgaaagccccagggaacggaagaactcctcgttggccgcaatcgtccgctcgatacgctcctcgtcggaaccgccggtgataccccagatacgctcgccgtattgcaggagtttgccgcgcttctgctcgcgcagcacgcgcaacgtaccgttgatgacaatggcgagcgtcgcaccgtgcgtcagcccgtgcagtgcggtcagctcatgcccgatcatatgcgtcgcccagtcctgcgccactcccatgcggatcatgtcgttcagcgccagggtcgccgcaagcatatactccgacatcacggcataatcgtgctggttctcacgaatccggggtgcgatctcgatcacggtatgcagaatgccttcggcccaacgatccatcaggcgcgactgcccgggcgtggtcatatactgctccagcacatgcacgtaggtgtcggccaggccgtaggcgatctgcttctgcggcaaagagaacaatgcctcgggatcgaggatcgaaaagagcggatagtcgccgttgaacgggaacttctccttcgtttcctggcacgagatcaccgaaccgttgttcatttccgatcccgtcgccgacatcgtgagcaccgttccgaggggaacggttttatccgcttgccctttcaggacgatctcccacgggtcgccgtcataaagcagccccgcagcgatcagcttcgtaccgtcgatgaccgacccgccgcccacggccagcaggaactccgagccgtgctcacgccccaatgcgatggcctcgcggacggtctcgaccgacgggttgggctcgatgccccagaattcgacccagtcacggccttcgagggccttgacgacctggtcgtaaatgccgttgcggcgcacgctgccaccgccgaaggtaatcatgatcttcttgccggcaggaatcagctttgcgagctgagcgatctgccctttgccgaaaaccagtttcgtcggattgtgataaacaaaattattcataattgtatgcgatatgttttgatacgacttctaaatatacgcaaaaataacaaaaagaacgccggaatattccggcgttcaaaactatatcgtattttttatccgaggcttagaaatattcgccgcgcagatcctggatgttggccatctgctggatggcctgcaccgagaattgctgcgccatgctctcggccatggcctgcgcacgtaccctctcgccctcggcagtctgcttgtccgaagtctggatgtcatccacctggaaaacataaacccccgacatgcccttcaccggagccgacaggacgcctttctcggtcgtcgaagcgatggcgcctaccagacggggctcgacacccgggccgttcacgtagaaggcaccgaaagtcacgccgtcgaaatcggcgacctcagaaccgaggctggcagcctgctcatcgagcgtcgtaccggcgatctgcttggtgatgtaatcgtatttcttgtcccggagaacctgggcgcgaacctgcgcagccaccttgtcgatcggggtatactcgttgtcatcgatctcggtcagcgtagcgaccacatagtcgtttccgacggtgaagatttccgaaagatcgcctgtctcggcaccgtaagcccagcgggcaacctcacgcgaatcctccaggccgcggatcgtacgctcgccctgcgccagcgaggcgacacggggagtaacggccgcttccgaagcggcgttgttgaacgcctcgaccgagcccttggcattcaccgagaaagtgccggccaggttgtgggcattgcggcgcgtcgcagccgaagcctcgacgggataggtgatcgtcgccacctgcatgtgcttcgaaggtttgtcggcacggtacacctgcatcagctggatggcatcgcccgaagcgaccttcaccacgtccccccgcttggcattggccagcgcggcaacgaattcgcccgtgaaagccgagaagggcaccacacccacttcgccgccgttggctgccgtagcttcgtataccgaatactgcgaggcgagctgtgcgaaatcggcaccgcccttgattaccgtcagcaggctgtcggccagcgcctcctgcgtatagggcagcacgatatggcggattcccagcgtatcgggcaccattttcgaatccagcacacgggccatcgtccactggttgttcttcagcacggggccgtaagtctcacccgccagcagtgccttggcctcgtcctccgaaagctgagccgccgaaacataggtatcggcgatcttgccgttgcggttggcacgtacgaacgacttcagctcctccgtagcggcgaactgtgcgcccacctcggcaacgctcttttcgagagcgagcatatcgtcgtccgtgggggtaacctcgaacacgacatacgacagcgtacgcgagggagtctgcttgaacatatccttatggctgttgtagtatgccttgatgtcgccggacttcacctggatcagcgaatcgggaaccgtcgaatatttcttgccggcccatttcccggaataggtattgttggccgcattcactccgttcgcaacttcgagtgcattgacatacacgccgcccttgatcaggccgaggtacttggcgatctcacgctccatgcgggcctgctcgttgagctgcgcccacgcctgctgtgcctgcgcattcgtttcggcctgcgcgaggaactgtccgacggcagccacgttgtactcacccgtgcgggaatcggcgaaggcgttgtagaacgcctgcgacggatgctggccgctgaccatcgacaaacgctcgggctccgtaacgcgcagccccatcttgtcgaaaccgggttccagcacatacttgccgatcagggcctgccatgcagcattggcgagcatggcggactgctgttcgtcgctctcctgggcgccgctctgcgccttgatctgctcgtactggttgtagtactccgaatagttgatttttttaccgttgatgacaccgacccgggggtcgttacccgagaagcccatttcggtcttcagggagagaatgaaagccaagagggcgcctgcgatgacaatcgacagcacgatgccgaacttggtgcgaagagtgtttaaacttgccatataaatcgttaattattcgtttgtttcgaattagcagtcaaaggtagtaaaatttattcggaaaaggcctttattatataaaaattcctacaatttcttgaccctcgccagctcgatacgcgaacgcgtcgtacgcagtatgcgcaactgcaggccgccgatgaaaaccgtttccccggcggtcgggatcccgtcgtaattgaagatgatgaagcccgccagcgtatcgtattccttgctttcttcgatccccagcccgtatttttcattgaggtatttcacctccagccggcaggagaggacatactcgtcctggccgacctgcttttcggtaaggtcgggtatgtcgtgttcgtcctctatctcgccgaaaatctgttcgagcacgtcctcgagcgaaatgacgcctgccgtcccgccgaactcgtcgatcaccacggcgatgttgctgcggtgcttgatgaaattctgcaacatcagctgcagcggcatggtctcgggcacgaaattgacctgcatcatcacgtcggcgatattggccgggcgcgtgaacagactcttcgaattgacataaccgacgatgttgtcgatactcttgcgccagacgaaaatacgcgaatatttcgaatcgacgaaccgcgccgtgagctgcccgatcgacgtgtcgtcgatatccaccgcctcgacatccacacgcggcaccatgcagtcgcgaacccgcaggtcggcgaaatccaacgcattctgaaaaagtttgaactcgttgtccggctcggggcgcggttccgacgtattggtatcgagcagtgccgcgaggtcgtcgcggccgaagctgtgcgacacggcccgttcctcgacacggcgccccgccaggcgcaggatgccatgcgagatgagcgtcgtgagacgggcgatcggatagagcagcaggtagaagaaatagatcaccggcgccagagcgcggtaatagaagttggggttattgcggaagatcgacttgggaaggaactccgcagcaaagatgatgatgacggtcgacacggccgtttcgatggcgaccgaaccgttgcgggcgatgctttcccaccccagcgcatagaagatgccgcgcagcagcaacgacatgtaaagcgaatagatgaccagggcaatgttgttgcccaccagtatcgtggtgatatactgcccggggtggcgggaaaaaatctccgcgatatggtcgaacatgcggctctgtttgcggtcgatctccagcttcaggcggttcttgctcgtaaaagcgatctccatgcccgaaaaaaatgccgacaacaacagcattaagataatcagtatgaccgaagtaagcatcgttcctgtttattttgggttactcccccgcttcgtccgcatgtacggcacgccggaggggctggatttcaccgaccggttcggccgggcggagctcctcctccccgtcggggcggacagctggtgctgccaaaggcggctcctcggaaagcggtgccgcaggctgcgccgcaaccggagcggcaggccggtctgtcgcagggcggggcgaatccgaagtccggccggcaggttcgggcacagccgtagaatctgattcgttaggtttgacctcgacctccatgcgccctttcatacggcggaagcgccagtccttgaactcctcgtccgactcgaaaccttcgccgatgaacacgtcgcggccgtcgttctgcacgattttcgaatcgacgttcgaatagattttcttggttcgcgcgttccagaacagctgttgcgtatagagtttcttgccgtccgatttctcgaccacgacatttccccgcgcctcccacaggtcgcgggtctcgtaatggatcgcatagttggccgtcagcacggcatcgaccgacgagagcgaatcgtccttataggtagtcatctccacccccttggggaattcgcggtaaggctcgcgcgccagcgaataaccttcgagcagcggggttttgaaatggtacgaacggcggccgttctgcgacatgacgaccgacaggttttcgctgtactcggtcatcatcatctctatccgggcctccgattcgggttcttcttcacgctcgcaagagaatagcaagatagcactccccacaacggagagtgctaccatcacgtatcttgcgataaatctgtccatcaattagcggggacgcacagtagtcgacacaccggcagccgtaccgcagttgacggtatagcgtgcgccttcctgcaactcgttaaagaagcactcctccgaagtcgggaaacggctgcggaatgcgttcatcgaggttttggcaggttcgcggtattccgaatcgctcggcagcagctcgacggccttggccatcgtgtcgtaggctgcccagaaggtagccggcccggcgaaaccttcacaatgagctgccgaaatgccgtagcactgggccagtacgaaatacggcacaccgtcctcgggattcaggtcgcgggcctgacgggcagccgatgcggcgccctggatgtcgttggaaaccaggccgaccagcgccatgcgcaccagcagcagctgacgctctgcgggatccgtctcgacggcaagcgcctcgttgaggtatttcatggccttcgtatagtcgcccttgctctggaaggcctgcgcaaggaacatcgcagtttcggacgaaggtttcaccgtatagtatttctcggcaatcgagaaatagaaatcgccgtcgcacttggcacgcgacatcagggctacggcctgcgccagcaacgcctcatcgtcgggagcagcctccagcttgccgcggaacagattttcgaggttctcgcagctggccgcgccgctcaggccgaaagccgcgtcgaactgcgacttgtaatcgccggcctcggggttcttctcgaagaacggggtcaggcggtcgtactcggcgatgatctcatcgggcatcacctcgtcggtattcttataatcctcgcagaggttcgagaaataggccaccacggtctcggggtcggtgctgtcgccaccctgcgcgattgccgcgcggaatgcctcgcggatgcccttgcggtcgttgggtttgtagcgcaggaactcgcgcgccttctggtcgaggataaaggccgtcttgccgggcttgacgttatcgccgaaatactgggcacgcatatcgtacatcagcatcagcgagtcgatgaacatgttcttctccgccacgctcttggcacggttgatcttgttcttatacacgacggcaccgcgctggtagatcgactccgcagcatcgggtatcttgtcgataagccccttgaggtagtgtgctgcggcatcgtagtcacggttgtcgcacgattctttcaggaaattactgttcagaatgttctgttcacgctcttcgggagtagcgccccatttcgcatattgcggggcactgaaatcctgagccaaagccgccgaagccaaaaacaccaaagcggcagaaagcagaaattttacgtttttcatcggtcagagattaatttttgtatttcttatacttataattgttttcgtcagttaaactacctccgtgtcggggtcgcaagttactactaattcctcggacgtgcaattttccggctcaaaaactaatcgtatttcggcctgcggaaccagtattccccgttctcggcacccgcaaagagcgagaatccgaccgagaatttgaaatactgctgccgcaccagtcccaggcgctcggaaaggttatagccgcgacgtccgtattccacgcccacgtcgatggtcgaactgccgaggaacttcacaggcacccctacacccaacgtaacggcgtattcgccgattttattgccgtcgtaggtctggttgtaggttccgtaacggaaacccgcccggtaggcccagcgtttcatgaacctgcgcacgtcgtaatagttcggcgtatactccacgcccactttcaccatgctcgtattggtataggccacttcgtatgcagatttgtccggcccgctgatcccggtcatttcggtcgccttattgccgccggtccagttctgatagacatagtcaagcccgatcgtccatttcgaggtcatataataagcccccaccgaaagctgacgcggcaaggcaagtgccaaatgggtcgtatcgcccttcacggtggagttgtacaggtcgccgatatagatccgcttggtcacatcgggattcaggttgccgccgaaatcgtacgtagcaccgaacgtcagcatgcgtttctggttcatgatagccttccagaggacaccgacctgtcctttgatgctcgaaatactgtaattatcgctgccgaccgtcgacgagaaggttccgtcgcccgtgatcggcgtcggggtcatcacgaagctgcggtcgatgtcgccccagtaatactgcgccgcgacacccaacgagaaattcttgaaaatctcccagcccaggccgaccttgacctccgtcacgtcaccctcgccctgatagacgtactgcacgcgccccacattgccccaaaccggatcgttcgggtcgaaatcctgcgtatacttggtacggtagcccaccgaactgtatggcgtgaggctgaacccgaggccgagtttcttggcgaccggcatctggaacgcgatatcgtggaaattgaacgtattataggccgtgtttttggacacattgtccaccttctgcgaattgtagtaattctgtccctcgaggccgaaactgaagaggaagctcttttgcgggatggtactgtacgctgcagggttgagcagattaattttacccggagtacccatggccaccccgacgccgcccatcgagcgcatctgcgtcgtaccgggcgtattgatctcgccgacgccgtacatcgtatagggagagaatgcgttaatactgcttgtctgggccgatacggcataaggaagcatcacggctgccgcgacaaccagcttaatcaaggtgttcttcacttgcattgtgctctaaaattctattcaatccgcaaaagaccagattacagtttgcaaatatcgtatttttaattcgtttaacaaagaattttgcgtccccgccggtaaaaattacgcacaggccgtcgatttgttcccgcatgcgcacgacataaccttcgatttcgaaggcgatcccgttcatcacgcccaactcgatggcctcttcggtcgtgagccccgagagcccttcatcctcggtcgcggcacacagcggcagcttggccgtgtaatcgtgcagcgccctgaaacgcgtcttcacccccggggagatgcagccgccccggaacgtattgtcagccgtcaccaggtcgatggtcaccgccgtaccgaaatcgacgatcagcacgttctcacccggatagagcactgtcgcgccgacggctgcggccagtctgtcgcgccccagcgtctcgggcgtaaggtatgcgttgccgatgggcacgggggtctgggaggtgaactccagcagataatccacccgcccgcggagcatcgccgccacgtcatcgacctcgccgcgcgtcgacgccaccacggcgcgccgcacgggccattcggagagcagttcttcgagcatcgacgggtgcaaccgctccgtgcaacgctgcgcgacaagttctcccctgtcgaaaaccgcgagttttaccagggtgttcccgatatctacgactaaattcaaagctgttgcagtgttttatacccgtcctcaatgtctttgacattcctaacggtcatcgccagacgattattgtgctgtttgagcacaaatctggcgggattttgcgtcaccttgcgaagcaactccataaaggtatcgcttttgtaatagggcgaattctgctcgccgacgaagtggaggatcatcagcccgttcttgaccttcacccgttcgatgccgaggcgaatcgcctcccagcgcaggcgcacgacgttgagcagttcctgcgcttcgcgcggcagggggccgaaacggtctgccagacggctctcgaaggcctgcaacgcggcttcgtccttggtcgagtcgagctcgcggtaaagtttcaggcgttcggcctgctgcgccacgtaggcatcgggcaacccggcctcgacctctatttcgatgtgcgcgtcatccacgtaatgcatctgctccacgacatcctgctcggcggcacccagacccgccacctgcaagccttcggcccgcagctcggcgatcgcctcgttcatgattttctggtaggtttcgaaaccgatgtcggcgataaacccgctctgctcggcacccagcaggttgcccgcgccgcggatgtcgagatcctgcatcgcaatgttgaaccccgaccccaggtcggagaactcctcgatcgcccgcaggcggcgccgcgcatcggacgacagcatctcctcgggcggcgagagcaggtagcagtaggctttctggttgctgcgccccacgcgcccgcgcaattgatgcaagtcgctcaggccgaagttctgggcattgtcgacgatgatcgtattggcattggggatgtcgatgccgttctcgatgatcgtggtcgagacgagcacgtcgaactccccgtagataaaatccatgatcagtttttcgagcttctcggccggcatcttgccgtgtccgacggccacgcgggccttggggcatacgcgcgtgataagcccttggatggacatcaggtcttcgacgcggttatggacgaaatagacctggccaccgcgtgcgagctcggcctcgacggcgtcgcggatgatctcctcggagaagacatgcgactcggtgacgatcggctggcggttgggcggcggggtcgagatgaccgacaggtcgcgcgagcccatgagcgaaaattgcagcgtgcgcgggatcggcgtcgccgtcagggtcagcgtatcgacgttgacggccatctgcgtgagtttctccttggccgcgacgccgaacttctgttcctcatcgatgatcagcagccccaggtcacggaatttgatctgcttgcccagtatcttatgggtaccgatcaggatgtcgatacgccccgattcgaggtcggcacgtatctgccccgcctccttggcggtcttggtgcggttgagatactcgacccgcacggggaaatcgcgcaggcgctccgagaaggagcggtagtgttgcagggcgaggatcgtcgtcggcaccagcaccgctacctgcttgccgtccacggcagccttgaacgccgcgcggatcgccacctcggtcttgccgaagcccacgtcgccgcagaccagcctgtccatcggctggtcggactccatgtccttcttgacggccgcgacggtcgtctgctggtcgggggtgtcctcccactggaacgacgcctccagctcgtgctgcaggtaactgtcgggtgtgaatgcgaaccctttgctggccttgcgcttggcatagagggcgatcagctcgcgcgagatatccttgacggccttcttggcggcgttcttgagtttctgccatgccccgttgccgagtttatagaccttcggaggctcgccgtcgccggacttgtaacgcgaaatgcggtggagcgaatggacgtttacgaacaacacgtcgccgtccttgtataccagcttgatagcctcgtgcaccttgccgttctcgttgatcttcaccagcccgtcgaaacgccccacgccgtggtcgatatgcaccacatagtcacccgggcggagctggttcagttcggcgacggtcatctgctcgtcgcgccggatctcgccgttgatgcggtagcgctggtaacggtcgaaaatctggtggtcggtatagaggcacagtttcaggtcgttgtccacgaacccctcgtgcaacgtaacggagagcgaccgcacggcggcctgcccgcgccctatctggtggaagatgttttcgaggcgttcgacctgcaccttgttctccgagaggatgtaggtcgcatagccccgcagcgaattgcggatcatgtcgtcggccagcatctcgaaattcttgttgaacttgggctgcggggccgtgtcgaacaccacggccgccgtggcggggcgttccggcaggttgtcgcgcagcgccaccacgctgttgccggccatgtcgcgcaacagcacgttgcggctggtcagcaggcggtcgatctgcccgggctcctccatgtccgcgagcaccttgcggcgcaggtcgttgacacggcgcagcacgtagtcggcatcgtagaaccagcaggttgccgaagaacccgcgaactgcacgaacgacacccggggtgcctcgccggcattgaggttggggacgatttctacccggtcgagcttgtcggccgaaagctggctcgaaatattgaaacggcggatcgagtcgacctcgtcgccgaaaaagtcgatccggtaaggcttgctttccgaataggaaaagacatcgacgatacctccgcgcacggagtactgccccggttcgtagacgaaatcaacacgcgtgaagttcgcatccgcaagggcatcttccagcacggcgatcgaaatcttgtcgccgagcttcacggcaatcgtgtcgcgctgcaacgtcgcggcgtcgacgacccgttcggccagcgcttcgggataggtgcagaccaccaggtatcccttcgtaaagccccgcacggcgttcatcgccgtggtgcgctgcactacgccctgggcatcctcggcgccgtaggccgccgaacgcttgtaggacgacgggaagaaatagacctgcttctcgtccagcagattgtaaaaatcgttcagcaggtaggccgcggcatcccggtcttcggccacgaagatatgcacgcctcccgttttcgccactgccgccgccgcataaaacgaaagagcaccgccgaccagctctttcaggcggacggttgcgcgctccttcttatattcgcggcacaacttcggcagggccttcgacccggcggcgaactgcgccagctgctcgctggcagtcatagtgttacttgttaatcaggtcgttatccttgtcgtcgtggtaatgcacctcgacgatgccgaggctctggtcttcgacgacacgcaggcggagtttgtatttccactcccagcggcggcgcagcgaccagatgcccttccgcaggaaagcagccacataggggctgaccaccagcttgatatacttgtgtccccgatcttgcgtgaggaacgatatctggttctcgatcttcttgtccagcagtaccgtaggctcgatcttgcccgtgccgttgcaggtcgggcagacgtccgaaacctcctccacggccacgggacgcacccgctggcgggtgatctgcatcagcccgaacttggtgagcggcagcaccgtatgcttggccttgtcggtggacatcagcttgaccatctcgtcgaagagcgcctgtttgttctgcgccttgtgcaggtcgatgaaatcgatgatgacaatgccccccaaatcgcgcaggcgcagctggcgggcgatctccttcgcggccgccaggttgacgtccatggcggtctgctcctggttgtcctcggccttggtgcggttgcccgaattgacgtcgatgacgttcatcgcctcggtgtgttcgatgatcaagtaggcgccgcggcgcagcgagacgtacttggcgaagagcgacttgatctgcttcgagatgtcgaagttgtcgaagatagggacgttgccccggtaaagcttgacgatcttctccttctcgggctcgatcaggcggatgtaattgcggatgtcgttgtacatcgcctcgtcgtcgacggcgatctgcgaaaacgagccgttgagcgaatcgcggatgatcgtattggcgcggttcatctcgctcatcagctgcgcgggcggcgtactcttcttgatcgcggcgcaggtcttgcgccagcggtcgatctgcgactggatgtcgtgctcgatgtcctcgtccttggcctccatggccgccgtgcggatgatgaccccgaaattcttggggagcaccgcagccgcgatgcgcttcaggcgtttcttctcgtccgccgagcggatcttctgcgaaaggaacaccttggacgaaaagggcaccagcacgacgttgcggccggccagcgaaatgtcggaggtcaggcggggccccttggtcgaaatggcctccttggcgatctgcaccatgatgttctgcccgacctgaagatagtcgccgatcttgcccgtcttttcgacgggcggctcgagcttcatgccctcgacgcgcattccccgcttgccgggctgctgcgaagcgaccagcttctgcaacgagggaaactggcttcccaggtcgaggtagtggataaaagcgtccttttcgtgcccgatgtttacgaaggctgcattgagcccgggcattatcttgcgtactttcccgaggtagatatctcctacggaaaaacccgtctggcactgctccttgttgagttcgacaagcaccttgtcctcacacagcgcaatggagatttctgtcgggttgacgttaacgattaattctctgttcatctatatcgtgtgtcgcaccccggaaacggggttgcggaatactgaaaccggttaggccgcattttggtctgaagtggcggcgaactccaaaggaaaatattgtccgggccatcggccggcaacatggcgggtaaggaaataccctggtttatttcggcggcactgtgtcgcaatgcccctgcgggggggggctcataacttgcgttgcaagagggcctgacgtccgcaaacggcgatccgggaacctgcattccccccggggatacgggccccggccgcaaaaaaccgcagaaaataggtaaagctaaaagaacccggggctcctttagctttatctatcgtttagcactaaggtgctaccctactttttcttgtggcggttcttgcgcagacgttttttacgcttgtgggtagccatcttgtgacgcttatgcttctttccgtttggcatagtccttaaattttagaggttctttatttattgaattatttcaccttcgcagcgaagctcttggcgggcttgaaagcggggatgttatgttccggaatggtgatggtcgtgttcttcgagatgttgcgtgcgactttctttgcacgtttcttcacgatgaagctgccgaagccgcggagatacacgttgttcttgttggtcagagaggtcttgatgctatccatgaaagcttcgacgattgcctgaacctgcaccttctcaacgccggtgctcttagcgatttcgcttacgatatctgcctttgtcatagtttatatagtattaaattattaagttcgtgtgaagacattcggactgcaaatatacgctttatttacattttagccaataaaccgcaactttttttcattatttttccggcagtcccctaccagccactagaacaagaggataacaaatatcgggcaaaactcggcggaaaattaaaatattatgtgccaggcaattatatccggacggcacaccggagcgagccgcacggaataatcgctcataatcaatacattagccacaaacccgccgaaacgggaggagccttttccgggcatcattgcgcccgaagagtcccggcacggccaaccccctcccggatgccggtgcggctgcccgcccgcgcccgccggcatccggcatgcagccctccacacgggcagcagaggggacggcatcctcgccccgcccgggttcgagcaccgattcccggggaagggctctccggcacgccgctgcaagccgtcccggaggcgatttacgccccggaaccgcggataatatcccgccgacccaataaacgcccggtttttgcgtttgataataaaataactaattttgcgaactaaaatccgataaccgtatggtcaaaatactctgggtggacgacgaggtcgaactcttgaagccccacgtcctgttcctcaaacagaaaggctacgaagtcgacacctgcaacaacggctacgacgcgatcgacatggcggccgaaggcgcctacgacctgataatcctcgacgagatgatgcccggcatgacggggctcgagaccctccccaagatcaaggaggtgcgccccacgacgcccgtcatcatggtgaccaagagcgaggaggagaacatcatggacaaggccgtcggctcgaagatcgccgactacctcatcaaacccgtcaaccccaatcaggtgctgctctcgatcaagaagaacgtgcaccagcagcagctcgtcaccgagcagaccacggccgactaccggtcggaattcgggcgtatctcctcgtcgctgcagatggccgagaccttttcggactggtgctcgctctaccgcaagctcaccaactgggaggtcgagctttcggaatccaccgaccagggcatcaaggaggtgctcacctaccagaagaccgaggcgaaccaggaattctgcaagttcgtacgccgtaactactacaactggatcaacaagcgctcggacgacacccccgtgatgtcacacacgctcatgcgcaccaacatcttcccggtggcggacgagaacccgaagaccacgctgctgctgatcgacaacttccgctacgaccagtggcggtcgatctcctcgctgttgcggggctactacgacgtggcgctcgacgatttctactgcgccatcctccccacggcgacgcaatacgcccgcaacgccgtcttcgccggcctgatgccgctggccatcgacaagctgatgcccaacaaatggctcaacgacaacgaggaaggcggcaagaaccagtacgaggaggagttcctcaagcggctgatggcccagaacgggaagaactggaaattctcgttcgacaagctcgtgcgccccgaacagggccgcaggctggtcgacaatatacaaaaagtgtacgacgccgatttctcggtgatcatctacaacttcctcgacatcctctcgcacgcccgtaccgagaccgacatcatccgcgagctgaccgaggacgacgcggcattccggtcgctgacgcgctcgtggttcgagcactccgacctctacaccatcctcaagctcctctcggagcgggggcacacggtcgtgatcacctccgaccacggcaccatccgcgtggacaaccccgtcaaggtgacgggcgaccgcgagacctcggccaacctgcgctacaagacgggacgcaacctggcctacaactcgcgcgacgtctacgagatcctgaaacccgaggacgtacagctgccgtcgagcaacctcacgtcgagctatatcttcgcctacaattcggattttctggtctacaacaacgatgcgaaccgccacatccgctattaccgcaacacgttccagcacggcggcatctcgatggaagaaatgatcgtgccttatatcgtcttaaaacccaagcagtaatatgaaaacgatccacatcacctcgcaggacgaactgccggacgtcgccgaggcggtcatcgaagcgctcggccgccgcacggtagtcgcactgcgcggagaaatgggcgcgggcaaaaccacgctgatccgcgagatcgcagcccaactgggcgccacggacaccgtaaccagtcctacgttcgccatcgtgaaccagtacaagggcaagggaaaccgccgtatccatcatttcgatttctaccggatcaacgacatccgcgaagcctatgatttcggttacgaagagtatttcttctcgggcgacctctgtctggtcgaatggcccgaaaagatcgagcagctcctgcccgagaacgtgatgacggtgcgcatcaccgtcgacagcgacacggcacgcacgttcgaaatcgactgaagcccggccaacgccccgcgacactacgaccatggcagacggtttccgcatcgcattctgcatcgaatgccataaatacacccctgtcctgcaggagttgtgccggcagttgcagcaccccgaagcggatattttcatccatgtcgatgcgaaatccgacatcagggattttgcgccgctgcgtcccctggcacgtttcatccacccgcgcagcaaggtgtactggggcgagtacggccagatcgactgcatgctcaaactgctccgggccacctgtaacggcgactaccgctacatcgccattctctcgggcgacaccctgccgttacgcccctgcgggcagatacacgatttcctcgaagcgtgctacccgcggcagttcgcggacatgcagcccgaactgcacatcaccgagctgacgcagaagatgcagtggtgccactaccccgacaggaacgattggatcgggcacctgccgggctatttccgcaaaaggctctacaaacggctgcgccccggggacaacccctatttcaggacattgccgccgctcgaaaagggttccaactggatcgtcgtcaccgaccgcttccgggattttgtgttcgattatctgcgcacccaccccgattatatccgcgcattcagacactcgcactgcggcgacgagatctttttccagaccctgatgggcatttccgaattcgccggtgcgaatacgcgccgtcccctcgtcttcacccgatgggtcggagaaggggcgccccatccggaaacattcggcaccgacgacctgccccggctgctgcaggcacgggacacggcggcggaagttccgtacctcttcgcccgcaagatcgccgacgacctggacatcgcccgctaccgggcggccttctttccccggccggaatagcgccggttttgcgcgtcatgcaaaaaaacgctatctttgcagcgcccgaaaccgcatccgatttctgaaacacatttcatacaagttttacacacgcaatgcaagaatatatctccaagcaacaacaggttttgcgtcccgcggaacagatttacgcggtcatcagccgtttcgacaacctcacgcccgcccttgccgacaaggtcgaggagtggcaggctaccgaggacagttgttcgttcaaggccaaaggcttcaccgtgaaactccgcatggaggagcgcaagccgggcaaatacgtcaaggtcgtcggcgacgacgggggcgtaccgatggatttcgcattctggatccagttgcaggaagtctccgccgcggacacccgcctgcggctggtgctgcgcatcgacctgaacatgatgatgaagatgatgatcggcaacaagctgcagggggcgctggatcagatcgccgaggggatcgcccgggcgatgaacgccgccccgcaggtctgaacggacggcaaacaaagtccggcacagcccctgcaaatcgggcacggctccgcagacacgatgccccggggcgatgattccgggcggaggagggatgtttgcggcacaggcctgggaacacgcagccaaaggcggtatgacgccgtgccgcaggctcaggcaaggatcacgcaagcattcgtcggcgcgacgcgcacacgaaaacctaataaacgcacgcgattatgaaaccgacaagctatctatcagcccttttccggccttcggcgcttcccgccggagagcgcccgccgtgcgacttcaacctgatcagccgctatttctacaactgcccggcggaggacgccagccatacgatcgacgccgaaaccacggccgacctcgacctcaacgccgtattcgagcgcatcgaccgcacgacctcgaaagtcgggcagcaatgcctttatgcccgcatacgcacgctccggggacaggaggatgccgaggctttcggccgcagcacggactgtttctcccgcaacggggaacttgcggccagctgcaccgaatccctctcccggctcaccgacgaggatgcctacgggctgcaaaacctgattttcgacacaccggccaaagtccgttatttcgcctgggtatacccgctcaccctgctcgccgtggcgacgctgctcgccgccccgttctacccgctgtcgctgctgctgttcatggcggtcttcgccgtgaacctctatatccattacagcaacaagctcaatgtctcgctctacggctcggccgtaaaacaactttcgctggcattgcgcacagcccgggaactggctgtcgaagaggtgcccggcacggaggaggccaccggacaaatccggcaggtcgccgaggtcgaacgccgcagccgcgtggtcgggacgcagggcgactccgcaaacgagctggccgccatcgcatggcttttcatcgaactggccaaagtcgccttcaatatcgaggtgatcctcttccagcgctttatcggcagcatcacggcccggcgcgatgcgatccacggcatgttccgcttcatcggggagaccgatgccgcactctccgtcgcacgcctgcgcagcgaaacccagacctgccgccctcagttcgtcgacgggaaatacctcatggccgagcaggtcgtacatccgctcatcgacggctgcgtgcccaatacgctcgtcctcgacggcacggggctgctgctcaccggctccaacatgtcgggcaagacgaccttcatccgcacgctggtgctcaacgccctgacggccgagaccctcgacatatgcttcgccggctcctatacggccccgtacatgcggctgctgagctcgatccgcatttcggacgacatcgccgaaggcacgagctactacctgcaggaggtgctgaccgtcaaacgcttcctcgaagcggcacaggattccgccccctgcctgttcgccctcgacgaactgttcaaggggacgaacacgaccgaacgcatcgccgccgggaaagccgtcctctcacacctcaaccgcggcccgcacatcgtgctggtatcgacgcacgacatcgagctggcggagttgctcgacagcgacggctacgaactgcaccacttccgcgaagaggtggtcgacgggcagctggtcttcgactaccagctgcacacggggccgctgacgacccgcaacgcaatccgcatcctggaactgtacgactatccgcccgaactgatcgccgaagcctatgcggtgcaggaacggctgctgaaaaaaccggaatgacggccaaaccacgagcaggagcgccggccagcaacgtcggcgaataccacccctcgcgggtcaacgtcggcggacaggaaatcgaaatttcccgcaaatacaaggacaccgcacggctgcggttcgagtcccctgcgggcgaataacgccccgcaacccgcaaacgggaataattgccaatacatccggcagtgcggccatttccccgacggcataaaaccccgatatttgcattacgggaacaatgagccggggaaggccacatgccaccgggaaacttaaaacagagaaagttatgaaacaatatgatgccgtcatcatcggcttcggcaaagcgggcaagaccctcgccgccgaactggccgcacacgattggagcgtcgcgatggtcgaacgctcggacaaaatgtacgggggaacctgtatcaacatcggctgcataccgaccaaagccctgatccacagtgccgggctcgcagccgcagggcacacgctgaccttcgggcagcggcgggactattacagggagtccgtcgcttcgaaaacggcgctggtcgacctgttgcgggacaagaattaccataaactggccgacaacgcccgcatcgacgtctacacgggcgaaggcagtttcgcctcaccgaaagccgtcgccgtgaaaaccacccaaggtacacagcagatcggcggcaaatacatcgtcatcaacaccggcgccgagacggtaatcccgcccattgaaggcatcgcgcagagcaggcgggtctataccagcacctcgatcatggagctcgaagagctgccgcagcacctggtaatcgtgggcggcggatacatcgggctggaattcgcctcgatgtacgcctcattcggatcgaaagtcaccgtgctcgaagggtttgcggagctgatcccgcgcgaagaccgcgacattgcggccgccgtacgggaagcgctggaaaaaaagggcatcgaattccgcatgggcgcacgggtcgaatcggtgagcgacaccgccgggggcgtcagggtcgccgtggccgacacacaggcaggcggaaaatacgaaatcgacggggacaccgtgctgctcgccacgggacgccgccccgccaccgcagggctgaacctcgcggccgccgggatcgaaaccgacgaccggggtgccgtcagggtcgacgcacacctgcgcacgacggctccccgtgtcttcgccgcaggcgacgtgacgggcgggctgcaattcacctatgtttcgctggacgacttccggatcatacgcgacgtgctgctgggcgacggagcccgcaccacggccaaccggggccccgtcccctattcggtcttcatcgaaccgacgctctcgcatgtgggcatgcacgaagaggaggcacgcaaggccgggcgcgacatccgcgtcaacaggatcgccgtcacggcattcccgcgttcgcggatactgggttcgacggagggtgtgctcaaagccgtcatcgacgccaagaccgacgagatactgggatgcacgctcttcggcgccgaatcgggcgaagtcatcaacaccgtcgccacagccatgaagcacggcgtcacggcacacgagctgagcaattcgatctacacccacccgagcatgagcgaatcgctcaacgacctgttcgcctgacggaaaccgggatggggctccgccgggcatcaccggataagtatcagggaaaagatctggggaaggtcaggggaaggctccgaagagaaagccacgggggagggcgggaaaacccaccggttacgccggccagaaaagacagccggaacgccccggtgtccccccaacccctatgatcgccgccgcgctactttcccatcgccgccgccacgcagcggatcgtcgggaaagcatcccgcaggttgcgggcgacctccgcgggcgtacaccacgacgcccgctcgatcccctcttcgagctggggcacaagccggtcacaggacgccgtgtgaagctcgtaccagtgggtgcgtttcagctcccagcgttcggtcttggggaaataataggcatgcagcgtatcgcacaggggtcgcaccaccccggcgcggacacccgtctcctcctcgatctcgcgggccgcgcactcctcgatccgctcgccgcattcgaggtgccccttgggcaagtcccagcggccgttgcggcggatcatcagccattggccgcaatcgttgaccaccacgccgcccgccgcctctataagcgcgaactccgcggcaaaggccccgaacgccgccccgggatcgggcgtgacgacagccgccttgttgtacgattcgagaattttcgttaccttcgctcgtgatatgccgccgtccggtgcgggcgtcacggcataccagtcctcgccaggggtcttcgcagtgaaaaccacggctttatctgcaaaatatacggtatagtccatgctggctcgatttgaacgcgaaaatacgaataatatagaagaaaccccgaccaaaatgaaaaaattactcctttttatggctattgcagctgtgggactgggcgcatgcgacgacaggcgcccgcaaccacttacgatcgacaacgccctgacggccgacgaaatcgccgcaggcaggctcacccccgaggtgatgtggaaaatgagccgtgcaggctcctcgtcgctctcacccgacggcaagacgctcctctatgcgcagaccgactacaacatggcccagaaccgcggcgtgacgaccctctgggtgcaggatatggcatcgggcgccgtaacgcggctcaccgacacggcctcgaacaacgccgcccccgagtggagctccgacgggcggaaaatctatttcctgtcggatcgcagcggctcgatgcaggtatggcggatgaacgccgctggcggcgacgcgacccagataacgggcagcggcgggggcgagggtgtccccgacgtcgaaggattcggtgtcagccccaatgaaaaacacatctggtgggtacaggccgtgcagacggcgcggcgcaaatcgtcggacgtatacgaggacatggacaagtcgaaggcccgcatctatgacgacctgatggcccgccactgggactactgggacgaaggctcctaccgccatatcttcatcggcgaactgggcaagggcctcgtgacgggaggcacggacatcatgcccgatgcacagtgggacgccccgctggcgccctatttcgacatggccgaaatcgcctggaacaacgcaggcacgatgctggcctatacctgtaagccgctcaccggcaccgaatacgccgtttcgaccgactcggacatcttcgtctatgtgctcgaaagcggcgtgacgcagaacatctgcaagccggtcaatgtcaataccggggagcccgtcgcaagcgacaaggccgtcatggccggttacgacaaataccccgtatggtcgcccgacgacacgaaaatcgccttcctttcacagcgtcgcgcaggcaacgagtcggacaaggcacgcctgttcctctacgactgccggacgggtgagatgcaggatctgacggaggatttcgactacaacgccatgaacgtcgtctgggagggcaacgaccgcatctggttcatcgcgccgatcgaggcgacgcaccagctctgccgcatctccccctcggtaggcgaggtcgaggtggtaacccgcggcgaccacgacatcaacgccttctcgatggccggcgataggatcgtcgccgaaatgtgcacgatctcgatggccaccgagttcttcggcgtcgaccccgccgacggcacgctgacgcagctttcggccatcaacaaaccgatttacgacaacatcaggatgggcgaggtgcagaaacgctgggtcaagaccaccgacggcaagcagatgctgacgtgggtgatcctgccgcccgatttcgacccggacaagaagtaccccatcctgctttactgccagggcggcccgcaaagcgtcgtgtcgcagttctggagctaccgctggaatttccagctgatggccgcgcagggctacgtcgtcgtggcgcccaaccgccgcggcctgccctcgttcgggcaggagtggctcgaccagatatcgggcgactacgcggggcagaacatccgcgactacctctcggccatcgacgacgtggccggggagccgtgggccgacgaaacccgcatgggctgcgtcggggcatcgtacggcggttactcggtattcttcctggccggctgccacgaaaagcgtttcaaggcgttcatcgcccactgcggcatcttcaacttcgagtcgatgtacggtgagaccgaagagctgttcttcatcaacaacgactacggaggcccctactgggatcggtcgaaccaggtcgcacagcgctcctacgccaattcgccgcacaaattcgtcggcaaatgggacacgccgatcctgatcttcacgggcgagtacgatttccgcatcccctacacgcagtcgctcgaagccttcacggcagcccgcgtgcgcggcatcccggcgcggctggtggaattcgaaaacgaggcgcaccaggtcttcagaccccagaactcgctcgtctggaaccgcgaattcttcggctggctcgacaaatacgtgaaataacagacaggggcaccctcgtcacaaggccatccggatttcccggatggccttttttgtccaccgtacatacttttacgtttttcatcttatcatttcagtccggccgccatccctcaaatcgactgattcattggaaaaatcctccggttcattgaatttattttcatttacggctacgcgaatctacttttgttacgtaactttaaactattgcatatcatgggaattgaattagccaaacaagggggggggaagtactctgtccctaccatcgaagtaatcgagattacgactgaaaaggggtttgccacatcaaatccaagcgggcctgttagtccgatgtcctatgacgacagcttcatgagcgaatccaacgaagcctaacaccgcagcgccatgaaaaaaattcttaaaccgctcttctgtgcagccgccctcgtatcgctggccggctgcaacaagttcgacgaggcgaatgccactccggaaaccagcaacggttcgcttattaaagtctatgccaatgtcgccgaaaacgacggcacccgcgccaacatcaatgtcggcgaaagcgtcttcacggccgaatgggaagccggcgacgccctgggcatcctgccggtcaaaaccggcggcacggcacccgccacagccgctaagttcgactacaacaccgcctcggccgcattcgaaggttcgctcaacgatttcgtagcgggcggcggcaattactatgcgttcttcccccacgcgcaggtcacaggtaccacggccaacctcccgttcgggaacctgcgtacgcagacgggcaacgatttcaacagcgcctacgacgcgctggtcgctactccccaggcatacggcgcagccgacgaggcgggcaaagtggacggcaaccccgtagctttcacgctgcaccgcctcacgtcgatcctcgatttctccatcgccacgcaggccgacaaggtgaaatacctgctgctgaccgccggcggggaaacccaaaagctttcggcctcgagcctcgatttcgccctcgagaacggaggtgccgaaacggctgccaccctcagcacaaccgaccagtcgaacgtcatcgcactgcaatacacgcccgatggggcgagcgccgacaaggtcgaagccttcttcaacgtcccggccgacctctaccccacgctgacgctcgacgtaatcggctccgacaaccagatggctacggtcacggtcaaccgcaccgaagccttcaaagccggaacgctctatacgaaagcggtctccgacctgcagttcgcccccatcgacgccccgtcgctcgtatggccgggggaagacggaaaggaaatcggcgatgtacatgacctgactaccgatgaaagcggaacgagcctcaattattctgcggccgtcgacatcgtggttccgggcggtatcgccggactgaaagtcgatatcgaatcaccggccctgaatgcgataggtattacgacactgaatattttcaacgaaacagcaatccccggcttaggtatttcatacgaagatctgggattgagttgcggtgcgcaagtccaatatcaaaaaacttgcgtattcaatatcaccaacctcgttccgatgattctcgtactcgaacagatgggtatcgacgccagtttgatttattgtcaacatacgttcaacgtcacggtcaccgaccttgccggccaatccacgacccaaccgctgattttcgatgcatccaaagtcactttggcatccgcagacctttgggccaacacggcaacactcgccctaaagagcattccctccaatgcaacgtctgtcagcgtacagtacaaaaaatcgacagaaacgacttggcaggatgcaacagtcagcaatgacaaaacaatggcaacaattgcccctgaatggagtgaagccagcccttaccaaattaatcccgacaaaggcgtatttgcagcgactacttacgattacaaattagacatcgacggcactgaattcaccggacaatttactactgccccgggaatgactatcgccaatggaaatatggacacttggtattccaaagataacggatggtacccacattcagacgcgtccacaggtaatctatgggctactggtaacccgggaacatgtacaatcacagacaataataccggtaaccgagttaatctcacaagccccattgataatggctcaggaaaagccgcatatttaaaatcacaatacattaacggtaaagtgagcataatacccgtgaaaaaattcggggctggtaatttattcgttggcgatttcggcggcatcgtaatcacaggtaatcaaggtgcaaaagttaaattcggaaaagaatacgaatttacagcccggccaaccggccttaaactgaaatacaaaaacacagtcgggaatatcaattatatcggcagtaaaaccggcgtttcagaatcagacattgataaagcccgcattttcgtctgcttgtgcaactggtcagggcagcacaccgtcgatacgaccaaagaagcgacctatttcgacccgactgacccaaacaagcaggccagcgaaggagaggtcatcggttacggcgacctgcaaatcggcgaaacccatacagactggactgaagttacgattccgattgtctacaatgataagataaataaacctggatacaataaaaaatcttatctggtcatctcttgcgcagccagcatttacggggattatctctgtggaagcacgagcaacgatttgactgtcgacgatttcgagtgggtatactaatttcccatcaataacaacccgaaggccgccaaaggcctttatccccgacctccctgcgattgcagggaggttttttcttgcggggagggactgccacggcaggccgtcgcgcaaccgacggacaagcgacacagccggccatcgggtgcatcgagtgttgtgaaaggcgaaaacgagatacgggcatgctcgccggacagggtgttcgtgatgaaaaaccgggcattcgttgaatttatttccaagatacgcgccgcatggctatttttgcacattgccaataaaaaactcgtacccatgcgcataaaatcccggacatccggcctcatgcaaacgcctcgggagatttcacataccggtaatccgaccggcggcacaacggcatatcccgccgtactcccggcagcgcacgaggcaaccgagaattccgataacatcttttaccgaacgatccggactgttatgaaaaaacaacttatatgtctattggcatcggcgtgcctgctggccgccggatgctccacggaaaacaagacggacgagacggggtacggcaccctggccatcaattgcacggccgacacgtcgatcgacacggcttcggccgaggcttcaggcacgcccgaagcacctgcagccggggctttctcgctcacggtaacgggcgaaacgggcacacagaaatgggatacgctcaccgagttcgagcagagccaaaccgtcttccggatgggcgcctacaccgtcgcgatcgcccacggcgaccccgatgcggaaggagccggcaaaccttactattatgccgaacaaaagatcgaagtgctgccccggcgcacggtaaatgcagatctgaccgccacggtggccaattcgcaggtggtaatccgcgccacggagcagttcctcgcctatttccacgacgccaggttcaccgtgacgacggcctcgggcaatgaattcgccttcacgcccggcagcgaccctgccgacgaaccggtgttcgtcaagggcggcacgcggctcacggtgaccggcacggcacgccgccaaagcccgacgggcacgggggaaggccccgaggtgactttctccgcccagacgctcgacgccacgacgccgcgcacctgccacatcatcacctacgatgcaaaaaacgcgggcagcgccacgctgaccatcacactcggcgacagttacactgatacccggacgctcgactgcgaggtcaacgagggagccatcgacgataccgaaaagaaataaaaacagggaaagatatgaaaacatttaccaaatttctcacgatgttagcggttgcggcactcttcgcaaccggctgtgtaaacgaagagcccccgtacaaggaggatccgaaccccgagcccgccgggatgaccggctatctgtcgatcggcaacctctcgatgacggtcgtctacgacgaaaccgaaatccgtcccgacgacacgtcggacgagacgcaggccgcacgcatcgcatccgggacgcgcgccacggctcccgacgtggacagctttatcgtggagatcctcgacgccgacaacgcgcaggtactcgaaatgacctatgccgagctgaaggagcagctcaagacgccgatggaactgaaggtgggcgtctaccgcatggaagtccgttcggaagacacgatgcccggcgcggactgggaacaccccgtctacggtgcgacgagcgactttacgatcaccaaggcacagacgacctcgcccgaagaggtggtctgcaccctgcagaacatcaaggtctcggtggaatattcgcccgagctggccgatatgctggccgacaccagcaaggccaccgtatcgctgggcgataccagcctggatttctccaaaaccgaaacccgggcggcctatttcaaaccgctggcactggaaaacaccctggacttcgtattcgacggcactttcgccgacaccgatgtccccgctaaattcagcaagcagatcaccggggtcaaggccgggcaatggcgcaaggtttcggtcgtaatcggctacgccgacaagggcaacatcctcttctcggtcaaagtcgacaacagcatcctccaggacaacaagttcgtcgtcgacggtacggaaaacctcggggaagagctcctcgaagaccccaacgccccggcgctcacctggcccgggcacgacatgacacagcccttcacgctaaccgacgccatgttcgacgcggaagggaactgctctgcgccctcgacgcatcttcggcggcagggattatcctcaagggcttcggctaccccgtaggcagcgaactcaaaggacagacggccaagagtttcaacatcgcagggcagatcagggcgctctatgaattcgacggtacgcacaccttcgccttcacgatgaccgacgccaaaggctccataaccggcaccacgcttacgctcgtcgtcgacaaaagttcgggggagacgggcccccggatcacgtggcgcggctacgacatcgaccagcaatacgaagtgcagaaggacatggtgatcgacatcgacatcgaggccgacaaaggcatcaagtcgttcttcgtgacgatcgactccgaaacgctgagaccgctgttgccggtgatcaacctgccggagaaattcgacatctgcgacatccccgacgaactggtcgaagtcctgcacggcgaattcgggttcccgatcaacgagcaggtaaagaaccagacgtcggtgaccttctcgatcaccaaattcgtcgagatactgctggaaatcccgggcgagcataattttgtcctcgacgtgacggacaacgataatgtactgacacacaaaactgtcaaactcatcgtccactaaagccgacctataatgaaacgatatatctcatattttgccgtactgctcgcggtgctcctcggcgcggcctgctcgaaagacgactccgtcgcgggcagcgacaatcgcacgggcgtcatggcgatgacggtctcgacccggcagacagccgacaccggcgaatacgacccgttgcagcaccagaccgtctacatctacaacgacgaggacggcctgctgcgcaaatacacctcgaaagaggcctgtcccgaacggctggaactgttggccggcacttatcgcgtagcggtcgaagccggagaggaagtccccgccgatttcacgaaacggttatacaagggcgaggagaagttcaccgtcaaacccggcgaaaccacaaacgttacggtcgtctgccagatcgtgaacaccgtcgtagaggtgaaattcgacgatacgatcgccgagaacctcgcccccggctattccgtatggatcgccggcggggaaaaggtcgacgaggaagccgccgaagcgggcagcgtcccggcgctcaggttcacggccgaagggacgggttactacaccctgcccgcaggcatgacgtcgctggcctggctcttccgcggaacgcatgtcgagggtaagaacgtggaaatggaagattacatccccaatgtcaaagccggcggcaagtataccctcacgttcaaatattcgcccgatctgcccggttatatcgactgcgtgctgatcagcgtcgaccccgataccgacgacaaggacgacgaaatcatcttcagccccgatccggccgtcatcagcgaagggttcgacatcgccgaaatccagaaatacgtttccggggagaagaaataccggatcctggccttctcggaactgacccggttcacggtttcggtaggcgacaagagctacgacgcgctcaacggcacgaccgagggcatcaccctcgaaccggtcgacaaatacaacgtccggctgacgctctccgatgcgttcttcgcttcgtgccaggccggcgaccaggaggtgacgttccgcatcgaggacgccaacggcggttcctcggaggtcgcaacgacctaccgcctggagggactggttcccgtaacggcggacgactacgacctgtgggccaatacggtcacgctgcgcgtggtttcgttcacgcccggcaccaccgtgcaattcggcctgcgcagcagcggcggcgaatggcagccgatggccgggacgtcgcagggcgacgatttcatcacggcgacctatgcgccccagtgggaagagaaaaccacggcggactggagcactccggccacggtactgccctattcgcgtctcaaaaagggcaccggcatatcggcaggcaatacgtacgactacaaagcgacggtcggctcgaaggaactcagcggccggttcacggccgctgagggcacacccatgcccgacggaagcctggaatcgtggagaaacgcccagcaattcccgggttccggcaccaactataccttctggggcagcggctacaacgcgttcgccaaggaactctgtacccgtgacgaggcgatgccgggacgcgtcgggacatactgtgccaaactgtccgcgacatataatacgctggccaaggttcccgcaccgggcaacctattcacgggagacttcgccatccaggttctcggcgggatgggcggcaacgtctctttcggcaaaaagttcgcttacaacgcccgcccgagagccgtcaggttcaaataccacgctacgatcggggaagtcaactacaatctccacggcgggaaaattcccgtcggcgaaatggacaaggcccggatattcgtctgcatcgtggactggacggcccaacagaaagtatttgccgggacaaaagccccgacgggcacctgggatccggagacacaaaccgaagcggccaacggccccatcatcgggtatgcctccaaattcatcgaagaaacgacccagggcgatgaaatggtagaagttatattgccgataaactattaccaggacacggccgccgctcccgatgggaagtacaatatcgtcgtatcctgttccaccagtgcatacggggattacatggatgcctgcaccaccaacgtgatgtacgtcgacgatttcgaatgggtatattaacgattaaacgtaaacgcacgacaatgcgcaagataaccaccagtacgctcctggcactcctgctcctggcaggcacggcgccggagagccgtgcacaacagacgaacgccgcggcgtccctcgccccgcaggccgacagcacgagctgcatgcagcacgaggaacgtcctcagaccgtcaacgaaatgcggcgccagcgcggcctgaccgacaaacacaacctcttcgtcccgcgcgggcaatggatcttcggagggacggcctcctactcgacccactcgaacgatacgtacaggttcctggtcatcgagggcatcgaatcgaagggctacacgttcaaggtcagcccgatgatcgcctatgccttccgcgacaacatggcactcggaggccgtttcatctattcgcgctcgctgctcaagctggacaaggccgacctcaacttgggcggcgaggactccgacctgaatttcgagctgaacgactgctattcgctgcaacagagctattcggtggccatgatctggcgccagtacatcccgctgggccgcaacaagcgtttcgcactcttcaacgagatgcagctctcgggcggcggtacgcaggcacgctttgccaaggactccccggtgaagggcacctaccagacgggctataccttctcgctgggcatctcgccgggtatcatcgccttcgccacgaacaacatggccgtcgaggtcaacgtcggcgtgatgggcatcagttacagccacaccaagcaggtacacaaccaggtgacggtcggcaagcgcgacgccagcatgatgaacttcaaagtcaatatcttctcgatagggctcggcatggcattctatctctaaacacggcacgcacatgaaacgaatcatactttccattttatcggtattcatcacgctcggcgccgcagcggagacgggacaagccctccccgcggtgcagcgggccgctacggccgcagtcgaagaaaccccctccggcaacgaggacaccgtgcccccggaaacttcggacacccccggaacgggcaccgaagccacggcggaaacagcttcgggactcgccgcagaaacgggcaccgcagccgcagcgggcaccctcggcgccccggcggcaccctcggcgccgatgcccgcagccatgccggccgaaaagcacaagcgtccccaggtggagcgtttcctgcccacgcgccgccgcatcgaccgcgagatcaacaaactcaaattcgcctacaagggcgaagtgatgatgggtcttacggcctcctacggtacggtttcgagcgacgacaccgacctcatgctcatcttcgacaacatcgatgcggatgccacgatcgcaacggtaaaacccttcgtcggttatttctaccgcgataacaactgtatcggcatccgtttcggatacagccacatgggcggcacgctcgacaacacctatttcgatgcgggcgagggcaacgacctctcggggcagctcccctacgtcgatctttcgagcgacgaatactcattcggcattttccaccgttcttatgcggggctcgaccccaaaggacgcttcggactcttcgccgagttcgagctggcgctctcgacgggacattcgagcttcgcatacgacccggatcataacgaaggaggcgcacccaaccgcacctacaacgacaaaacgcaggtaaagctggcgttcaacccgggagctgccgtatacatcttccccaacgtctgtgcgacgatttcgttcgggctgggcggcatacagtatacgagcatcacccagaaggatgccgacggcaacaagatcggttcacgcaaggcttcgaacatgcgtttccggctcaatatcgcggccatcaacttcggtatgacgatacatttgtgggacaagaaaaagcagtaaactatgaaatacctacgcatactcttttcggcggcggcgctcctgctggcagcgtcgtgcatcgagaacgacctaccgtatcccaccatcgaactcagcatccgcagcatcgaaggcgaggggttcacggtgaccggcatcagcctcgtgaaccgtaccgtgacgctcacgctggacgagaagaccgatatccgcaaggtcaccatcgacaaggcggaattcgatgtcgccacatccaacccgatgatgaccgacaaagagaaattcatcagccagatcaggacttcgcagccgctgagcggggagttcgacctgcgggcgccgctctatgtcacgctctcgctctaccaggactacgagtggacgatcgtggccgagcagcccatagcccggtcgttcaccgtcgccgggcagatcggatcgacactgatcgacacgcaggcgcgtacggccacggcctatgtcgccgaaggcaccgacctgaaggccgtcacggtcaccagcctcaaactggggcctgccgacatcaccgcctactcgcccacggccgaggaactttccgccacgggcttcgaaacggttcgtctggtcgacgtcacctgccacggccgcacggagcggtggatgctccatgtccagcccaccaacgtgaagataggcgtccgcgacatcgacctttggaacaacacggccgtcgtcaccacgatggtaacgccggaagattatgcgaccgccgaaatccagtaccggctgaagggtaccgccgactggcagacgacgcagaagggcgcacaggacgaaagcggcatctttacgagcacgatcgcacccgaatggacaagcctcaccaacgatgcgggcatccccgtaaaacgcctcgtcacgaccaagggcgtctacgccgggcaaacgtatgaattccggcttctcgtcggcgggcagcagaccgaaaccgccgaatacacgacacccgcgggtgacacgatccccgacgggaacatggaaaacccgggcttgtcgtgcttcacgagcgaaaatacgaatgcggagttctgggccagcggtaacaacacatttgcggataagctctgtaggcaggggactttcaacggaatgggcggcagctattgcgcgaaactggccgcggcagcccctcccctcgtcaacatcgcagccggcaacctgatgtccggcatcttctacaaagacggcctgtggacgggcgtagtagaattcggacagccctacaactggacggcgcgcccttcgggcatgaaggtgaaataccacgcgacactgggcacgatcgacgcaagcaaacattccggggccccggtcggcataggcgacccggacaaagcccgcattttcgtcgccatcatcgactggaacgcccggcaccgggtcgcttcgggcaccaaagaccccacgggcatttgggatccggcggaaaccacccagaccgcagaagggaaactcatcgcctacgggtcgctgttcgtcgacaagtcgaccgaaggcgagcaaatggtagaggccaccctgccgctcaacttctacgacccggctgcgggacgccccaccggcaagtacagcatcatcatctcctgctccacgagtgcctacggcgattacatggtgggctgcacgacgaatgtaatgtacgtcgacgatttccagtgggtctattgacccggcgccggacaagtccgccggcaactcagaaaatataaagagaaaaggctgaacccctgggttcagcctttttgctgtagattcagacttttcaatccctgccggaaattatctccgtgcaatccggcagtatttgtcatagcgtcctatcacgtcgttcacgtaggccagcgtctgccggctgccggtgaaacgtccgcacttgaccgcctcgctctcgtaatactcgggctgcgccttgagttgcaggtagcgggccacgacctcccacgaattgggatcctcgccgttgagccgtgccaggcgcctcgcatcgttcacatggccgatcccgctgttgtacgaggccaggataatgctcatccgatccttctcgggagtcccctcgggaaaacggagcgtgttcataatcttcgacatcagcttgttggccaaccatatgttggtctcgggattggagacctgctcggtcgggacgtcgaactggcgtgccaccgagggcatgatctgcatcagcccgcgggccccgctgcgcgaggtgatgtcgggcgtgaaccgcgattcatggtaggcgatggcgctcatcaggcgccagtcgtggccctctttttcgctgatgttgcgaatgacattgtcataggccgagatcacatagtcgccctcaccgagcagcgaagagccgaaatcggccgcatcatcgttcagcagcatgtcgtccgtcacgggtgtgctgaactgggcgttaaagccgtaaaaagttgtcaggattgttaagaacgcaaaagttaaaactgtcttttttaacataaaatgttgttttgcgggcagttcataccgcgcagaacaatacgctaatcatagaaaccccatgagataccgattttaaacatgcccggattgagcgggtaacccgccgcggagaaatactctccgtttccgaacagtcccttgttcacatgctgatatttgagaaatatccgcattctcttccactttcccatgacgaaggcgtccatgtaggggtaattgcctacttcgacgtcccgttggttgtaataggccgacagcgcggggttgtaactgggcgcataataacgcgtgttatagcgtccgtccaaaccgatctgaaggcgtaatacgttgcgcacgacccagaactcgtaataatacgaaaggaacgcgctcaaaagcggaacgggtgcaacttcttgattcgtactccactgcaacaataccctgttgtccaaatgaagtccgcctaagcggaaatctttgcgagcgtacacactcgtgaggcttacgttatcactgctttgggcgatctggctctccttgtcgtaaaagatcttgttgccgaccacaccttgccatgcccccgcttcaaacgcataatcggggactgaaaacttcacctcgaaccgagtttcattctccttattcaaaggagtggaccacacgtagtggttcgagaacagattctcctgccagtagttgggcgaacgccgatccatcgtgaaccggccttcgagaatcagggggtgtccgcggagatatcccgtcagcgccaggtgggcgccgatggtgaggtctccgcctctgtatcccgacgggtagaacttgaggttcgcgtcccagtcgacatatttctttatctttcctccgacggaaccgtatgcgaaatagctggtcttgttgaccttcgtatactttcccgtctggtaatccctcatttcgaattgcgagtaggtatgcatgtcgataccgatgcctgcatcaatcgtgcctaccacgccgttacgatcccaaggctgtgcctgcacgaagaagcggttcgaaatcacacgctcgtagatcgagtcgcgcgtctggtcggggttgatataccagttctggtagtagtccagcgtatcgggcacgaaattgccctgttcgtcccggtgcgccctttcgtcgatataccgcgcatatttgtccgaatagaccttgctccacgaactgtactggaacgaatggccgatatagaccgccgacaggtcggcgagcgaaaagtcgttctccgtcacgcgttgcaacggcagggcgtaggactgcgtgatgaaaaaggcgttgttgcggtaagtgttctgcgcctcggcatccgacagcttcatcggcacgcccgaaggcatctggaacgtcgtatcggcaatagcccatgtcccgaccacgccgccgttctcctgctgttcgatgtggttgttgtaataggccgcatgcaccgaatagcgcttgcccgtatggctgaaggcgaccgacaggttgtggttcttcgtccgtgaccagacatattgtccgcgcgttccccgtgccttgtagtcgacgttgaacccggtcgtgggcgaaatattctgcgcgtgcatgatattgaagttctcctcccggaaacgcttctgccccgactcgaggtacgtcatgcggatgatgggcttcttcgtattgtagaacggaacgttctccatgtcgtacgtatacgcatagtaggggctcgcaaaactgaaatcaaagaactgcggccgccggaaatagttcatcggcagcgatgtctgcccgagggcgccctgcgcgatgtcgcccacctcttcgcggaagaaggggtagtcgatgcgccagtcggtgagcgtcgtgtcgagcgggcttatctccacgcggttgtagtcgcgcttgacgctccagcgaaaattgttcagggcgcggatcgaatcgctgaaaaaatacgattcgagcggcttgcggatccggcgttcctccttggtcgtatcctgcggctggccgtcctggccctcctctccctcctcgccggtctgctcgtaagggtttgtaccgtaaaggttccccgtctccccgcgctgctgggcacgctgcagcgtcctggcgttgaaaccctgcgaacggacgatgccgggcgctgtaaggaacagaccgagcaaagctgccagcaatattctattcgtcaacctcgacatggaacgctaatccggggcaaaattaataaaaattcttaaaatacacaactatccggcttgtccacagccttttgccttcatcgacaaccagcgtacgaccgaggttgcgatgtagaggacgatcacgaccggcacggcacgaacacccagcacggccagaaggagcgccgccgatacaataaaaacataacgcaccccgttgcctttccaggcgaagtgctggaatttgaaggcgaacatccgcacgggcgaaacgagcagccacgacatcacgggaatgagcagcagcaaccagtaacccaagtcgaaacccgtcttcaccttaatccaccccaaagatatgaaaaacagcgcattggcaggagtaggaaggccgcagaactcggtatgctgcgtctcgtcgatattgaatttcgccagccgcagcgccgagaagaccgccaccgcgaaacaaagtgcgctgccgccgtagcgcagccatgcctcggcatccgcaggcagggaattgttccacaggacgaaaagcacggccgacggggcgaagccgaacgagaccatgtcggacaacgagtccagttgtacgccgatggccgaggggcatttgagcagccgggccacgaaaccgtcggaatagtcgaaaacaccggcggcgatcgtgagccagaaagccagcgccagatcgccgtaaaccaatgctgaaaccactgcgaacgagccgcaaagcaggctcgaaagggtcagcaggttgggtatggtgaacagttttatcttcatcgggggtacaaaaatattattcctgcaataggcggcaaagttacaaaatatttttatctttgtctcacttaattccatattataacttatggcaagcaataaatattgtgtcatcatggccggcggcatcggatcgcgtttctggcccaagagccggcagtcgatgccaaaacagttcctcgacatcctcggaaccgggaaatcgtttatccgccacacctacgagcgctttgcaaaaatcgtccccgccgggaatttcctcgtcgtgacgaaccacaaatacaaggatctggtattgcagcacatccccgaaatcggggagaaacaggtgctctgcgagccgatcggccgcaatacggccccctgcatcgcctatgcggcctatacgctgctcagggagaaccccgacgccgagatgatcgtcacgccgtcggatcacctgatcctcaacgaggacgatttccgcacgatcatcggcgagtgcctcgaattcgccgaccggcacgacgcactgctgaccgtgggcatcaaacccacgcgccccgacacgggctacggctacatccaggtttcggacgaccacaccatcagcaaagtcaagtgcttcaccgaaaagcccgacctcgagctggcgcagaccttcctccagaccggcgagttctactggaattcggggatcttcatctggaaggtgcaggccatcgtcgaggccttccgcaaatacctgcccgagcaccatgccatgttcagcggtgtgatgaaggcgctgggcaccgatgccgagaaggccaccgtggagatcgtcttctcggagtgccgcgccatctcgatcgactacggcatcatggaaaaggccgacaacgtctatgtccgctgcggcgacttcgggtggagcgacgtcggcacatggggctcggtctaccagcacgcccgcaaagaccgctacgccaacgccgtccccgaagaggggtgctacgtctacgacacgcgcagcagcatcgtctcgctgcccaagggcaaggtagcggtcatcagcggcctgaaggaatacatcgtcgtggacaccgacgacgtgctgatgatatgcccccgcgccgaagaacagaacatcaagaaattcatcgacgaagtaaagttccataacggggacaaacatatctgacacctatgacacctatgaaacgcatgccgttccataccacagccttgctgcgacgattcgctgcgggcttttttttagtagcggggatgctctcgtgctccgcgccgcaggccaccttcaccaacccgctgcgcgacggcgccgacccgtggatcaccaaatacgacgggcactattacacctgcttcaaatcgggacgcggcatcaccgtgaccgaatcggacgacatgacgcgcttcgaacgcgagcgtgttgtctggcagcccgccgacagcggggcgtggaacagcttcaacatctgggcgcccgagctacaccgcctccgcggcaaatggtacatctactacgccgcggcacccgtccccggcagtcccttcacaggacagcgcaccggcgtgctggagtgcgacacgccgctaggcgactaccgcgactgcggcatgctctatacgggcgacaaccccgacggcaagacggacaacatctgggccatcgacatgacgatcttcgaacaccggggagagctctatgccgtatggtccggctgggagcgccagcgcgataccgacgccaccgaccagctgctctacatcgcccgcatggaatcgccgacccggatcgggccgcgcatcctgctctcacgacccgaccagccgtgggaacagggcgaccacatcgccctgcaggaaggcccgtcagcactgcggcacggcgacgacctcttcatcgtctactccacgcgcggctcgtggtcgcgccactacaagctcgggcagctgcgcctgcgcacccccgacagcgacccgctgaatcccgcatcatggatcaagagcggccccgtcttcaccggcaacgaccgcatacacggcgtcggccacgccagtttcaccacctcgcctgacgggaacgaatactggatctattaccactcgaaaaaagatacggtacacaactgggggcgcgacgtacgcctgcaacgcttcgacttcgacgccgcgggcaacccccgcttcggagagcccgcagagccggggccctaccccatgccctcggggacacccaaacacgcgaactgacatgtccgaactatacgatattttccgggaacacccgcacatctccacagacacgcgcaacatcggggctgattccatcttttttgccctgcgcggcgcgacgttcaacggcaaccacttcgcggcggaggcgctggacaaaggcgcggcctatgccgtcgtggacgacccggcagccgtcaccgacgagcgtatggtgctggtcggcgacacgctcggggcgttgcaggagctggcacgcgaacaccgccgccggctggcgatcccgatactcgccatatcgggcagcaacggcaagaccacgaccaaggaactggtgagccgcgtgctggccgaacgcttcgaggtctacgccacgcgcggcaacctcaacaaccacatcggcgtgccgctcacgctgctcgccatgacccgcgacacgcagttcggcgtggtcgaaatgggagccagcgcctgcggcgagatcgccctgctggcctcgatcgccgagcccaactacggcatcctgaccaacatcggccgtgcacacctcgaaggcttcggcggcccggagggggtgcgccgcggcaagggcgaactgttcgactacctggccgcgaacggcggccgcgccttcgtgccccgcgaggacgagacgctgacgaacatggccgccgaacgcgacgggctggccgtggaatattacagcgtcacactggccgacggcctcgaaaaccatctcgaagggcattacaaccggttcaacatcgccgcagccgtggccgtcggacgttatttcgacgtcgccgacgagcgtatccgccatgctgtcggcagctatgtccccgacaacaaccgctcgcagcgcaccgagacggggcgcaacacgctcatcgtggactgttacaacgccaacccctcgagcatgcgggcatcggtcgcgaatttccttgccgagccgcccggcacacgcacccgccgcctgctgatcctgggcgacatgctcgaactgggcgcctggtcggcggaggagcacgccgctgtcatccgcctcgcagcacaggctccgcagacggaggtgatgctcgtcggacaggaattcgccaaggcccgtgccgacatggagccgcaacccgcccggatcacgctcttcgccgatcgggaacacctcatcgcggcgctccgcacacaccccgtggacaacgcgctggtgctgatcaagggttcgcgcggcatcggactggaaaaagcggtcggggagctgtagccccgccgccacgacccgccgggcaccaacccggtacaggcacgatacgcaggaacaaaacgccggtaaacgaaccggaagggcacgccgcacaggcaaaaaaacaccgactgagaacaacctgaaacccataagccatgaaacacctgctgacagccatcctcctgctggccttcgcgcataccgccgccggcgaaaggaacgtctcgctcgaatgcgatttcggaacgctttacggcacgctgctcacccccgatgcaggtacggaaaccgtggccgtcatcatcgccggttcggggcccactccgcgcaacggcaatgtaaacagctatctctacctggcgcaggcgctcgaaaaggcaggcatcgcctcgctgcgctacgacaaacgcggcatcggtgcgagccggttcacggaaccggaaaaaatggcccacgccgtactgggggatttcatcggcgacgccgcggcatgggccgactacctcgccggcgaaggtttccgccgcgtcgtactgatcggccacagcgaaggggcgctgatcgccttctgcgcggcgcagcaaaccccgaaagtcgccgccgtcgtttcgctggccggcgccggctacccgctcgacgagatactccagttgcaattggcctcacaactcctgcccgacaacatggatctgctcttgcaggccaacgcgatcaccgccgccctcaaacggggcgaacgggtcgaatcctgcccgccgcagctcgaagcgctgttccacccttcggtacagacgttctggatctccagcctgcgctacgacccgcgcgaggagatccgcaaggtgcgggttccgatcctcgtcgtgggcggggacaacgacctgcaggtgccacccgacaatgccgaggcgctggcaaaggcacagccccgggcccggaaggcaatcatcgcagggatgacccacccgctcaaaaaatgcacgggacgcacgcgcatcgaccagacgggagcctacggcgacagcacgctgccgatcgaccccgacctcgtggccgtcgttacgcaattcatccgggggctctgatttttccctgccggaaagacaaaaccggattatttttttaattttgtataaaccgattccgaaccaaacgacataccgaaccatgaaactcctgatcagcatcgaataccgtacccgctggggcgaacagctcgtcatgcggatcggcaaacggcgcattgcgctgcaatacgccgacggaggcgtctggacaggcgccatcgaacgctatacccagagtgaagataccgaataccgctatgaaatcgaacgcgacggcgcgtgcatccgcagcgaatggaggccgcacacgctgcggctccccgcccgggagggggtgcgcacgctgcgcatccgcgaccgctggcaggagatgccctccgacacgccgttctactcctcggcattcacccggggcatcttcggccgcgggaaaaccggcagtccgaagaaggctacaggcaacatcacgctgcgcgtcgtgctgcccaccctgcggccggacgaaacgctcgccgtcgccggcagcggccgtgagctgggcgactggaaacggatcgtcccgatggacgacagccgcttcccggaatgggaactcacgctgcataccgcgcaccggttcgaatacaaattcctgatcgccgaccacaagaccctcacccccatcctgtgggaggagggtgccaaccgcacctggggcgagctgcccggcgccggcgaacacgccctcgacgccgcggcatccccgcgtttccccgagcgcaggtggcggggcgccgggacggcgatcccggtcttctcgctccgtacggaagaggatttcggcgtcggcgagttctacgacctgaaacggctcatcgactgggcggccgccaccgggcagcgcgtcatccaggtactgccgatcaacgacaccaccatgaccggcacctgggaagactcctacccctacaacgccaattcgaccttcgccctgcacccgcagttcatccggctgcccgccgcgggcgtcgtggaggacgacgagtaccgcaccctgcgcagcgagctgaacgccctccccgaaatagattacgagcgtgtcaacgggcacaaactgcggctgctccgccgggcgttcgaacgccacggcgcccgcaccgcagcacgccgcgactacaaggccttcatcgccgccaacagacactggctcatcccctatgccgccttctgcacgctgcgcgacgaaacgggcacgcccgacttcacccgctggggcggtttcgcccgctatgaccgcaaagccgtcgacgcctattgccgcagccacagccgcgacatcgcattccactgctatgtccaataccacctgcatacgcaactgtccgaggtctgcgcctacgcccacgaccacggcatcgtcctcaagggcgacctgcccatcggcatcagccgcacgagcgtcgacgcatggctctacccgcacctgttccacatggactcgcaggccggggccccgcccgacgcattctcggccgtcggccagaactggggattcccgacttacaactgggaacgtatggcacgcgacggctacgcctggtggcgggcacgcatggccaagatggccgaatacttcgacgccttccgcatcgaccacatcctcgggttcttccgcatctgggagattcccacgcatgccgtacacgggttgctgggctatttcaaccccgccctgccctattccgcagacgaactgcgcggcataggcttcgacacgcagggcggacgctacaccaccccggcgcccgacgagcacacgctcggggaactgttcggcgacctggccggcgaagtccgcgccacctgcatgaaggaggggcggttactgcccgcctatgccacccagcgcaaggtcgcagcccgcttcccgggcgacgacgaacgccagacccggctgcgggaagggctcatggcattgctcgacgacgtgctcttcatcgaagacccgcgccgcaagggctatttccacccccgcatcgccccccactcgacgcacgcctaccgccggctcgacggagagcgccgtgcagctttcgaccggctctataccgacttcttctaccaccggcacaaccgtttctggcaggaatccgccctgcgcaagctcccggtgctcctctcggcgaccgagatgctgacctgcggcgaagacctgggtatgattcccgacagcgtccccgagacgatgcacgaactgcaaatcctctcgctcgaaatccagcgcatgtccaagacgccgggggagctcttcgccgacccggcgcactacccctatttctcggtctgcaccacttcgacgcatgacatgaacccgctgcgggcatggtgggaggaagaccgcgaactcacggcgcgcttctaccacgaagcactcggcatcgggggcgacgttccctatttctgcgagccgtggatatgccggcgcatcctcaacatgcacctcaattccccggcgatgctcaccatcctgccgttgcaggactggttctcgaccgacggggaactgcgctaccccgacccggccaaggaacgcatcaacgtcccggccgtcgcccgatactactggcgttaccggatgcacctcccgctcgaggaactgctgcacaaggagactttcaacgagtcgctgcacgacatgatcgcctgcagcgggcgccgctgacgggcgtactgcggcaccgccgctcccggctacaaaaaaggggtaccccgattctcggggtaccccttttatcatgccgtcacgacgaaggctcagccattcccctccaaccacttcaggaagtcgtcgacccgcgaccggctcaccaccatctcgaactccggacgcggtcgtgccgtgatcttcagccggttgcccaggtatttcacgatgctgacgatcgccggcatggcgatcatgcagccgcgcgatatgcggaaaaaccgaccgggatccagctcgtccgaaaggacgtcgagcgactgatccatgatgtagcggttgttgtcgctcgtgacaaggtaggtgtttttctcttccgaatagaaataggcgatgtcggtggtttgtaccggaacgatccggtcgttgaaacgcacgacatagcgctgtttgtattcgcgcgggccgcggatcgcgttcagcaatacgtcggggtcgatacccccgctccgcacccggcagcgctccacggcacgccgcagcgccgcggggtcgatcggtttgagcaggtagtcgatgctgttgacctcgaacgcccgcacggcgtaattgtcatatgcggtggtcatgatgacccgcgccgtcacgtccgcctggcggaatatctcgaagcaatccccgtcggagagctccacgtccatgaaaatcacatcggcactgttccccggcgtgcgcagccagagcaccgtctccctgaccgagccggtcgtcccgacgatccgtacgtcgggaaaatgctgggtcagcgctcgcgccaggtttgcctgggccatcatttcgtcttctacgatcagtacgttcatattacagcaacggtaaggtgacacaatattcggtatcggtacggcgtatcccgatcgggatgcccgacaggtcgaggtattgctggcggatgtagttcagccccacacgggtcgagggggtgccggataccttcaactgaaggttgttcgacaccgtcacggcctcggacacggcgacgatgcggatcaccagcggccggtcggcccccaccgagttatgcttgatggcgttttcgatcagcagctgcaccgagcagggcaggacatggcggttcatggcctcgtccggaatgtcggtctccacgcgaaacccctcggggaaacgcacctgcaacaagtcgacgtacatccccacgaaagccatctcctcgcgcaggcgcacaagcgtctcctcctcgttctggagcatgtaacggtagatgcccgccagtttatggatgtaggcgctggcctgctccgtacgctgctcgcagaccaggcagtcgaggatattgagcgagttgaacaggaaatgggggttgacctgctgtttgagtttcatgtaacggaactgcgcctggtgcgccttgccgcgctcggcacgcagcacggcacgcgcgaccagggcgtaatcaaccataaatacgaccgaatagagggtcacctcgaccagcagggtgacgatccacagttgcaggaactcccgtgcggagaacgagcggtcgaaggcgaacggcaggtgcagccccgtaatgagcgccacgcaggccgacgtgagcagcacgaacaggaggaacgccgcgatttcggcgatcagaccgtgccgggtttcacgcctgcgcgtataccggacatagatgatattaacacacagcaggataatcagtgccgcggagttcgaagccagcaagtcggccatgtggtagagacggtctgtggagaaggaaggcgatgagaagagctcgacataggccagcctcagcacgaaaatcacccccacggccagcagcagcaatccgatgcggggcgtccaagccgaggagcggctcgacgtgtcgtcgccgcggcggaacaacttggtgaaccagacgatgctccagcccagaatctcggtggtgatgaaggtcgaaacggcatgcaccacaggcggggcgtgcaataacagctcgatcagctgcgcaccgcccgtacccagcaggtagccgatcacgttgacgacgatcacgctggcagcggtgaactccacgttcaggccgcgtttgaggcagatcagcacgatcagcacgatcgtcagcagcgtcagcaccaactcgtcgttgatccccgccagatggcatgaaagggcgaccacggcatggagcacggcgaacaggtggataattccggacactttgagcgatcgcatataggctgactgaggctgtattaagtatatacgggtttcgtttatttatgaataaaggtagtgtttttccgcggaaattccaaatcgtccccctcgggctaccgttcgtcgtaaaaatccgcccgttcatccggctgatccctccgttcgtcgcccggcggttcgccatccggatttttttattaaaatttgtataacctgaaaaccaaccgaaaaaccgaaatgaccaaacctaaactctcattttggcagatttggaacctcagcttcggcttcctcggcgtgcagatcggatattcgctccagaattccaacacgtcgagcatcttcgaatcgctgggggcagatgtcagccacctgagctacttctggctggcggcaccgctggccggcatgatcgtccagcccatcgtggggctcttttccgacggcacctggacgcgctggggccgccgcatcccctacatcctgggcgggtcgctgatctcggcgctggcgctggtgctcatgcccaactgccccaaactgctcgccttcgccccactcgccatggggctttcatcctgctgttcatggatttgtcgttcaacgtcacgatgcagcccttccgggcgctggtggccgacatgctcgacgattcgcagaagacacaggctacgtggtacaaaccttcctgataaacctcggtgcggtcgtcggcgctatcctgccgctcgtcatgacatggctcggcgtgtcggacgaggccgctccggggcatgtttcgccgcacatcgcctactcctactatgccgggggcgcaatcctgctgctcacggtgctcgtcacctcgttcaagacgcgggaatatccgcccggggagttcgcccgctacaacaacctctccgaggaggacgccaaaccggtgagcttcgccggcctcatgcgcaacgtccccggcgtgatggtgcggctgggcgtcacgcagttcttctcgtgggcggcgctcttcctgatgtggacttacctcaaacccgccatcacgggtgtagtcaccgaccatgccacgggcgaagtgctctcggccggcgccacgcagacatgggtcggcgtgctcaacggcacctaccccctccccgcctgcatcgccgccctgttcctcgggcgcgtcgccgcgcgctacggcaacaaacccgtctacgcggcctgcctgctcgccggggcgctgggcttcgcggggttgtgcctgctgcacgaccagtacgcgctgatgctcccgatggtggggatcggcatcgcctgggcgggtatcctcgccatgccctacgccatcctgtcgcgcgcggtcgaaccgcgccgcatgggcgtatacatgggtatcttcaatttcacgatcaccgtcccccagatcgtcatcggactgaccggcggtgccatcgtcaagtactgtttcgcctccgatgcggccgacatgctggcactcgccggggtattcatgctgctggccgccgtatcggtcttcctggtcaaagaacacaaggcccaatgacctacaatccataaaatcaacttataaactaaccaaaattcttatgaaacgatttttaactatgtgtgcgggtatcttgctcatatgtcaatttaccccccccctcacgctggcgcaaaacgctggttatgaggtaaaaggcgtagttgtcgacaagtccgggatgccgatcctgggcgctaccgtcgtcgaaaagggcacgaccaacggtgtctcgacgggcatcgacggcgactatgccatccgcgccgcgagccccgagtcggtcatcgaggtcagctatgtcggttacaagaccgtcagcctggtggccagttcgtcgctgctggcgcacctcacgctcgaagaggatgccatgggcatcgacgacgtggtggtgatcggctacggttcggtcaagaagaacgacatgaccggttcggtcgtggcaatcaaggccgaagagttcaaccgcggagccgtggtctccacgcaggacatgctcaagggtaaggttccgggcgtgcatatcatccccggcgacggaggccccggatcgagcgccaccatccgcgtgcgcggtgcggcttcgctcaacgcctcgaacgacccgctgatcgtgatcgacggggtgcccatcgcagtcgacggcggcaagggtatggccaacccgctggagacgatcaaccccaacgacatcgaatccttcaccgtgctcaaggacgcttcggcggcggccatctacggttcgcgcgcctcgaacggcgtcatcctcgtcaccaccaagaaggggcgcggcaacacgccccgcgtatcgtacagcggcagcgtgagcgtccagaccaactccgacgagctgcccgtgatgtcgcccggcgagttccgcacctacatcgaccaggtataccccgcaggtacgaccacgggcgacaaggtgcagtcgatgctcggagacaagaacaccaactggcaggatctggtcttccgcaccgccatttcgcatgaccacaacgtcagcctgatcggcaacatcaacgaccgcatgccctaccgcgcatcggtgggctacaccaaccagcagggtacgctcgaaacgtcgaaatacgaacgcgggacgctcgacctgagcctctcgcccaacttcttcgacaagcacctcacggtcaacctcaacgccaagggcgtcgtcacgtcgcagcgctacgcttcgggcggcgtggtgggttcggctgccttcttcaaccccacgatcgacccctacttccgcaacgacgacggctcgatcgactacacgaccaccaacggatactggaactacggatcgggccgcggcgaggacttcacgcccaacaccctgctgggtgcgggcccgctctcgcagctctacgaccgcgacaatacggcgcgtgccaagcgtttcatcggcaacgcccagatcgactataaggttcacggcttcgaagcgctgcgtttcaacctcaacctcggcctcgacgtatcgagcgccaagacctacgacggcgtgaaccccggctcgttccaggcatacaccgacaccgaggcccgcggctggggacagtattcgtggacgacgaacttccgccgcaaccagctgctcgaattctacgccaacttcaacaaggagtggggcatccaccacctcgacgtgatggccggttattcgtggcagcatttctacagctccgaccactcggtatcctatttcaacgagacgcacgagcagaagggcgaggattcgcgctacccgttcaaccgccaggagaactacctgctctcgttctacggacgcctgaactattcgatcgcctcgaaatacctcttcaccttcacgctgcgtgacgacgcctcatcgcgtttctcgaaggatacccgctggggcctcttcccttcgggcgcctttgcgtggaacatcgccgaggagaatttcctgaaggattcgcgtgccgtctcggccctcaagctgcgcgtcggcgtggggcagaccgggcagcaggagatcggctccaattatccctacctggcgcgttactacatgtcgaccgacgtctataagacctattacatgggcagcgccgggcacatgttctacctcacgccgggcgcctacgaccccaacatcaaatgggagaccacgacgacctacaacgtcggactcgacttcgggttcctcggcggccgcatcaacggtagcgtcgactggtacctgcgccagacggacgaccttctgaacagcgtcatcacccccatgggctcgaacttcggcaacacggtgctcaccaacatcggctcgatggagaacaagggcgtggaattcaacctgaatttcatccccgtgcagaccaaggactggaacctcacggtcggcttcaacggcacgttccagcacaccgagttcaccaagctcaacaacaccgacgaccccgactacaacatccagacgggaagcatcaccaagggcacgggcaacctgctccagatccacaaggtaggctatgcgccctacactttctactgtttccagcaggtatacgaccaggacggcaatccgatccagaacgcgctggtcgaccgtgacaaggacggcaagatcacgcaggccgaccgctacgtgaccgacaagagccccaaccccgacttcttctacggcatcagcctcaagctgagctacaagaactgggacttcggcttcaacggccacggttcggcgggcaactgggtcttcaacgacttcgcctcggccaactcgacgtccaacatcgacatcaacgccggcaacctgcccaacttcgcacggctggtcaagaagaccggctttacgaaggccaacagcggcgagcagtggtattcggacatgttcctcgaaaacgcctcgttcttccgcatggacgacatcaacctcggctacacgttcaacaagatcggcaactggaagggctcgatgcgcgtcgccttcggcgtgcagaacgtattcgtcatcaccgattacagcggcgtagaccccgaaataccgggcgtcaatggcatcgacggctcgatctggccgcgcccgcgcacctattcgctgcgtctgaatgtaaacttctaaaaacgaacgaaccatgaaaatcgacataaaacatttcgctatggcggcggcaggtgcagcgatgctgctcacttcgtgcatcggagacctcgacaccctgcccctcaacccgtccgactcgacctcggagaccgcctacgggaaggatgagaacggctacctggccgggctcaccaaactctatttcaacttcgtctcgaacgacaccaccgacctgcaggtcagcgacggcggcgcctcggagctcatccgcgcattctggacgattcaggaggttacggccgacgcctgcaaatgcgcctgggagaacgacgcctgggtacgcgccatgaataccgacacgtggtccgacgccgacaacgacgcgacctatgccgtctacgtacgtacgttgcagggcatcgcctacgtgaacgaatacctgcgccagaccgcctcggacaaactctccgaccgcggcgtgagcagcgaactggccgccaagatccagagtttccgtgccgaagcccgtttcctgcgcgcctatttctactggatcgccctcgacgtgtttggcgacgtgcccttcacgaccgagacctcgcccttcggcggcggcgtgaaccccaaacaggcctcgcgcaaagatgtcttcgactactgcatctcggagctgaccgacctggcgtcggacgaaagcgcgatgcccgccgcacgctcgaactacccgcgtgccgacaagggtgcggtcaacggcctgctggcccgcatgtacctcaatgccgaggtttacaccggcaccccgatgtggacggaggccaaatccgcctgcgaagcgatcttcggcatgggctactcgctctgcccggagtattccgacctcttccgcggcgacaacggcgagaacgccgacgccctgaaggagatcatcttcggcgtggcctacgacgccgagcagacacagtcctacggcggcacgtcgtacctgacgctggctgccatcgccgccaccgacgtgacggccgaacagaagatcaacggcgtgaacaacggctgggctggcatccgcgtaccctacgaatacgtgcagaaatatttcaacgcccgcaacgcggactatacgacgggcgaatatacggtcaacgacaaacgcggcggaatgttctacattaaaggccgccaggagtcgatgaacgatgcgctctatgtcttcctcaacgggtggacttgcctcaagttcaacaatatcccccacaacatgaccaacgacgaattccttgccacggctgcatcgaaggcatacagcgacatcgacttcccgatgatccgcctgggcgagatctacctgatctacgccgaggcctgcatgaacctggggcaggccaacaccgcgctgccgaaactccaggagctgagcaaccgcgccggggtatcggccccctcgtcggtcacggccgacttcctgctcgaggagcgtgcccgcgagctgatgtgggaggggcaccgccgcaccgacctgatccgctacggcaagttcaccaccccgtcgttcctctggacatacaagggcggcaccttcaccggacagggattcgacgattacatgaaaatctttgccatcccttcgtcggagctcgcttccaaccccgaactgcaccagaatcccggctacggaaacgcaaccgataaataaccaaccctaaaaatcgtacgactatgaaaattacacgatatgcgatgatgctggcggccgcgacggggctcctctccgcctgccagaagctcgacgaggtaaaggcctacgaccccgacaaggtcgtggcgcccgtgctgcatgcgctgcccggtgagatcgtcatcacgcccgacaacatgggctcgacgcagaccttcacctgggacgccgccgacttcggcgtccgcacccagatcaactactcgatcgaggcctcgtacaacgacggtgcgaagctggtgctcttcacggggatggacggcacctcgtccgagcaaacctatgaaagcctcaacaacatccttgcgctgtccgtggaagacggcggcctgggagtaccctcgggcgaacctacggacgtggatttctacatcagcgccacgatcggcaccgacttcgaaaaattctactccgcccctgtcaccgtccgtatgaccgtaaccacggccgagcgcacctacccccggatctgggtaatcggcgactactgcggctggaacttcgacaacgcccagggcctgttctgtttctccggtgacgaggtcacctacgaagccatcgtagacttcggcgaaaaggccgccaacggcttcaagctgagcggcgaggccggttggaacgatgcttgcaactggggcaccgacggcgatgctgcggccccggaaacggaagccccgtcgatcacgctgatctccagcggcggttccggaaacatcatggtctattccaagcgcttctaccgcttcgtattcgaccgttcgacattgacgttaagcaacaagctgtcgttcaactcgatgggtattatcggcgatgccaccccgggcggctgggacaccgatacggagatgaatttcgacacccaaaaacagcgtttctgggtcgacgtcacactgagcgccggggagttcaaattccgtgcggacaacgactggacgataaacttcggcggggcggacggacacctttcgcagaacggcgacaacatcaaggccacggcgggcaattaccgcgtatacgccaccctgaacaactctgcggagatcacctacgaactcaatgccggcgactacggcacgggcggcggcgaagaacccgacccggggccggaaaaggccgactggtacatccacggccagaccgtcgcaacccccgactggggcccgacggccatggagagcgccagctcgaacatcgtggcctacaaggccgcaggggtcgaggtagccgccaactcggaattcctcttcaagagcggcgacgagtcgcagtggatcggggccgacgccgcattcgccggcagcagcccctacacctgcacgatcggctcggccttcaaggtttccgccgacaaggtcaatgccgtgatcgccgaagccggcacgtacgactactggctgctgcccgaggcgggacgcgcctacgtgatggccgcaggcgccaagcccgagctggtcgccgacacatggggactggtcggcaacatcaccggatggggtgacctgggcgatttctcgatgagcgaggagggcgcctacctcgttcgcaaaggcgtagccctgaccaccgccagcgagttcaagatccgcttcaacaacgcctgggacgactccaagaactacggcacggcgtcgggcggtgcggtcgacatcaacaaggccgtagacatcatcaccagcggcggttcgcagaacatgaaagtccagctcgacggcacctacgacatctatttcgatctcgcgaattcgcaaatatacatcatgcccgaggggaaaaccccggcagaggccgaataacggccaccctttcacgggacggcgcacaggctgccgtcccgtttctggcctgccgtccctgaccgggcggcaggccccgaaacgaactttaaccgagattccgctatgaaaaaatttcttttcctgctgctcgcactcgtactttccgtatccgtgtcgtgcagcgacgacaagaccggcgataccggcggcagtatgctctccgtgacccccacggagatagaattcgaagccgcaggcggcagccggctgctcgacctgcgcaccgatgcgggcgcgtggtcgctgacgcagagcgacaataccgcatggtgcaccccggccctcacatcgggcaaaacctccacgtcgttcgcggtcacggcgaccgcaaacgagtcgtcgaaacgctccgcgacgctgaccttcaccgccccgggttgcgatccggtcgtcgtcaacgtgacacagggcggtgatgcctcccaggatttcgagggcgagcaggtcgtcgcccagcccgatgcgtgggacaaccgcaaacgcgccgacataagctaccagctgctggtatacagcttcgccgacggcaacggcgacaaggtgggcgacctacgggggctgacccggcggctcgactacatcgacgcactcggcgcctcggccgtatggctctcgccgatccatccggcggcttcgtaccacggttacgacgtgctcgactacgaggcggtcaaccccgccttcgggacggacgccgacctgagggcattcatcgacgcggcccatgcccgcggcatccgggtctacctggattacgtgctcaaccatacaggcaaagaccacccgtggttcaaatcggccgccgcgtccgaagggagcccttaccgtgaccgctatatcttctccgaagacccgcaggccgacatcgcagccggacggatcgaccagatcgccaccgagggcgccgcaggctacgatgccggacaatggttctcgaccgacacgggggcgggtgccgccgggcgcttcaagttcgtactcgactggacaaatgccgacagcccgacggtgaccgttaccgaaacgaccgacgccgcggatgcggacaatacgcagggcggcgcggacgacaaatacctctatttcggcaacggcacgagcaaacgcttctacgccaggggcggcaacagttacgaactgacgctcgacttcgattccgactggggattcctcgtccgcacctcgaccacgtcgtgggccgcaggcaccaaatacggcgccccggacaaccggacgatcatccggttcggggagcccttcaccctgatgtcgaaccgctcggccgacccggccaacgtgcagttctcgctgccgacgatgtaccattcgcacttctggacggcggcattcgccgacctcaactacggtaaagccgccgaggccgagcagtccggggcgttcaaggccgtcgccgaagcggctgacaagtgggtacgcatgggcgtggacggattccgcctcgatgccgtgaagcacatctaccacaacgcctacaacgacgagaaccccacgttcctcaagaaattctacgaccgcatgaacgagagctacaaggccgccggcggagagggcgatttctacatggtgggcgagatgctcgacgaagcggacaaggcggcaccctattaccgggggctgccggcactgttcgaattcacgttctggtacaagctcaaatgggcgctgcaaaacggcatcggatgctatttcgtcaaggacatcctcgacgtgcagcccctctacgcacagtaccgcagcgattatatcgaagccacgaaactttcgaaccacgacgaggatcgcacgggctccgacctggggcagtccgtcgaaaagatgaaggtggcggccgccgtgctgctcacggcgcagggcgcaccctacatttaccagggcgaagagctcgggtactggggcaccaaatccaacggcgacgaatatgtccgcaccccgatcctgtgggacaaggcgggcaacgaactggcttcgggaagcctctcgggcaagatcgacatgcagatgctgaccgcagcaatctcggtcgaggcgcaggccgacgacgacggttcgctgctcaacctctaccgcacgttcgcccggctgcgcaacacctatcccgtgctggcgcagggcaagatggtcaaacacccggtctacaacgacggcaacacctcgcagcaatccatcgcggcctggtaccgcgagctggacggcgaacggatgctcgtcgtgcacaacttcggccaggagacacagatactgacccttaccgaccaaccggacaaggccgtaggcgtctcaggtgaagtgaagctccagcgcggcgacgcttcgtcgaaactgctcatgggcgcctggtcgtcggtggtattcacgctctaaacgacacgcgatgaaacgcttgcccgcattacttctcgcaatggtactggttgcctgcggcacacggccgcagcaaccggccgcccaccccgactggagttacaactcggtcgtctacgaaatgaacgtgcgccagtacacccccgaagggacgctgacggcagccgcacgcgaactgccccggctcagagaactgggcgtggacgtcgtctggctgatgcccgtctaccccatcggcgtcaaggagcgcaagggaaccctcggctcgtactacgccatctccgactacgaagccgtcaaccccgaattcggcacgctggaggatttcgaccggttcgtagccgacgcccacagactcgggctgcgcgtaatcctggactgggtggccaaccacacctcgcccgatgcccgctggatcgaggagcgtccggccgactggtatgtgcgcgactcgctgggcaacaccatcgtgcagtacgactggacggacatcgccaagctcgactacggcaacacggacatgcgtgccgcaatggcggccgccatgcgtttctggctcgaccgcggcatcgacggattccgctgcgacatggcgtgcgaggtacccatcgacttctggcagcagacgctgcccgcactgcggaaggagtaccccggcatctacctgctcgccgagggcgaagcccccgcattgcacgacggggcgttcgacgcctcgtatgcgtgggagttgcaccacctgctgaacgacatcgcacagggacggaaaagcgccgcagacctgcgtgcctacgtcgccagggatgccgctgccatgccgcgcgaggcgttccgcctgatgttcacctcgaaccacgacgaaaactcgtgggccgggacggaattcgagcgcatgggcgacgcggcacgcgtgatggcgttgctgaccttcacgctgcccaacgggcagccgctcgtctataccggacaggagatggggttcgaccaccgcttcgagttcttcgagaaagaccccgtccccgcgtgggaacataacgggtttacggatttctacaccgcactgatccggctgcgccacgagaacccggcgctcgcggccggagaacgcggcgggcaggccgcatacccgctcggagaacgaacacccgacggcctgatgctgttttcccgcacggccggcggcaacgaggtgacagtcgctgcgaacctcagtgcggaggaggtcgcatttgacctgccgttcgagggctcgcgccgcgagttcttcaccgggaaggaatacacgggcggcacccgcaccgtgcttcccgcatggcagtggctggtcttcgcacaagacaggagataagggttgcggacatgcgccggggatgcgcggaaacagcgccgggaacccgatagcacccgacgggaatagacagtaaaccatccgagaagcacggggatgcgcatgagaagcacaaggatgccccgggcgaaacgggaatcgctggaaaccgattttttgctaactttacaaacgacgatattttgaaccgatttttcatgacactcgcagcagccggactgctctcctgcacagggacaggacagtccgcattcgaccccgcctcggtggcagacgcctcgggcgaggttacccgcgtcgaacccctctcgtggtggacgggaatgcagaccccgctccagttgctcgtcaacggggccggcatcgcggcatacgacgtccgcatcgaaggcggacagggcgtcggggtgaaggcccgccacaaggccgacagtcctaattacctattcgtggacgtggaggtgcaacccgacgcggagtcgggcacctactacctcgtattctcgcagggggaacggcagttcaaggttccctatcagatcgcggcacgcgccgaaggctcggtcgcacgcaggagtttcaccacggccgacatgatctacctcctgatgcccgaccgcttcgccaacagcgatgcgtcgaacgactcgacgccccacacgcgggagcgcgccgaccgcagcgccttcttcggccgccacgggggcgacctgcaggggatgatcgaccacctggattacatcgcagggctgggcgccacggccgtatggcccacgccgctgctgctggacgacgaacccgaaggttcgtaccacggctacgcctgcggcgactactaccgcatagacccccggtttggctcgaacgaactgtatagggagttcgtaggcaaagcccacgaccacgggctgaaggtgattatggacatcgtcaccaaccactgcggcacgggccactggtggatgaaagacctgcctttcagggactggatacaccagttccccgaatacaccgggacgaacgtctgcttctcgacgaacatggatcccaacgcttcgcgctacgacctcgacctgcaggagagcggctggttcgtgccgtcgatgcccgacatgaacctcgacaatccctacgtgctgcaatatttcaagcaatgggccgtgtggtggatcgagtatgccggcctggacgggttccgcgtcgacacctacccctacaacgaaaaggtgccgatgagcgagtggtgcgcggccgtacgcagggaataccccggtttcaacatcgtgggagaatgctggacgtcgtcgatcccccaactggcatactggcagggcggcaatcccaacaaggacggcttcgactcgcacctgccgtcgatcatggatttcccgctgcaggaggccatctgccgggcgctgcccaccgactcgctccgctggggcgagggcatgacgcgcgtctacgactgcctgtcgcacgatttcgtctaccatgacctgtcgaaaatgatgatcttcgtcgccaaccacgacaccgaccgcatcggcgacatcgtacgcagaaaccccgaccggctgaaactctcgatggcgatgctggccacgatgcgcggcatcccgcagatattctcgggcgacgagatgatgttcacctcgaaagacctctcgcagggacacggcgggctgcgcgtggatttccctggcggctgggagggcgacgcggtgaacctgttcgacccggcgcagcgcgatgccgtacaggcagggctcttcgactacacgcagcggctcttccaatggcgcaagtcgaagcccgtgatccacaacggccgcacgatgcacttcctctcgcgcgacaacacctacgcctatttccgttatgacgacaccgacgcggtattcgtcttcatcaacaactcgcggggcaagaaacaggtgccgtggtcgcactatgccgagatcgcctcggggctgagcgacgggcgcaacgtcctgacgggcgaagccacggaggtggacgacgccaccacggtcggcccgcggcaggcgctgatcgtagaattcaaacgtaaataacaagaccgaaccatgaagaaaatatttttatatatctccgcgctgctggccggtgcagcctgcacggcacaggagacgctcctctcgcccgacggccgcctccgcctggaattcagcctggcggatggaggccgccccacctatacgctcgattacaaggagcgccccgtgatcctacccagcggcatggggctcgaactgcgtggcgaagccccgaagctggaattcggggctgaaatccgcaagggcgaaccagggcgcccggtatcgctctacgacgggttcaccctcgggcaggtggcccgcagcgagtccgaccagacatggcgtcccgtatggggcgagcaggccgagatccgcgaccactataacgaaatggccgtcacgctgcatcaggccgcgacaggccgcgacatgacgatccgcttccggctctacgacgacgggctcggattccgctacgaattccccgaacaggagtcgctgacctatttcgtcatcggcgaggagaaaacacagttcgccatggcgggcgaccacacggcattctggatcccgggcgactacgacacgcaggagtacgactacacggagtcgaagctctcgcagatacgggagctgatgcccggcgccatcacgcccaactcgtcgcagacgcccttctcgcccacgggcgtacagacggccctgcagatgaagagcgacgacgggctctacatcaacatccacgaagcggcgctggtcgactatgcgtgcatgcacctcgacctggacgaccggaatttcatcttcacctcgcaccttacgcccgacgcacaggggtggaaaggctacatgcaggcgccctgccacaccccgtggcgcacggtgacggtctcggacgacgcccgcgacatcctcgcctcgaagctgatcctgaacctcaacgagccgtgcgcctatgacgacacctcgtggatcaagcccgtgaaatacatgggcgtatggtgggaaatgatcaccggcaagagcgactgggcctatacgcgcgacgtgccgtcggtacagctcggcgtgacggattacgcccggtgcacgcccagcggccgccacggcgccgagaacgagaacgtgaagcggtacatcgacttcgcggcggcacacgggttcgaccagctgctcgtcgaaggctggaacgtcggctgggaggactggttcgggcacacgaaggattacgtcttcgatttcgtgaccccctaccccgatttcgacatcgccgcactgaacgaatatgcgcacgggaaaggcatccggctgatgatgcaccatgaaacgtcggcttcggtgcgcaactacgaacgtcacatggaagcggcctaccgcctgatggacaaatacgggtacaactcggtcaagagcgggtacgtgggtgacatcctgccccgcggcgagcaccattacgggcagtggatgaacaaccactacctctatgccgtccgccgggccgccgaccacaagatcatggtcaacgcccacgaggcggtgcgcccgacgggcctctgccgcacctaccccaacctgatcggcaacgagtcggcacgcggcacggagtaccaggcgttcggcggctcgaagccccaccatgtgacgatcctgcccttcacgcgcctgcagggcggcccgatggactacacgcccggcatcttcgtgatggacgtcgcggaggtcaaccccggcaaccactcgcacgtcaacgcgacgctcgccaaccagctggcgttgtacgtgacgatgtactcgccgctgcagatggcggcagacctgcccgaacactatgaaaaatacatggacgcgttccaattcatcaaggacgtggccatcgattgggacgagagccgctacctgctggccgagccgggcgactacatcgtcgtggcgcgcaaggccaaagacacgggcgagtggttcgtgggcggcgtgacggacgagaaccgccgtacggtgacactcccgttcgactacctcgatcccggcaaggagtacgtggcgacgctctacgccgatgcccccgatgccgattaccagaccaatccgcaggcgtatgtcatccgcaccgggaaggtcggacaacgcacggaactcgacgtggagatggcgcgcggcggcggctttgcaatctccatccgcgaagctaccgacgcagaccgcaaactccgcaggctgaaataacgggaaatgccgtgcggacggcaatcatgccgggggcccgcacagccggcgccggcgctgaacccgtaccccggcacggccgcggacgacagcagaccgtccggcctccactgccagccagcatgcggcactcggcaatgtccggcaacggaatgcccgcacagccccctcaaaaaatcctttgccccttgttccataggaacaggggcttttttatgcgtatttttaaattattttgctatttttgccctcggtagcacccaatattcacgctcaaaatcaaaaccatgacactcaacgaataccagcagcatgccctcgaaacggcaatctatcccgaaaaccgtcgcatcatctaccccacgctcgggcttacgggcgaggcgggcgaagtggccgacaaggtcaaaaaggtcatccgcgacggccacgaggagttcaccgacgagaagcggctggagatcgtcaaggagatcggtgacgtattgtggtactgcgcgacgctcgcccgcgacctggggtacgaactggacgacgtggcgcagatgaacgtcgacaaactccgctcgcgcatgcaacgccacatcatctcgggcagcggcgacaaccgctaaggacatggaagattatatcttacgggagatcaacaggatcggggagctgatcgccgccctgctgaataaaatcgggctgatgagacaatcggcctccccggagcagatacggacgacggccaagacggagctggccgagaaactggacatcgacatcgacacgttgctggatgagccggatttcatcggccggcttacggacgaatacgggttcggcgaccaggaactggacaagttcgccgaactgctcttcgacatggcggccgcatcggagcagcacgcggaacggctgcgcctcgcggctgccgtcggcgcgatatacagttatctcgacgcaaagaaagccccggcgtcgctgaaccgctactacattctcaaagacctggacaagtacatcaaagaacctcaataaatggaacaggaaaaacaacttacgtcattgcccgagaacgcttaccggaaactcaaaccgggcgaagagtacacgcccatcatgcccgcctcatcgtcgcccagggaggtgacgccctactcggtcacgatgggtatcgtcatggccatcgtcttctcggccgccgcggccttcctcggcctgaaggtcggacaggtattcgaagcggcgatcccgatcgccatcatcgccgtcggcatgggcaacgtgatgggtaagaggaacatgctgggacagaacgtcatcatccagtcgatcggcgcttcgtcgggcgtgatcgtcgcaggtgccatcttcaccctcccggcgctctacatcctcgggctcgacgcggcattttaccaggtgttcctctcgtcgctcttcggcgggctgctgggcatcgtgctgctgatcccgttccgcaaatatttcgtcaaggagatgcacgggaaataccccttccccgaggctacggccacgaccgaggtgctgatctcgggcgagaagggcggcaaccaggccaaactgctggccgtggcaggtctcataggcggcctctacgacttcgcggtaggcacgttcggcatgtggacggagtcggtatcgacgcgcatctgcgcgtggggacaggtggcagccgacaagttcaaggtggtattctcgctcaacacgtcggccgccgtattgggcctgggctacatcatcggattgaaatacgccatgatcatcacggcgggttcgtgcctggtgtggttcctcgtcgtaccgctcgtcgggtcgctggccgacacgatcgacccggcggccatggcctcgctgctgggcgtgacgcgcgccgacatcctcgccgaccccgccagcatcttcacggcagaaaacctcttcgccttcatcggcaaaccgctcggcatcggaggcatcgccatggcgggcatcatcggcatcgtcaagcagtcgaagatcatccgccaggccgtagggctggccgtatcggaactgggggggggcaacaaaaccgccccggctgcggtagaacgcacgcagcgcgacttgacgatgaagcggatcctcacgatcctgatcgccacgctcatctcggtcttcatattcttccacttcgggctgctggacggctgggtacaatccgtcacggccatcctgatcgtcttcgtcatcgcgttcctcttcacgaccgtggcggccaacgccatcgccatcgtcggcacgaaccccgtgtcgggcatgacgctgatgacgctgatcctctcgtcgctggtattggtgagcgtcgggctgagcggcacgacgggcatgacggcggcgctgatcatcggcggcgtggtctgcacggcgctctcgatggccggagggttcatcaccgacctgaagatcggttactggctcggcacgacgccccgcaagcaggaggcctggaaattcctcggcacgttcgttgctgcggcgaccgtagccggggtgatgatcatcctcaacaaatcgtacgggttcgtgggcgaaggcgccctcgtggccccgcaggccaacgccatggccgccgtgatacaacccctgatgacgggcgggcagaccccgtggatgctctacttctgcggcgcggcactggcgctggtgctgacctcgatcggtgtcccggccctcgcattcgcgctgggcatgttcatcccgatggagctgaacgcaccgctggtcgtgggcggcctggtggcatggttcgtatcgaaccgctcgaaggacgaggggctcaacaaggcgcgtttcgaccgcggaacgctcatcgcctcgggcttcatcgccggcggcgcgctgatgggtgtggtgagcgccctcttgaaattcgccgaggtggactggttcctgagcggctgggcggcctcgaacgccgccgagtggacggggctggcgatgtacctcgtactgatcggctatttcgcatggcacacgctccgggcaaaaaaagaggaataaaccataaacagatattgtcatggatttaaaagaaagattcctgaaatacgtctcctacgacacccagtcgtcggaggagagcacgacgttcccttcgaccgaaaaacagaaagtcctgctggccgccctgcgcgacgaaatggaggcattgggcatgaccgaggtctcgatggatcagtacggttacgtgatgggcaccgtccctgcgacgccgggttgcgagaatgccccggtgatcgggttcatcgcccatgtggacacctcgcccgacatgagcggcaaggatgtcaaaccccgcgtcatcgaggagtacgacggctgcgacatcgcactgaacggccagctgacgatgcgggtcacggatttccccgagctggagttcttcaaggggcacacgctgatccataccgacggcacgacgctgctgggtgccgacgacaaggcgggcgtggcggaaatcatgaccgccgccgagtacctgctcgcacacccggaggtgaaacacggcaagatacgtatcggcttcacgcccgacgaggaggtgggccgcggggtcgatttcttcgacgtcagggccttcggcgccgacttcgcctacacggtcgacggcggcatggagggtgagctggaatatgagaacttcaacgccgcaagcgccaaaatcgacattcagggacgcaacgtccacccgggatacgccaagaacaagatggtcaatgcgctcgacgtggcgtgcgaactgcaagggctgctgccggccgccgaacgtccgcagtacaccgaaggatacgaagggttctaccactgcgtagggctgaacggcacggtcgagaaagcctcggtcagctatatcatccgcgaccacgatgcggagaaattcgagcagaaaaaggtattcatgtgggcctgcgtcgaccttttgaagaagaaatacggcgacggggtgctgactctgacgctcaaagaccagtatttcaacatgcgcaagatggtcgagccgcacccgcaggtgatcgacaaggcgctcagggccatggaaatggccggcgtgaacccgatcgtacgccccatacgcggcggtacggacggcgcacgcctgtcgttcatggggctgccctgccccaacctcttcacgggaggcatgaacttccacggcaaattcgaatattgctcgctcaccacgatgcacaaggcagagcaggtgatcctgaacctggcgcagttgtgggcaaaataacataacgtatatatggatagcttcggttttctgaaagtggcggcggccgtgccgcacgtacgggtcggcgactgcgatttcaacgcggagcgcatggccgctatggccgacgaggcggcacagcggggcgtggagatcgtcgcgttccccgagttggccctgacggcctacacctgcggcgacctgctgctgcaacccgcactgctcgacgcggccgacgaggcgttagcaaggctggtacgcgacacgcgcaagttgccgctgacgctcatcgcgggggccccgttgcgccacggacaaacgctctacaactgcgccgtggtcttcacgcaggggcgcatactgggcgtcgtccccaaaacctatatccccgactatacggaattctacgagaaccgctggttcgcatcgggcgcaggcatctccgaagagacgatccccgtcgcggggcaggctgcggatttcggcgcaggcctcacgttcgaggtcaacggcacggagttcggcgtggagctgtgcgaagacctctggacggcagtgccgccctcgtcgcacatggcactcagcggcgcgaaggtgatcttcaacctctcggcatcgcccgaggccgtcggcaagcacgcctacctgcggcagctcgtagcgcaacagtcggcacgcacgatagggggttatgtctactgctcggccggcttcggcgaatcatcgactgacctggtattcgccgggaacggcatcatcgccgaaaacggaaagatcctgcgcgaagcgaagcgtttcgtgctcgaagagcagttggtggtggccgacctcgacatcgagcggctggaattcgaacgcctcaggaacacctcgttccgcgtgaatgaaggcgcggcggagaacaccgtgatcgaaatggaaatccccgaagggctgcgcgcggcggcgctcgaccgcgaaatcgacccgatgccgttcgtgccgcaggacgaagcgcaccgcagccagcgctgcgaggagatcttccagatacagtcgcacgggctggccaagcggctggtacacacgcgctgcgagaaggccgtggtcggcatctcgggcgggctcgactcgacgctggcgctgctcgtggcggtacgcacgttcgacaagctgcaactcgaccgcacgggaatcatcggcatcacgatgcccgggttcggcaccacggatcgcacttacaacaatgcgctggagctgatgcgcagcctgggcgtcaccgtgcgcgaaatcccgatccgcgacgcctgcctgcaacacttcaaagatatcgggctcgaccccgaagaccgctcggcggcctacgagaacagccaggcacgcgaacgcacgcagatactgatggacgtcgccaacatggagggcgggctggtggtcggcacaggcgacctgagcgagctggccctgggatgggcgacttacaacggcgaccagatgtcgatgtacggcgtgaacgcctcggtgcccaagacgctggtgcgccatctggtaaaatgggtggccgacaccgagtcggatgcgggggcccgcgccacgctgctcgacatcatcgatacgccggtcagcccggaattgctgccggcggacaaggacggcaggatcagccagaagaccgaagacctggtaggcccttacgagctgcacgatttcttcctctacaatttcatccgcggaggttatcgtccggcgaagatcctgttcctggccgaacaggcattccgcggcagctacgaccacgctacgatccggaaatggctggaggtattcttccgccgcttcttctcgcagcagttcaagcgctcggcaatgcccgacggcccgaaggtcggttcggtggccctgtcgccccggggcgactggcgtatgccttcggacgcctcggcagccgtatggctcaaggaactcgaaacactgtaaaccgtaaatacgaataaataaaaatgaagaaaacccttttgtccatcgccgcgtcactgctgctcgcaggcggcaccgcgtcgacacaggactggcaggaagcactgaaaaaggccgcgacggaggccgcagacaaggcgacaggcggcaaactgacccaatatgcgctggtcgggacatggaactactccgctccgggcgtgaaattcgaaggcaacgacctgctgagccagctcgggggatcggcgctcgaaggtaccgtcaaaagccagctcgacaaggtctaccaaacggtgggcatcaagcccggcgcaggttcggtcacgttcggcaaagacggcgcattcagtacccaaatgggcaattacaaattgtcgggcacctatacgttcgacccttcgacccatgtggccgcgatgaaattcgccaaggagaagctcggcaaggaaaagctcgacctgggcgaggttccggggcacgtctacctcagcgggacgaagatggtactggtcttcccggtcagcaagctcatcgagatcatcaaatcctacggcagcaaaatctcgtcgatggagactatcgtcgccctgctcgaacagtacaagaacgtatacatcggattcgaattcagcaaggaaacgggagaaaatgcgaaatagttgaaaaaaattcatcattttttcaaaatgacagattcacggcggatctgtcattttttattacggatatttaccgatcgctccccgcacttccccggacagtaagcagatggggtgcagaagtcgcaaacggcataagtaaaatattttagcaatttcttaaagaacttgcaaaactcgaacagatacattatttttaccaccgaacagattccacaaacccttaaacacagattgactatgaacgagcaagcacatcagtacgtcgaagatttcatggcgcaactaatcctccgcaatcccaatgagccggaattccaccaggccgtccgcgaggtcgccgaatcgctggctccccacatcgtggcgagccccgtattgcagaaaatgaaagttctggaacgcatcgcggaacccgagcgcgtcatcattttccgtgtgccctggctcaacgacaaaggcgagatcgagatcaaccgcggctaccgcgtgcagatgaacagcgccatcggcccctacaagggcggcatccgcttccacccttcggtcaacctgtcgatcctgaagttcctcgccttcgaacagaccttcaagaacagcctcacgacgctgccgatgggcggcggcaagggcggttcggatttcaaccccaaggggcgctcggacaacgaggtgatgaaattctgccagtcgttcatgaccgaattgcagcgccacatcggacaggacaccgacgtcccggcaggcgacatcggcgtcggcggccgtgagataggcttcatgttcggacagtacaagcgcctgcgcgacgaatttacgggaacgctcaccggcaagggacgcgactggggcggcagcccgctgcgccccgaagcgacgggctacggcacctgctacttcgcacaggagatgctcgccacgcgcaaggagtcgttcaaaggcaagaccgtctgcatctcgggatcgggcaacgtggcacagtatgcctgccagaaggcgacgcaactcggtgcgaaggtcgtgacgctctccgattcgtcgggttacatccacgaccccgaaggcatcgacgaggcaaaactggaatatgtaatggaattgaaaaatatcttccgcggacgtatcaaggagtacgccgaccgctatccgtcggccaagtactaccccggcgagcgcccgtggggcgtgaagtgcgacatcgccatgccgtgcgccacgcagaacgagctgaacggagaccaggcgcaggcgctcgtggacaacggctgcatctgcgtagccgaaggggcgaacatgccctcgacccccgatgccatccgcatcttccagcagcacaagctgctcttcgccccgggcaaggctgccaatgccggcggcgttgcgacctcggggctcgaaatgacgcagaactcgatgcgtatcatctggtcgcccgaagaggtcgacgcaaaactccgctcaatcatggtgaacatccactcggtatgcgtgcagtacggcacccagcccgacggctacatcaactacgtagtcggagccaacatcggaggcttcatgaaggtcgccaacgccatgctggcgcagggttgcgtataaccggcagccaaagtatcaagtattggaaaatcccgggcttccttgccagaagtccgggattttttattgtccgtgcgccaaggggatcatgccgaggagggattcgtgcggagacccgcaccggaagcatatccggccggaaggcggattacaggaacagcacagccagcgtcgcgacggcaaagccgccgcagaaacccgcaagcacctgctgtccgttatggcagcccaggtaaaggcgtgcggaggccagtgcacccgcacagagaatggcgaccatcagcggcaccatcatgttgcctacgcccgcaacgttcatcaccaccagcagcgccacggcagcgcccatggccgtaaggtgcaggctgatcttccagtagaacgacacgacgaagcagagcacttcgcagcacgccgcggcgatcatgaacttgcgcaggaagatcgccgacgggatcttggcgatggtgatggcgcaaagcacgtagcagacggccccgaccagcagcggcagcagccgctcgcgccggttgtcgatcttgaagtcggaaatgcgtcccaatgagcgcagcacgcccaacgccagcagggggatgatcatcgcatagagcacgacgacccacagcaggtagaacttcacattggcgggataatgcgcgaaaacggtgagcgtcagcaacacgacgatcaggtagaggggcagcaggaacgggtgcagcacccacgatattccgttcgaaagtttcttatacatcattcaaatttatcacggcctcccgccccgcagctgtccggcaattgtccatccggcgggaaggcatatttccggcagcacggccgcccggtaaaagggcgtacgcgaagccgccgggtcaaaacttcgctatatctgtttgcggagccgggcgacgggaatacccagcatctcgcggtatttggccaccgtgcgccgggcgatgcggtaacccttgccgttgaggatgtccatcagcgtctcgtccgtcagcggatggcgcttgtcctcgtcgtcgatacactcctgcaggatattcttgatctcgtaactcgacacctcctcaccgctgtcggtctgcatcgcctccgagaagagcgacttcagaagtatgatgccgaactgcgtctgcacgtacttgctgttcaccacgcgcgagatggtcgacacatccagccccgtgcggtcggcgatgtccttgaggatcatcggccgcagtttcgacttgtcgccgtccttgaaatattcctgctggtagtccagaatggtctgcatcgtacgcataagcgtatcgtggcgctgtttgatggccgatatgaaccatttggccgagtcgatcttgttcttcacgaactggatcgcctccttgtccttctcgcggacaaggccgtcggcaccgaccatttcgcggatcatgtccatatagcggcggttgacgcgcacctcggggacgttatacgaattgagcgacagctggaaatgcccgtcctgatagtcgaggatgaagtcggggatgatgtagggcgtcgtgtcggttccgccctcggcatagaggttgccgggcttgggcgacaggtgcctgatctcggcgatggcctcgcggaaatcgtcctcggaaacctgcaggcgcgacatcagtttttcgtaatgcttcttgacgaactcgtcgaaataggcagtcagtatcttgcgcgccagccggcggggccgcgaattgatagggatctgcgccatttgcagcaacaggcactcctggagattgcgggcgcctatgccggcgggttccagttcatggatgatgccgagcagtttctccagctcctcggccgaggtctcgatcccgaccgtgaaggcgatgtcgtcggccacggactccaggtcgcggcgcaggtaaccgtcctcgtcgatgctcccgaccaggtatacggccagtttcatctcgcgctcggaaaggttgcggaaccccagctgctcgatcaggtactcctgcaacgaccgtccctcggtcaggaagaccgggcgctgcttgtcgtccttcgagtagttattgatacggcttttataggaaggggtgtcgtcttcacgcaaatactcgtcgaccgaaatctgctggggctgttcctcgtcctcggcagcacgatcctcttcctccagcacgatattgtcttcgatctcctgtttgatacgctgttcgagctgcacggtgggcagctccagcaacttgatcatctgaatctgctggggcgagagcttctgctgaagcgacagtacctgtttctgattaatagccatactttttccaaattaagaattagagattccgaatttggtttcttcttgggggttagtatacaacacaaacggccgcagccggaaaatcgtatggaaaagcgggatttcgggacttgcgccgcacagcccggacaggaaaatgctcgagttcgggttatgcagccggtacgaaacagccttcccaggtggttttaaaactcggcgttcttcggcgtgcgcgggaaaggctgcacgtcacggatattggtcatgcccgtcacgaaaagcagcaaccggtcgaagcccaggccgaagccggagtgcggggccgaaccccagcggcgggtatccaaataccaccagagttccttttcgttcataccgagctcctgcacccttgcacgaagcttgccataatcggcctcgcgctccgaaccgccgatgatttcgccgattccggggaataatacgtccatggcgcgtaccgtcttgccgtcgtcgttctgcttcatgtagaaggccttgatatccttggggtagttgatcaggataaccgggcgcttgaaatgctcctccacgaggtaacgctcatgctcggactgcaggtcgcacccccagtcgcaggggaattcgaacttgcggcccgaagccttcaggatctcgacgccttcggtgtaatcgaggcgcttgaaatcgttgtgcagcacgaagttcagacgctccagcaatcccttgtcccacatcttgttcatgaactcgaggtcttcggcacagttgtccagcgcatattggatcagatacttaaggaaatcctcggccagttccatgttgtcctccagttcgtagaaggcagcctcgggctcgatcatccagaactccgacgcatggcgcggggtgttcgagttctcggcgcggaacgtggggccgaacgtatagatacgtcccagcgacaaggcccccagttcgccttcgagctggcccgagacggtcaggttgcacgacttgccgaagaaatcctgcgcatagtcgaccttgccctcatcggtcttggggacatcgttcaggtcgagggtcgtcacctggaacatggcgcctgcgccctcgcagtccgaggccgtgatgagcggcgtatggaaataatagaagccctgtttattgaaatactcgtggatggcatacgccatggcgtggcggatgcgcaacacggcgccgaaggtattggtgcgcgggcgcaggtaggcgatctcgcgcaggaactccagcgagtgccccttcttctggaggggataggtttcggggtcggccgtgccgtacacctcgatcttcgcggcctgcacctcgacccgctgccccgacccgagcgattcgacgagccgtccgtcgacgcggatgcaggcgcccgtggtaatcggcttgagttgctcctcgtcgaatttcgaaaggtcgacgaccacctgtatgttcgcaacgcacgatccgtcgttcagggcgatgaacgccacgttcttgtttccgcgcttggtgcgcacccatcccttgacgacaatgtcggtgtccacgacacccgacttcagaatttctacgattctctgcgttttcatatgatcaattttatctatgcctttaacggctctttttcgaacttacaaagatatccattatttgcgatttggcaaaaaaaaagtacctttgcctaacctatattaagaacacacgcatgaaacgtacgatactgctgacgacggccatcctctgcgccgcaggcacccgggcgcaggaggcatacgacctgctgatccccgagcccgaaaccccggtagcgctccgccccgtcgaagggggccgcatttaccgcacggaggtcattccctacgacaagcgccatgacgccgatgcccgcaacttagcgggcgccgacgcatatatggcctacacgcccgaaccgttcgccgcatcgggcgacgcggttgccgtcgggcaggtggtcgaaataccctacgtgtggacggacggggtcgtctacctgcatctggaaaacataggcacggcctacaccctcacggtcaacgacagcaaggtggccgaagtcgaagacccttcgacgcccgccgaattcgcattgacgccctacatccgcgaaggcaagaacgccatcgcgctgacgctgcgccacagtgccgccgaccggatcaacgccgtccccgcctcgcgcaaggctttcgagaactgttacctttacacgcagaccaaacgttcgatccgcgatttcgagatcgcgctcgtgcccgactcgacacgcaaattcggcgtgctggagctggcgatcgtcgcgcagaacggtttcaactacgacgaacccgtgaccgtaggctacgacatctactcgccgcagggcaagctgctcgagttcaacatgcaggaggtcacgatccccggacgttcgaccgacaccgtgcgcttcacgcccttcatctacggcaccaacgccaacaagtgggagccgggcgccaagaacccgccgctctacaaggtgatgctcttcacgcgccgcgacggggcttaccgcgaatacatgccgctgaagatcggcttcggcaagacggagctcgtcgacgggcgcctcacgcgcttcgacaaggagctgaaactggtcaaggccaggtacaacgccgctgccgaccgcaagacgaccctcgcggagctgaaaacgctcaaggccaagggcaacaacacgatatgccccgactatccgcagccggggtggttctatgacctgtgcgacgagctggggctctatgtcatcgactgcgccaacatcaacgcacccgaaaagcgtgacgaccggaaggtcggcggcacgccgtcgaacgacccgtcgctgggggacgaatacctcgaacgcgtgaaggcgatgtactaccgttcgcgcaaccattcgtgcgtcatcgcattcgcgctgggcggcgaatcgggcaacggatacaacatgtacaaagcctatgagtggctcaagtcggtggagaagtcgcgcccggtgatctgtgcggatgccgacggcgagtggaattcggatttgtaggcaatgaccgtcgaactgatcgtcataggtaaaaccgattcgaaggaggtcgcagcgctggtcgagatgtacgcccggcgtgtgaatttttactgcaagttcgcggtcacggccctgcccgacgtccgaaacaccaggaacctcacggtaaaacaacagcgtacggccgaaggcgaggccatcctgcgccagacaacggacggcgactacgtcgtactgctcgacgagcggggcgaggagatgcgctcggtggaattcgcctactggcttcagaaacggatgaacagcggcgtgaaacgcctggtactggtgatcggcggcccctacgggttctcggacgaggtttacaggcgcgccgatgcgaaactgtcgctctcgcgcatgaccttctcgcaccagatcgtgcgggcgatcttcgccgaacagatataccgggccttcaccatcctcaacaacgagccctaccaccacgaatagaccgatgcagcagcgccccgccatagccgtcgtagcccccaacgtcctgatgggcgtcgggctgaaagccatcctggaaaagatcatcccgatggccgacgtggagcttttcggcgatttcgaaacattcgcgcaagcaaccccggaacggttcttccacttcttcgtcgcggcacagctgttcgtcacgcacagttcgtatttccgcccgctgcgccacaagacgatcctgctttgcaacgggcagccgcagccggcctatgcggacatgcacagaatcgacgtctgcaccagcgaagagaccgtcgtacgcgatatcctgcgtatgcaccacggggcgcaccaccacgaacacgacatcgggggcgccgcttaccccgccggcgtacaactcacgggacgcgaggccgaggtactggccctcatcgcccggggctatatgaacaaggagatcgccgaccgcctgcaaatcgggctgacgacggtcatctcccaccgccgcaacatcatggaaaagctgggcatacgctcggtcgccgggctggcgatctacgccatgacggccggatatgtcgcggtcgacgaactctgagcgcctcctcacaaattaggattgcagcttccgaaataattccgttactttgcagctgaattaaacgtcttatcgtgcaccgcaaacaactgttcatagcattcctgctgctgccgctcctgtcggctgccgcggggaggcatacgtctgcacccctcccggcagtgggaaccgcggcgggacatgcggccacccaaggacaggcggaaacagaagtacaggccggggcggcagagcaggcgacaaccgcaggacaggccgtaaacggaggctccgcgggaattgggggacaagcaggaaacgcagggcaggccacgttcgggaaatacccggcgaccgaagacaattcgacagccgaagcgaccatgggcacggacgaggccgaccccacggccgtcgacacggtgatcgtggtggacaaggtgcaggtaacggccatcaagcagggcatggtgctgcgctcgcagcccgtggcggcagccatcgtcggcagccgcgccatcgaacgggggcatgtcgacgccctgaaaaacctctcgcagaacgtccccaacttctacgtccccgactacggatcgcgcatgacctcgtcgatctacgtccgcgggctcggggcacggatcgaccagccggtcatggggctcaacatcgacaacgttccggtgctgaacaaggacaattacgacatggagctggccgacgcagagcgcatcgaagtgctgcggggcccgcagtcgacgctctacgggcgcaacacgatgggcggcgtcatcaacgtctacacgctctcgccgctcgcgtacgagggtgtccgcctgagcgccgaatacggcagcggcgacagctaccggttcagggcttcgtcctattacaggataaaccccgacctgggcatggccgtgacgggctattacacgcatacgggcggattcttcgagaacctcgcaacgggcgagaaatgcgactgggagcggatgggcggcggacgctggaaggcgcagtggcgcaaccgtgcgggattgcggatcgacaatacgctgtcgttctcggtgctcgagcagggcgggtatccctatgcctacgtcggcgaggagatcgtgcacaacgggcagacagtcatccgcccgggcgagatccgctacaacgacccgtgctcctaccgccgcacgaccctcagcgacgggctcacggtgcgctacgacgccggcactttctcggtggcctcgatcaccagctaccagtattccgacgacgagatgatactcgaccaggacttcctgcccctttcgtatttcacgctcaaacaggcgcgtacggagcacaccctcaccgaggacatcgtattccgctcgcacgaacggggggcgtaccgctggctgctgggcgcattcggattctaccgccacggcacgatgaacgccccggtgcatttcaagcagaccggcatcgaggagctgatcctcaagaacgccaacgaacacgacccgcaatacacctacgacgcatgggacaacgacgagctgctgctgggcagccgcttccgcaacccctcggcaggcggggcgctctatcacgaatcgaactacacggccgggcgctggcgcttcaccgcgggcctgcgcttcgactacgaacacacccgcctgcgctaccgcagctccacgcagaccggctacacggcgaccgaccgcgtgagcggcacgacggggcactaccccctgtcgatcgacatccgcaatacgctcaagcggaatttcaccgaagtactgccgaaattttcggtgctctatgccttcgacgagatccacaacctctacgtttcggtggccaaagggtacaaggccggcgggttcaacacgcagatgttctccgacgtactccagcagaagatgatgaacgaaatggggttcgggacggtatacgacgcggataaagtcgtgagctacgaacccgaatacagttggaactacgaattgggcgggcacttttcgtgcatggaaggcgccgtgcggggcgatttcgcactcttctacatcgactgccgcgaccaacagctcacaatcttccccgaggggacgaccaccgggcgcatgatgaccaatgccggacgcacgcgcagtttcggcggcgagttgtcgctgcaggtatcgccgtggcagaacctcgacatcaatgcggcctacggatacacaaatgccaaattcgtccgttataacgacgggaaaaccgattacaagggcaactacctgccctacgcgccgcaacatacgctgtccgcaaatggggcgtggacgatccccacgggggtgcagtggctcggaaatatcgtcctgcaggccggtgtccgctgcgcggggcgcatctggtggaacgaggagaattcgctctcgcagcccttttatgcgctggtcgaagcctccctgcgtttcgaacagaaacactattcggtcgacatatggggacgcaacctcgcggacacgggttacaacgtattttatttcaagtccatcggcaacgaattcgtacagcgcggacgtcccaggacattcggcataacactgaatattaacctataacgacaataaaacaatgaaaaaactccttatcctgctcgccctcgcggcctgtgcggcatgcaacaccgaagacgacaacgataaccggcagacggccactttcgagggcacgctcaccattaccagcaaccagaccccgtcggcgacaccctttgtgacaaacaacataagtttcgaacttacggaagacaacagcggcctgttcaagctcacgatgtacaacgtacgtttcgcgcagtccatgccgatgtcactcaatatcgttatccccgaactgaaatacgaggactcggacaacgacggcatctacgaactgacgagcacggccgatccgatcatcccctacatcggcggcaaaccgtattacgacccgcaaaccggcaagggattcgcaatcccgatgttcaccggcaggctcgccaacggcgtcctggaggtgatcttcacctgccgcaacgcgcagattcccgtgggcgacgagacactcgaccacaaagccgtgtacaagggaacgattcttttgtaactttgcaccgaaaaacgtaacgatatgaaggcagaatacaaaccattcgtagacgagctcatcgagctctgcatcaaggaggacatcggcgacggcgaccacacgtcgctctcgtgcatcccctccgacgaacacggccgcatgcgcctgctgtgcaagcaggagggaatcatcgccggcatcgagatcgcgcaggtcgtattccaccgtctcgacccggagatggaattcgagcaggtactcagcgacggcgaccgcgtgaagcccggcgacgtggcgttctacgtctcgggacgcctgcgctcgctgctgcaggccgaacgcatcatcctcaacatcatgcagcgcatgagcggcgtggctacgcagaccgccgtttacgtcgaccgcctcgcagggctgcatacccgggtgctcgacacgcgcaagaccacgcccggcatgcgcgtgctggacaagatggccgtgaagatcggcggcggcgagaaccaccgcatggggcttttcgacatgatcctgctgaaagacaaccacatcgactttgcgggcggcatccgcaaagccatccacggcgcccgcgagtacctccgggccaagggcaaggatattcccatcgagtgcgaagtgcgctcactggaggacatcgacgaggtgttcgccgcgggcggcgtcgaccgcatcatgttcgacaatttcacgcccgcaatgacccgcgaggccgtgcagaaagtcgcaggccgctgcgagaccgaatcgagcggcggcatcacgctctcgacgatgcgcgactacgccgaatgcggcgtcgacttcatctcggtcggtgccctgacgcaccagatcaagtcgctcgacatgtcgctcaaggcctgcgaataatcaggacgcgctgtcgtcacagaatcgtccggacaacggttaatccatgaaacgcctgctccataccccgctggccctgttgctgcggcgcatcgcactgctctacgcggtactgatgctctgccgcgtggttttctatctctacaacgcgcagttgctggggacgatcggccggggtgagctgtggcagctgctcgccggggcgctcaagttcgacacggcatcggtcgtctatgccaacgggatattcgtcctgctggcgttgctgcccctgcatgtgcgcgagcgcggctggtaccgcaaactgatgtactggtactacgtcgcagtgaacgccgtgctggtcgtggctgtcaacatgtccgactgcgtctatttccggtacacgcagaaacggttcaccgccgatgaaatcttctttgccgacaacagcaattcggtgcagctcgtcggtaagttcatggctgaaaactggtacctggtactcgtcgccgcagccctcgtggcgctgctggcatggggttacggccgcaaggtgcgcgaggaaagcctgctgagccgcggctgggcctactacgtcggaagtacggtgatcttcgccgcaggtgcagggctctcgatcgcaggcatgcgcggcggcatgacccgcatgacacgaccgatcaccctttcgaacgccaccctctataccgacgacagcggcaaggcgaacctcatcctgagcaacccgttctgcatcctgcggacgatcggcagcgcgggaagcgtcaattacaaaaaatatttcacccccgaagagctgccgcagcattttacgcccgtacacccgcccgcggactgtgccgcggtgaacctggcagggcgcaatgtcatggtcttcatcatggagagcatgtcggccgagcattcggcctacctgatgccggaggtttatgccgggcgggaaaccaagggcttcacgccgttcctcgactcgctgatgcgcggcggactctgtttcaaacgcatgtatgcaaacggcacgcgctcgatacaggccatgccctcggtgctgggcagcatcccttcgttccggacgccgttcgtactgatgccgcaatcgctcggtgaaagccggcagttgccggccatgctccgcgaccagggttattcgacggcattcttctgcggctcggagaacggctcgatgggattcggggcttacgcccgctcggcaggcgtcgaacggctcgtcagccgcgaggactacgaggcgaagtacggcaaaggcgatttcgacggatactggggcatctgggacgaaccgttcctgcaattcacgggcgaggagctctcccggatgccggagcctttcttcgccacgctgttcaccctctcgtcgcaccaccccttcgtcgtcccggcacaatacgaggacaaactcccggacggatacacgaagatacacaagggcgtggcctacgacgacatcgccttccggctcttcttcgagcgtttcggaagcgaagaatggttccgccgcacgctcttcgtattcgtagccgaccatgtgtcctccgaaaaattcgccgcccaaacccgcagctatccgggcaactaccatatcatcggcttcatgtatacccccgacggcgccttgcggggcgaggtcagcgaggtcgtgcagcagctcgacatcatgcccacgctcctggggctgctgggcaacagggagccctatttcgcattcgggcgcgacgtgctgaacgaaccgcagcgaccgcaatggtcggtgagctgggacggggcgttccaggccgtgacgaacgacggcacgatccgcttcgacgacgcgcaggagacaccggcggcgtcaagcgccggggaatccctcctgcaggacttccgcgcccttgtccagcaatactattcccacgcagaaaaaaagagttacatcgtccatgattgaattcaaacccgtgcgcctcgaggataaacagaccatcgagcgctataccatgccctcgggcatctataactgcgacctcgcattcgccaacatgtactgctggcaggcgatgtatcgcagtgcctgggccgagatcgacggcttcctggtgatccgcttccagatcgggggcggagagaagatcgggtacatgcaacccgtcggcgaaggggatttcgcccggatcatccccgccctgcgcgaagatgcccatgcgcacggccagcggctgcgcatcatcggccttacggacgaggggcgcgagatggttcgcaacatgcacgccgggctgttcgcgttcgaatccgaccgcgggatggaagattacgtttacaacgccgacgacctgcgcaacctcacgggacgcaaataccagcccaaacgcaaccacatcaaccgtttcatggcggagtaccccggtttccggtacgagcaactcacgcgcgagcggttcggggagtgcatgcagctcgaacgcgaatggcgccgggcccacgaagggcacacctcggagctgtgcgccgaacagcgggccatgcagcgggctttcgaacatttcgaagaactggaaatgctcggcggctgtatctacgtgggcgacaggctgatcgcgttcacatacggttcggcggtcaacgaccatacgttcgacacgcatgtcgagaaggcggacaccgactacgacggcgccttcacgatcatcaacaaactcttcgcacagcaccttcccgcgcgtttcacgatgataaaccgcgaggaagacctcgggatcgacgggttgcgccagtcgaagctctcctaccaccccgccgtcatccagcacaaatatgcggccatccacctgcacccggatgaaatcgcctgcaaggagctgtggacggctgcgttcggcgacgaggaacagttcgtcgactcgttcctgatgcgctattacagccgccgcaggatgctgacggccgaatgcgaagggcgtacggcggccatgctccaccttgtgccgttcgagagcgagctgggacggtcgacctacatctacggcgtagcgacagcgcccgaattccgccgccggggactggccggcaagctgatgcgcgaagcgatgcggctcatcggcgagcagggcgacgaggcggccttcctgatcccgagcgaggagtggctgcacgggttctatgcaaaatatggcttcgaaggcgccgtcccggtgacattctcatcgcaagacggcttcgatttcgggacgggcgacgcctcgaaagacagggccatggtctggcggcgagcccccggggctccgctgcccgaggcactgcactgcacttacgccaagaggtagcatcgccctgctgcgccgcaacgcaaggtgcgatatcgcatccacgacaggaaagccgcagactgtaaagtctgcggctttccattttgcatatcgtcacccaaagtcgttaagatatggttccgccgtccaccttggtcgtagtccaggggacttctttcaccgaagaaatcacggcctcctgaccgacaaccgtcaacgtaatttcgtactccacgccagccagcagcgacggcatggtatcggccttaatggttgctgtgaattctttaccgtcgatcgtgcaggtcacggcaatggtaggctgaccggccataggtactacaagcgccttttcgccggcggccagggtaagcgtccccgtcgccgttccgaccggctccaccttgccgtctaccatgttaagcgtgccggtcgcatagattccaccggtaatctgtacctgggtgagattggcagcacctgtgtatccattgccggccgttgccagaaatgagagtttggaataggcgtgccccatctcaacggcgacagctcccgcattggcagcattgacagactggtgctggtagatcaaatcctgtgcggccgcatccttttgcgccgtcagcgtatattcagcaccactcgcggaggtagtcacggccaaagccgcaggcgcccatgcgaccagcgtaccgcccgtacgatccaccaaaataggatcgccctcgacagtccatgcatcggcactatatttcaccagtttcgttgcagcggtaacgccgggaataaaaacattgaaatcggctgcgtacggtttcgcctcggcacgcgtaacgacatcgagtgttgtcacacctacgaaatgtacaggcgcgatttcaggctgggggggggtaacttcgtcctgtttatcgcaagaacagaaaacggccgaagccatggctgcagcggcagcggcatagtaaaaaagtttcatttagatagtttattaaattgttatacattttttggacggcctgcaacccgctcaaacgaattcaaccgacagtctcaataatcctccttacagaacgaaatcatttacataacacataattgtttacttcataacacacaatttcgctctttaatgacattcaaagttaaataaaaaccatcacattgtaccatatgaaccgtagaagcatacataaaaagcatttttgtataccatatcgagctacttaatatagctcgtaggcggatatgatcacagtttcctaaaaatcgacgggaaaggcgcctgaaaccggcaaaatgccgtacctgcattacgcgaagcaggcagcagaaaaacccgccgcccaccgcaaaagacgaagacccggaaaaggcaaggcataaaaaaacccgaagttttcacttcgggttttgcgggggagagcccggaggcgaacaacgtccggggcaggcgattctgggctatttccgcgcgatacgccgcaggaagcactcgatcgtattctccatcaggcagcagatcgtcatcggccccacgccgccgggaacaggggtgatgaccgacgccttgggctcgatggcggcgaaatcgacgtcaccgcacagcttgccggtttcgggatcgcggttgacacccacgtcgatcaccacggccccgtcacgcaccatatccgccgttacgaacttcgggcggccgatcgccacgaccaggatgtcggcgcggcgcgtcacctcgcccaggttacgcgtacggctgtgcgccatggtcacggtggcattggcatccaacagcaatttcgagacgggaagcccgacgatattgctgcggccgatcaccacggcctccttgccggcgatctccacgcccgcagcccgcagcatcttgaggatacctttcggcgtacagggcagcgtacagggctgtttctgccacaaagccgccacattgaggggatggaagccgtcgacatccttctccttgtcgatcgcggcgatcaccttgtccgcgtcgatatgcttgggcaggggcagctgcaccaggattccgtcgacgccttcgtcggcattcaggtcggcgatgatgccgagcaactcggcctcgcagaccgactccggcttgcggatcgtcgtattgcggatgccgacttcggccgaggccttagccttgcccgtcacataggagacgctgcccgggtcttcgcccacgaggattacgaccagatgcggcacgcgtccgtatttcgcgccgaaagtagccacttcggcggccatttcggccttgagttttgctgagagttcttttccgctgataaccataccttatatataactaattttcaaatgcccaatgtccgatgtcggtgcggtggaagaggttgtcgcatccgatgcgtgcgacatcccgcagcgcattggcgcgtgcctcggcgagcgtggctcctttgcccacgacgaacagcacgcggccgcccgaggtgaggatgcggctgccgtcggccttcgtccccatgtggtaaagggcgccttccacccggtcgagccccctgatctcgcagcccttttcatagtctccgggatagcctttcgatgcgagcacgatgccgagcgtggcgaaatcgtgccatacgagctgcgtatcgccgccgtcggccacagcacagaagatatccacgatgtcacttttcaggcgtggcagcacgacctcggtctcgggatcgccgaaacgggcgttgaattcgatgaccttgatcccctgcggggtcttcatcaggcctccgtaaagcacgccttcgaacgggcagccctcggcgaccatcgcgtcggcggtcggttgcaacaccttctcgagcgcatagcgttcatcctcggccgtaatgaacggcaggggcgaatatgcgcccataccgcccgtattgggccccttgtcgccgtcgaatgcccgcttgtgatcctgcgccagcaccatcggccataccttatgcccggagacgaagcacatgaacgaaaattcaggccccgtgaggaaatcctcgacgacgaccttgcccgcgccgaatttgtcgtcgagcaacatgtccttcagggcggcatcggcctcctccatcgtctcggcgatcaccacgcccttgcccgcagccagcccgtcgtatttcagcacggcaggcagcggacgcgaagcgacatagtccatcgccgcggcataatcggtgaaggcccggtaaccggccgtcggaatggcgtatttggccatcaggtctttggcgaactccttgctcgactcgatacgcgcggcagccttcgtagggccgaaagcccgcagcccggcggccttgaacacatcgaccacacccgccgccaacgccacctcggggccgacgaccgtaaggccgatcccgttctgcgccgcaaaatcgcgcagccgctccacctccgtctcgcggatagccacgcactcggcctgcgccgcaatacccgcattgccgggggcgcaaaatatcttctccacccggggcgagcgcgacagcgcatccacaattgcatgttcacggccaccgccgccaataaccaaaactttcatacgaatacgaattaacagttttcaccgccgttatgccgccggacgatgtatgtacggcctaccgccgatcacaagtccggcactctccccaagcccctccctcgggagaggcttgtcgcagcggcaaaagtttttatttataccgtccgatttccgatcgccacggaagcggatttcaccttggcgaagtccggttcgggcggggcacaagcatcctgtttcccgcccgaaacgggcacggccaggcgaaaggtgccgcgataatcgaaaatcaatgtttgaaatggcgctcgcccgtgaataccatggcgatgcccttctcgtcggccttccggatcgagtcctcgtcacgtaccgaaccacccggctgcacgatggccgtcacgccgtattcggcagccagcgtcacgcagtcgtcgaaggggaagaagccgtccgaagccagcaccagcccttcggtgacgccggcggcatgcgcctgccggagggcgatctcggccgagccgatgcggttcatctgcccggcgcccacgcccagcgtacggccatccctgacggcgacgatggcgttcgacttgacgtgcttgacgatatgccagccgaaattcaggtcgtccatctgtgccgcggcaggttttgccttcgtcacgcacatatcggccgtgacggttttcgtcgccacgtcgagatcctgcaccagcaggccgccgttgacgctgacatattgcttggggtcgacggccccctgctgcatatcaacctccagcagccgcaggtttttcttcgtgcagagcacttcgagcgccccttcgtcgaatttcggcgccatgatgatctcgaggaagatcggtttcatcaactcggccgcctcgcgcgttacggtgcggttcgtggcgacgatacccccgaagatcgacaccttgtcggcctcataagccttcgtccaggcatccacgacatccttgccgacggcagcaccacagggattcatgtgtttgagccccacgcagaacggctcatcgaactcgcggacgatgcacagcgcggcattggcatcctggatattgttgtacgacaactccttgccgttgagctggcgggcaaaagccagcgaataaggcacctctttctcctcacggtagaacttggccgactggtgggggttctccccgtagcgcagcgactgcacgaggtcgaattcaaggaacagcttctcgttaagcccggcctgtgcacgcatataggccgcgatcatcgcatcgtactcagccgtatgggtgtatgctttggccgaaagtttcaggcgcgtagccttttccgtattgccgccggcacggatttcaccgagcacctgctcatagtccgcagggtcgcagaccaccgtgacgtcggcccagttcttggccgcagaacgcagcatcgaagggccgccgatgtcgatgttctcgatggcgtcctccatcttcacatcgggtttggcaatggtctggcggaacgggtagaggttcacacagaccatgtcgataaattcgatattgttatctttcagggctttcaggtgttcgggatcgtcgcgtcgcgccagcaggccgccgtgcacgttggggtgcagggtcttgacgcggccgtcgcagatctcgggaaagcccgtcacgtcgctgatgttgataacctcgaccccgctgtcggagagcagtttcatcgtgccgcccgtggcgatcacctcccagcccagggcacgcaggcccttggcgaaatcaacaacacccgttttgtcgctgacactgattaatgcacgcatatcgttattgttcctttaataatttattaatcgtttctatataaagcggatattccaccgcatgaatccgggcttccagctcggcgatgtcgtctccgtcgtatccgaacgcccgctgggagatgatcttcccgccgtcgagcgtcgcatcgacatagtggatcgtcacaccgaagaccttgacgccgtattccagcgcctgttcgatggcatgcgccccgcggaatgccggcagcagcgaaggatggatgttgacgatccgcccgccgtaagcccccagcagcacgtcaccgacgatgcgcatgtaccccgccaggcagaccagctccacgccggcttcgtcgagccgccgcacgatctcgcgctcgtagtcggccttcgaggcatactctttcggggcgaatacgaatgcctcgaccccgtgccccgcagcccgctgcacgaccccggcgccgggtttgtcgcagaccatcagcaccacccgggccgggatctctccccgctcgcaggccgtggcgatagcctcgaagttcgtgccgctgccgctggcaaagaccgcaaggcgtcgcacggccttagcggattacgacaccctcggtgtccgtgacgcgtccgatgacggccgccttctcgccctgctccgcaaggatggcgatggctttctccgcctgcgacgcatcgagggcgatgaccatgccgatgcccatgttgaagatgttgaacatctcgcggtgggccaccttgccgtatttctcgaggaagcggaacacgggcagtatctcccaagtgccctcctcgatttcgagtccctgcccttcgtgcaggatgcgggggatattttcgtcgaaccctccgcccgtgatatggctgatgccgtgtacgtcgcagctgcggatcacttcaagcacctgcttcacgtagatcttcgtcggggtgagcagcacttcgcccagcagtttgttcgacaactcgggatagaccttgtgcagatccaggcagttatccgcaaggatcttacgcacgaggctgaagccgttggagtgcacgccgctcgaggcgatgcccaccagcacatcgccggccctgaccttcgatccgtcgatgagcttcgatttctcgaccacgccgaccgtgaaaccggcgatgtcgtactcgccctcggagtacatgcccggcatttcggccgtctcgccgccgaccagcgcacaacccgcctgacggcagccgtcggcaacaccgctcacgatggcctcgatcttctggggttcgttatggcctacggcgacatagtcgaggaacaccagcggctcggcaccctgcgccagcacgtcgttgacgcacatggccacggcatcgacgccgatcgtgtcgtgcttgtccatctcgaacgccagcttgagcttcgtgcccacgccgtcggtaccgctcaccagcaccggctccttcacgttcagcgccgagaggtcgaacatgcctccgaatgcaccgatattgcccatcacgcccaggcgcgaggtcgatgccacgtgtttcttgatgcgccgcaccacttcgtatccggcctcgaggttcacaccggccttctcataactctgtgccattataatcttccttttaaagtagtccttaacattttacgtctttgttcacctcgtcgaccgactggtacaacgccgtgggatagtgccccgtgaagcaggccatgcacaaatccttgcggtttcccgccctgagcagtgccccgggcgacaggaacgccagcgaatcggcgcatatctccgcccggacaccgtccacctccttgcgcgccgagatcagctcgtcgcgggtcgaggtatccaccccgtagaagcaggggtgcgtcatcggggggctggcaatgcgcacgtgcacttcggtggcccccgcctccttgagcatcgtgacgatgcggcgcgaggtcgtaccgcgcacgatcgaatcatcgaccagcaccacgcgcttacccttgacgatcgtccgcacggccgagagcttcatgcgcacccctttctcgcgcagctcctgcgaaggctggatgaacgtacggccgatgtacttgttcttgataagccccatttcatacggcaggccgctcgcctcggcatagcccatcgcggcgctgaggctcgagtcgggaaccccgaccacgatgtccgcctcggcaggcgcctcgccgaagagcaggcgccccgactccttgcggtaggcatggacgttgcacccttcgatgtcgctgtcgggacgtgcaaagtagatatactccatcgagcacatctcgcaacgcttatactgcgagaaatcgcggctccggatgccctcgctgtcgatcgtgacgatctcgcccggctcgacgtcgcggacgaactccgcacccagcacgtcgaaggcacaggtttcgctcgacacgacatagccgtcgcccagccggccgatcgatagcggccgcaggccgtatttgtcacggcaggcatagatgcggttggcggtcatgatcaggaatgcaaaagccccctcgatcatgttcagcgcgtcgatgatcgaatagatgcgcggacggtcgtggtacttggtctccttcttgatcaggtgcgccaggatctcgctgtccgaggtcgactggaagaggctccccttgttctcgagataaattcgcagcaacgccgaattgacgatattaccgttgtgcgccagcgcgaaatcgcccgtgttgtggcggaaaaggaacggttgcacgttctcgatgccaccaccgccggcggtggtatagcgcacatgcccgatggccatgtcgcccttgagcgtcgagagcttttcctcgtcgaacacctcggtgaccaggccgccgcccttgatgcggcggaacgtcgcgtcccggtcgacggtcacgataccggcaccctcctgtccgcggtgctgcaaggcatgcaggccataataggtcagcgacgcagcgtccttgactccgaagacgccgaacaccccgcactcctcatgcaactcgcggtcgctaatctgccccatcaccattacccgacgattttctgcaaacgtgccaaaatctcctcgtaagcctcgcgcaccttgcccaggtcacgacggaaacgatctttgtcgagtttctcgttggtcgtcatgtcccacagacggcaggtatcgggcgacacttcgtcggcgagcacgatctccccgtccgacgtacggccgaactcgatcttgaagtccacgagtttgatgttcatcttggcgaaaaggttgcgcaggatctcgttgatacgcgaggtcatggcgtagatcagttcgagttcctcgtaggtcacggcacccaatgccacggcgtggtggtcgttgatcagcgggtcgcccagctcgtccttcttgtagcagatgtcgtagatgacgttcgacggctgcgtaccctcctcgatgccgaggcgctgggccatcgaaccggcgatgacattgcgcacgatcacctccagcgggatgatcgtcacccggcggcacacctggtcgcggtcgttgatcgtctcgatatagtgggtcttgacacccgccttctgaagctccttgaaaatcagggtcgagatggcgttgttcagcacgcccttgttttcgatcgtggctttcttgatgttgttgaaagccgttgccgcatccttgtagtggatgatgatcttgtcgggatcgtcggtgcggaaaacctgttttgccttgccttcgtagagcatttcgagctgtttcatggtgtttgtgagtttaagttttatgttgtactaatttttgcggaaatagtcgacggcattgcggaacagcgactgctccttctcgcctgcgatatttttgaagaggtttttctcgtaacgctccgtatgccccatcttgccgaggatctggccgtcacgcgacaccaggccctcgatggcatacgacgaaccgttggggttgtacggcgcctcggccgtcgcacgcccttcgggatcgacatactggaaggctacctgcccgttggcgaacagctcccgggcaagttcttcgctcacgacgaacttgccttcgccgtggctgacagcgatcgagtggatgtcgcccaggccaaagcccgcgagccacggggagttgagcgtcgagacgcgcgtcgagacgatctgcgaaatatggcggttgatgtcgttgcggaacagcgtcggcgaatccttggtcaccatgcccaggcggccgtaaggcagcaggccggatttgacgagcgcctggaaaccgttgcagatgccgaggatcagccctccgcggtcgagcaacgcatggatttcatcgcgtatatccttattgttgagtacgttgacgataaacttggcgctgccgtcgggttcgtcgcccgacgagaagccgccgctcagcacgaagatatgggcgcggcggatatgttccttcatttcgcggatcgaacgcaggatgtcgtcgcccccgaggttacacaacacgctcatttcgacctcggccccggccttgcggaatgccttggccgtgtcgtagtcgcagttggtgcccgggaacacggggatatagaccagcggatgttcgacggcttcgccccgataggcgaaagtccggggtgcgggctccgaggtcatcaccccggcatggttctcccccttgtcggggtaaacggccgcgaatttctcggtattggccttgtagagggcgtcgagcggcattttcacgccgttgacggtcaacaccccatcggctgcggtcatacccaacagcccggccgcaggatgggtcagttcgacggcgctctcgacaaggatcgaaccataggcgtatccgaagagttccgcctcgtccatctccacctcggcgccgatgcggttgccgaaagccattttggcaagaccttcggcgacacctccgaagcccaccgaccatgcggcgaggatattgccgcgttcgatattttcgctgacgaagccgaagttgtccttcagctgcgccgtgtcgggcatatggttctccctgggcgtatggcgcaccaggtagatacggttgccggccttcttgaaatcggtcgaaatgaccgtcccggcattcaccgtcgtgatgccgaaggccatcagcatgggcgggacgttgatatgctggaacgtgcccgacatcgagtccttgccgccgatcgagggcaggcccagttcgacctgcatcttcagcgcaccgagcagggcacccagcggcttgccccacgagcggggatcgcgggtcatgcgttcgaaatattcctggtatgagtaacgcatcctgtcataacgcgcgcccgcagccacgaccttggcagcagcttcgacgacggcatacgcagcaccgtggtaagggctccacgaggccaggtagggattgtagccgaaggccatgatgctggccgtgtcggtgtaaccgtcggtcgggagtttctgcaccgacacctgcgtttcgctgccctgcgtgcggccgccgaacggcatcagcacggtggaacggccgatcgtcgaatcgaacatctcgatcagaccgcgctgcgagacgacattgttgtctcgcaggttctcctcgaagcgttcggcaaacgtcgcgcccacgacctcgcgggcaaagggatcgcggttctccacctcgccgatcatggcttcggcataatgcttcgccccggcgctgtcgatgaattcacgggcgaggtctacgactttgcgccctttgttgaacatccgcatacgggccgtatccgtcacgtcggccacctcgaccgcctcgatattctcctcgcggcagtagcccatgaattcggcgacgtccttcgcctcgacgaccacggccatacgctcctgcgactcgctgatcgccagttccgtggaattcaggccgctgtacttggtcttcacacggtcgaggtagatgtccagcccgtcggccagctcgccgatggcgacgctgacgccgcctgcaccgaagtcgttcgatttcttgatgagccgcgtcacctccgggcggcggaacaggcgttcgagcttgcgctcctcgggggcgttacccttctgtacctcgctgccgcaggtttcgagcgacttggtgttgtgttctttcgacgaacccgtggcgccaccgatgccgtcacgccccgtgcggccgcccagcatgacgatcttgtcgcctgggacgggtttttcgcggcggacgttttcagccttcacggcaccgaccacggcaccgacttcgaggcgcttggccacatagtcgtcgtggtaaatctcgcgcacatgggtcgttgccagcccgatctggttgccgtagctggagtagcccgcggcggccttcttcgaaatgacgctctgcgggagcttgccttcgagcgtatcggacaccttctggtagatattgccggcacccgttacacgcatggcctggtagacgtagctgcgccccgacaacgggtcgcggatagcgccgcccagacaggtcgaagcgccgccgaacggctcgatctcggtcgggtggttatgggtttcgttcttgaattgcaggagccacttctcggtcgccccgtcgacatcgacatcgacgtataccgagcaggcgttgttctcgtcgctcacttccaggtcgtccagcagccctttcttgcgcaggtagcgggcgccgatggtcgccatgtccatcaggcagatgctcttgtgctcgcgccccagttcgcggcggatgcgcaggtagagggccagcgaatcctcgatctcgtcctttacgaacgattcctcgaccgtgatgccctccagctcggtggtgaaggtcgtatggcggcagtggtcactccaataggtgtcgaggatgcgcaactcggtctcgtaggggtcgcgcccctcggcacggaaatatttcaccacctcgcgcaggtcgtcggcattcatcgccagcccgtaccgcttgcagcagggttccagttcggcgtcggtcatcttggtgaagccttccagcacggcaacgggcttcacctcggcctgttccatgtcggtcagcacgtccagattcttctcgcgcgactcgaccgcgttgatatagtaatggcggatgcgcgccagatcttcgtcggaaacggcatcgtcgaacagcaacagcttcgacgagcggatgcgcacctgggccgacgggtcgatcagccgcacgcagtcgacggccgacgcggcacgttggtcgaactggccggggaggtactccacggcgatgtatttccgtcccgccaggtcgcacgaatcggtcacgctgtcggttaccacttcgccaaagacgctgtaacggctcttttcgagcagctctcggctgaacccgaacaggtcgtagacgttgagcaaccgcaggctgcggatgtccaggttcagattggtgttcagctcccggcgcaggctgtcggcctcgacccggaaacggggatgtttctcaacaaaaatccggtagttttccatgttatttcgtttgcacttattttacgaatctgtcagcccacgcggcaccgtattccccggcgtccatcccgacgaaggtgatatgccccatcttgcgcttcggacggctctcggtcttgccgtaaaggtggacatggacacccgggcggttttcggcggcgactctctcggccgcttcgagatcctgccccaaaatgttcttcatcacggtcggcgccacgagccgcggctcctgcaacggttcgcccagcaggaagcgcaccagttcgcggaactggttggtcgtgcacccctcgatggtatagtgccccgaattgtggggccgcggcgccatttcgttgaaatagaactccccgtcgcggatgaagaactcgatggcgaggatcccgcggtagcggcaggatttcatgaaccgctcgccggccgcagccatgcggctgcgcaggccgtcgtccatcccctcggcggggacgaagcacaggtcgaggatgccgtcgcggtggacgttccgcccgatggggaaatggatgacgcgctccccgttcgagaccatcacgatgctggcttcgaaatcgaacggcacgaacgcctccaggatgcagggtacggagagcatcggcagcgcacgcggcacgtcggcctcgtccttcaacaccaattgcccgtggccgtcgtatcccagcgtacgggtcttgagcaccgccgggaatccgatctcggccaaggcggcacgcagcgacgcctcgtcgtccacggcggcgtacaggggcgtccgcagcccgttggcgcgggcattgtccttctcgcgcaggcgatcctgcgaatcgtagagcgggcggaaaccctgcggaatgttgtatttcttttccagcgggatcagcacgctgcccgggacgttttcgaattcgtaggtcaccacatcgctgcggcggcaaagctcttcgagcgccgcggcatcgtcatacgccgccacgatgtgcccgtcgctcagcgcgaacgcgggggcgtcgggcgcagggtcgaggcacagcgtgcgcgccccgagcaggtgcgcctgctcgacgatcatcagccccagctgaccgccgccgatgataccgatcgttttcgttttctctgccatagccgcctcccctgccggattaaagttctgccgccagtacgtcggcggtctgtttcgcacggaacgcttcgagccgggcagccagctccgcatcctgcagtgcgaggatcgacacggctatcagcgccgcgttcttcgccccgttgatggccgtcgtcgccaccggaacgcccgcaggcatttgcacgatcgaaagcagcgaatccagcccgttcagggcgcgcgacttcacggggacgcccaccacggggagcgtggtcatcgaggccaccatgcccggcagatgcgcggcaccgcccgcaccggcgataatcaccccgataccgcggcttttggccgtcttggcatattcgcacagcaggtcaggggtacggtgagcgctcaccacgcgcttttcgaaatcgacaccgaattgtccgagcatggcaacggcatcggccatcacctcataatcgctcaccgagcccataataacaccgaccttcatacctttggttttaagtttgaaaaaaagacagaccgccacgacacgtatgtcatggcggtctggtatctatctgcgtattccgctcccggacacctgctgcccttgcatctgcgtactccgatcctgctgtcggcacgacgacgaatagaacgcagcggcctggccctgctgtttcttacgttcgcgttggtcgattctgtcggtagatgtcatggggaggtgttcggattaacctaacaattgtcaaaacaacgttacaaaagtagcgcttttcagccgatttacaaaatccccgggcatattctattgacaaattatcgacatttcgggattccgacaaaaacaaaaaatccgccgcagccggaaccggccgcggcggattgacatcggttcaacccgtccgtgctattcgcggctgaacgagtaaggggcatccccgggctccgtaccccgcgtgtaatcgggttcgggacgcatcgagaagcggacgccggcacccttcacgaggtcggaatggcgcaggaaattatgcgtataggatttcccgtcgaactgcacggctccgatataacggttctcggggctgttgtccggcgcttcgagcacaatcttattcccgttttcgaggttcacgacggccttgcggaacagcggcgaaccgacgacgtattcgtccgaagccgggcagacgggatagaaccccagggcggaaaagacataccaggccgaagtctggccgttgtcctcgtcgccgcaatagccgtcgggacaggccgaatagaggcgatccatcacctcgcgcgcccagtactgggctttccacggggcacccgcataattatagaggtagatcatgtgctgcgcaggctggttgccgtgggcgtagttgcccatgtcggccacctgcatctcggtgatctcgtggatgcggaatccgtagtagctgtcgtcgtagatcggcggcacgacgaataccgagtcgagcatctggacgaactgctcccggccgcccatcaggtcgacgagcccctcgacgtcgtggaataccgaccacgtataatgccacgagttaccctcggtgaaggcgtcgccccacttgtagggactgaacggcgcctggaacttgccgtccctgaggcgaccgcgcatcagacgggtttcggggtcgaagacattgcggtagttccgggcacgcgccgcccacttgtccagttcagcctggggacggttcagtttcttcgccacctgcagaatacaccagtcgtcgtaggcgtattcgagcgtacgtgccacgttctcgggaatgttcacgtcgtaagggatatatcccagctcgttgtagtactcgtgcccccagcgtccggtcgacgcaacggtcgggtgcacgtgctccgtggcatacaccatcgcatcgtagagcaccccgaggtctttgtcgttcgtgcccttcaccacggcatcggcaaccaccgaagcggaattgttgcccaccatgcagccgcggtgcccgggcgacgcccattcgggcaggaaaccgctctcacgggccgcattggcgagtccctgctggatttcggcgttcacggacgggtaaacgaggttcagcagcgggaagaggctgcggaaggtgtcccagaacccggtgtcggtatacatgtagccgggaagcacctcgccgttgtaggggctgtaatgcaccacctcgccctggtcggtcacctcgtagaacttacgcgggaagagcaccgaccggtagaggcacgaatagaacgtacggtactggtcgtccgtaccgccctcgacctcgatgcgtcccagcacattgtcccagcgcgcctgcgccttggacttcaccgtttcgaaatcgtctctgcccagctcccggaggttctgcaacgcctgctcgggagaaatgaacgacgacgccacgctggcgcatatctgctggccgcggcgggttgcgaaatgcaccttggccacggcatgttcgcccgtgacggacttctgtccttcgggatagagcaggttgctgccgggtttgtatccgccgggggcatcggtcagctcgatggcgctgaacggcgtatcgaagcgcacgacgaaccagttgcggaaattctccggcacgccaccgctgttgcgcgtggtgtaaccgacgatcgtacggtcgtcgaccatcccgacctgcgaaccacggtcgaaggcgtcgatcaccacacccgactccttcgagtcggggaaggtgaagcgcatcatcgcggcacggtcggtcggcgtgatctccacgcggatgtcatggtcggcgaggtaagtcttatagtaatagggtttggccacttcggactggtgcgaaaaccagctggcgcgcgactcctcgtcgaatttatcctccccgcgcacgggcatgagcgagaactggccgtaatcgttgatccacggcgaaggctggtgggtctgcttgaacccccgcacctggtgcgccccgtaagtatatgcccagccgtcgcccatcttgccggtctggggcgtccagaaattcatgccccacggcaaggcgatggccggataggtattgcccgtcgagagcgaaaaatccgactgcgtaccgaccagcgtcgaaacgtactccgaaggacggaggcgctgctccccggccgaaggacatgtgcacgaagcgagtgcggcggcgcagagggcggcaaatgcgatatatccttttttcatggccttccgatgtttagagttcataccacactgcgggttcggcacccatctcgaattcgagcacaccgcccgcggcgatgtcgtcgaaggcaatatagggtttcgtatacggcttgccattgagcttcaccgcctggatgtatttgttcgcggcggaattgttatgcgccgtgacggtcagcacaccgtcgcggacacgcacttcagccttgtcgaagagcggcgagccgaagaaatagcggcccccggcgggttcgacctggtagaaacccagcgacgagaggacgtaccatgccgacatctgccccacgtcctcgttgcccgaaagcccgtcgggccggtcgtggtagagcgtcgtcagtatctcgcgcaccttgtcggcggtcttccacggctgaccgatcatcgtgtagaggtagacgacgtggtggctgggttcgttgccgtgggcgtactgaccgatcaggcccgagatgtcgggcgaggcggctccctcgagcacggagctgacgacgaacagcgagtcgagtttcccggtgaaggcttccttgccgccgaagcagccgatcagcccctcgacgtcgtgcggcacgagccatgtgtactgccatgcgttgccctcgcagtagtcgtcggcgcggtgtgtcgagcggaacggattaaaaggcgtgcggaaccggcctttcgaatcgaggccgcgcatgaagcgggtctgcggatcgaagaaatggcggtaggatttgcttcgttcgaggaaatagtcgtaatccgcagttttgcccagctctttggcgacctgagccacggcccagtcggcgagggcgtactccatgtcgtaagccaccgcctcgttgaagaggtcgcaggggatatagccgtatttcatgcgcagatccataccacgctcgccgagcatcgccgactgcttgagcgcctcgtaggcctgctccctgtcgaagccgccgtagcctttgagcatggcgtcggccagggccgggataccgggattgccgaccatgcagtcggtttcgttacccatcaggtgccatacgggaagcttgccctgctgccggtagatatggagcatcgtattggcgatgtcgggcatcttctcggggtggaggatcgtcatcagcggctgggcggcgcggtaggtgtcccacagcgagaaggtcgtatagttcacgaacggtgcggcgcggtagattttgccgtcggaaccgcggtagtcgccgttcacgtcgcagaattcggacggggcgaccatcgtgtggtaaagcgccgtatagaaaatgcggcgtgcggcgtcgtccgaagtctcgatgcgcaccttctgcaactcggcgtcccacgcccggtcggcggctgcggccgtcgcttcgaagtcccagccgggaagctcggcctgcatgttcaggcgtgcattctcgatactcacgggcgaaatggcgaccttgacatagatcgtctctccggccgaagtgtcgaaaccgacccggccgtaaaggcgctccgccctgaagctgtcgccttcgcgcaggccgccgtcctcgccgccctcgtaaatggctagcaacttgaagggtttggagaattcggccgtgaaatagacccgctggtctttcgcccagcccgtcgagtagcggtagccgctgatcgtatggtcgtcggcacgttcgatgaaggtttcggtcggagcatcccagcagccgccgttctcgaggtcgaagaccacggcggcatcggccgatgccgggaaggtatatttgtgcaggccgacgcgcttggtggcggtcagctccacgtcgatgccgtagcggtcgagccgcgtggcgtaatagcccgggcgggccttttcattggcgtggctgaaatacgaccacatgcccgactgcgggtcgtcctccgtgccgcgggcataggtcacctgccccacgacgggcatcaccgtgacgtcgaacaggtcgccgataccggtgccgttcaggtgggtgtggctgaaaccgatgaccgtcgtgtcggaaatgtggtagcccgacgtccagtcccacgactgcgggatgctcgtggggccgagctgtacggcgccgaacgggacgttggcgcccatgaatacatggccgtggccgcccgtgccgatacgcatgtcgacatactgcgtcagcgaatccgtacggggtgcctgcgagcaggccgccaaaagcaggcctgcgccgagagctgagagagattttaaattcatagggacatatgttgtttttatttgcgttcgggttgcaatccgaaaaccagccggccgccgcctaccagttcgccgtgcgaaatgcggtatttcttcagcggcctgccgccgagggttatcgagccgatgtagaggtcgccggctccggagcgctccgtttctataacgagctccccggccggatagtatttcgggtcgagcataacggtcaccttgtcgaaaacaggcgatgtaagcgtatagtaaggctcccccgggcagtccgggtagaggcccatcatcgagaagaccgcccacgccgacatggtgcccgtgtcgtcgttgccggggatgccgtcgggggctgtcgtaaagtacctgtccagcaaacgccgcacctcgcgctgcgtacgccactcctcgccctggaaatagctgaacaagtaaggataggcgatgtcgggttcgttcgccgggtcgtacagcccctggtcgaagaccatctgcagcttgtcgatgaatcggcgtctgccgcccatcagtcgggccagtccggccacgtcgtgcgggacatagaacgtatagttccaggccgaaccttcgtggaagccggggacgggttcgaaattctcgccctggcgcgggtcgaagggcgtgaggaacttaccctccttggtaatcggacggaacgtgcccgactcggtgctgtaatagttcttatagccgagcgagcgggcgcggaacagcgccgcgtcgtcttttttgccgagcgagtcggccagcagcgacagcgcgtggtcggcgatatagtattccagggcgtgcgacacggagttgtcgcccgaaaggtcgcgggcgtagaagcccagcggcacataacctttttcgatgtaggggtcgatgtcggggcgcatcctgttccgcgcgcccggcgtcgtggccgatttgcgcatcgcctcgtaggcggcgtccatatcgaaatcgcgcagccccttcatccaggtatcgacgatcacggggatcgacgggtcgccctccatggtgaaggtttcacggccgtagagttcccacttggggagccagccccactcccggtacatgccgaccatcgagcgcaccatctccagttggcgttcggggtagaccagcgtcagcagctggtgcaggttgcggtaagtatcccacagcgagaagaccgtatagcggttgccctcggccgtgcggatctcggcgctctccatcgcggggtattcgccgttgacgtcgctcagcacgttggggtggatcagcgcatggtaaagccccgtatagaagaccttcttctgcgcttcggtaccgccctcgacgcggatgcgccccaagtcgtcgttccacgtgcggcgtgcggccgcacgaatgtcgtcgaacgagcgcccctgctgctcggcttcgaggttcaggcgggcgttctcggccgacacgaacgaaacgcccatacgcacctcgacctgctcgcccggctgcatgtcgtaggagaaccacacgccgacgtcgtcgccggcaatgtccttgccgtattgcgtatagagcttgtagttgccggcatccttgtcccattcggcttcgacgccctgtttcgggggttgtttcttccagaacccggtggccgcggggcgtttcgagacgcgcatcacgaaatagaccgggaacaccgcctgcgggttgtagcagaacgtgcccagcagtttcatgccctcgacctcggtgtcgctcacgcggcgcacccaggctcctgactcgttggtaagcccttcgcccaggtttaacagaatatgtcccgtaccctccggaaaggtatagcgctcggccgacgtgcgcggcgtggccgtcacctcggtgcggatgccgtacttggtcagcaggttcgaatagtagcccggcgaggccgtctggctggtatatgcgctgccgtagttgcggtaatcgacgtccagcgcacccgccgtcggcattaccagcagcgagcccagctcggggcatcccacgccgctcagggtgacgtgtgcgaagcccgtgaagaacttgttgcggtactcatagggcgccgaccaccaccgggcgtccttatcatagaggttctcgtcagagcccatcacgttgaacggaaccaccgacatcatcccgttggggcatacggcgccggggttggtcgtcccgaaattggtcgtcccgatgaacgggtcgacccaatcggcaggctcctgcgcacgcagcggcgcgcagaggatgactgcggcgagcgccgcaacgggaagcgttcgtcgcagcggcatcagcgtatattgtttttgcgggtaaagtcgatgatctccggaatataaccgaaagcaaggcccgtaaccgtgtccgcacacccgtagtaaaccgcaacgcgccccgtcgcagggtcgtgtagcgccgcgcaggggaacgtcacgttcggcacgtcgcccgtgcactcgtagatttcacgcggggagatcaggtacgggccgctgcgggcgatgactttccacggctcatccaggtcgagcaatgccgagccgaacgcatagacgtagccgttgcacgaacggagcaccccgtggtagaacaaaagccacccttcgctggtctcgatgggcacgggccccgcgccgatcttcatgcactgccacgccgaaacctcgaacgccgcgggcgacatcacgtggcggtggcgtccccaaaactccatgtcgggcgactcggaatagaaaatgtcgccgaacgccgtatgcccgttgtcgctcggacgcgaaagcatcgcgaatttcccgccgatcttgcggggaaacagcacaccgttgcggttgaacgggatgaaggcgttttccagctggtggaacgtctcgaaatcctccgtccacgccacgccgatcgtcgggccgtggtaaccgttgcaccacgtcacgtagtatttgtccccgatcttggccacacgcgggtcgtaaccgtagacccattgcccgatttcggcgtcgccgcccatcagtttgaagtcctcctcgcggatgtcccagtcgatgccgtccaccgagaagcccgcgtggatgcgcatgcggcggttggtgtcgtcgcagcggaacacgcccgcataattatacttgcccttcttgaacggaacgaccgccgaattgaaaatgctgttcgaggtcgaaagcgcgtcgcgcccgatgatcgggttggccgaataacgccacataacctccttggagccggcgggacgctcttcccacggcatatccggcagcgccgggcctacgattttcagattgttcatgttatttggttgttggtttatcgtcataggtgaatggtacgaaccaggtcatcacaaaggccgggatcgtcgccagcatgaccacaatgaagaagacgccgtagcccttccagtcgctcaggtaacccgaaacggccccggtgagcatcaccgaaaggttcatgatgcccgacgcgaaggcgtagtgcgccatctggtgccgccccggggcgacctgctgcatcatgaagagcgtaagacccacgaacccgaacccgtagccgaagtactccacgacgatgccacccccgatcaaccacatcgactgcggctgaaaccacgccagcagcgcatagaccgcgaacggaaggttgaaaatgcagcacagcgtgaagagcgagcgcctcagtccgcggtgggcgatatagtagcccgcgagcagcgatcccagaaggaatgccccggcaccgaacgtgccgtagtacaacccgatctgctggttagtaagccccagccctccggccgcggtatccgccttgaggaacaacggcacgatcttcatcacgaagccctcgcctaggcggtagaagactatgaaggcgatgtaataccagatatgctttttcgtgaaaaacgccgcgatcacctccttcaggctgcgcagcccttcccgcagcgaatgtccggcagccgcacttccgcccgacggcaactcgcggctgtggtaaatacccagcaggacgagcagtccgcaaaggatcgccagcaccaccgtccacgactgtacacaggcgtcgaaggtcgcagccccggaatcgctgaaacgcttgccgagccagcccgcgaaccagaccaggccgcccgtggcgaccagtttcgcaaggttgtagaacgctccctgccagccgatataccgcgcctgatccccggtcgagagctccgacatgtaaacgccgtcggccgcgatgtcgtgcgtggcgccgctgaaggccaccaccgcgaagacccccaccgtgacggcgaagaaatggggcatatgcagcgccagcgcagcaaggccgaacaacacgccgctcaggagctgcgtcgtgacgacgaagaatttcttggtgcggaaaatttccaggaaggggctccacaggaatttgatcgtccacggccacatgatcagcgatgtccagaacgcgatccgggtatcggatatccccagatccttgaacatgaccgccgaaaccatattcagaactacgaacggcagtcccatcgcaaaatagaccgtaggcacccaggccagcggcgaagtttttttcagattttcagacatcgggtcttctccggatttaggttagggatgcacaaagataataaaatatttccgcacgtggtcggtattccgggcggtaatcatctttgcatccgtaaagtaatacaatttcgggcgcaggattactaaacgggccgacgatttaattccccggaaaagaagaccgtgcagccggcgggtcttgcggctcgcgactgcacgatcgttattcacgtgcgcatcgatttatttgtagacgatctccgcgccggcggtgtaggtcagattcggaatcacctgtccctgcttcaggtagatggttttgagcacacctgcgttacgttgcgcattgagcgtctcgagcgccgggcagcccgacacgtcgatcgtggcaagcacgtcggtcggatcccaccaaccgccgcctccggagaaaggcactttcagtgtcttcaggtgtgtgcccgacacggtcagcgacgagggaacgatgtaatcccaagaattacctgagtggtacaaggccgagaaattcagctcctcgacggcattgtcgccgagcgcgatctcggacaggccgttatagtcgatattcagcgagctgaccttcgtgagtttgctgatatcgaacttgctcagtttgttgttgtacacgtcgatcttttcgagattggcaaatatctcgatgccctcgagcgagaggatcggatcgtcccaataatccggccgataggtgaactcggtcgcgttcagcccgtcctcggtcaccacgcataggccgccgctgagttccagcagccagttcaggcttacaagtttactccggaatacattgtcgggaatgctaaccacgaccgcgtcgggatccttctggacgatggaaaccactttcgtgatacccgccccgctgatcgtgatcttaccgctgcgcgatacggtcgcggggtcaaggtggaatcggagcgtcttggtcaccaggccgcgcgtctcgggaacctgtgtgatccaatcgccggcaatagccacctgataggtcacattcgattcgacgtcgatggaaatcgtgcgttccgcaaggtcgaacatcaggctgccgtctccggtattgatggcgtcgatctggcgctgggtcagcgggatgtcgaccgactgccccatgcccgagaccgtgatcaccgtcgaacggtcatcgtaatccggattcttggcgacggtaaaattcaagaccgtgttgccgaaagcgtcgttgcgcccgacatacatgacccaatccccgccgccgtcggaaaacgcgacggccaattccggaatgttcgtatgcagtttcacctggatgtcggcgctcaaagcttcgacggtcatactctcctcggaaagaagggtcagcgaatagcccgcttccgaaacgattttcaggggagcgacagccgatcccgtaaagaacttgaaggtcgcttcacggctctcttcgcttgtattcggatcgatcgtgaaggttaccacatcgccgctcttcccggcttcggccgaaggatgcacccagtcgcagacacctgcgagccgccagtctcccgaactggttacggtcacctgcgtcgtcgtcccgtcaggcccagcggggatggcatcgggggtaatggatatcgtggcccgggaaaggtcgtccgccgtatcgtcgtcggaacaggcgctgagcgcacaggccaccgctacaaacgctataaatatctttttcataaaatctacgttgttttaggttctcaatcgaactgcatccccgcagcggtcgtgctgcggggagtacagcacacaatcggattaaggcagtttataacgcgtcgcgtcgttctttttgtaataatactcgggcatcagcagctcctcgtcatagaggccccgggcaacggactggcaccggcccacctggaaccgatagtcgtcgaaatcgtttaccagcgaagtggtatgccccagtgcgaagaacatatagtaaccataaccggcctctttcttcgaacgagccgtagattcgctcgaatcgcccgacccccggttcagctcgatcgacatgccggaacactgcttgcgggtcatgccctgcatcggtgctgccgttccgccgtaatcggcaacggcatagtcgacgaacatacccggttcgatcccgtcgacagaggggataccgctgccgatggctcccaggtagtagaccatgacggttttatcgggcatggccttcttggtttcatagagcagccgggaagcggcagccgatgaccacggcgcaaaccagggattgctcaggtcgggagaattcgaatactcgtcgtcgaaaccgacgccgtcgagattataggcgtcgcaataagccgccagctccttggcgaactcacggcagcccatatcggacaactgcgccacgccggcggcatcgtggttgcccagaataccgaggatcaccttcatgccccgcttgcgcagcggctgcaggaactgttcgttgttgtccagcaggaactgcacgttgggattattgagcacatagacccgtcccgtctccgcattgtaattgatattggccgagaagaggatgatatcgtcgaagaagagcttgccgctgtccttgagcacgaattccagcgcattgagcggattggtgtcgttgacctcgaaatagcacacgttcctcacggcgtcggggtccttgtaagcgtcgccctgggcacgcaggtctttcaccagatagaccgcatgctgcgccttttccgagagtgtgatgccctcggtcgaggaggtcgccctgagcgggagcagataggtcaccccttcctgcaattcgctggcggctgccagggtgacgcccaccccgaccgaacggatctcgtccggggccagcagcagcttgccctcgcgttcgatggtgacatcggccgcggggaagagctggaactccgtcccgtgctcggcattataagtttccagataagcgggatctacctcgatcttcacgtcgacacccttctggggcgctttcgtaaggcggaagaagacctcggtctggtatttgtccgagcgcagttcgatcaccgactcgttcttgttcgacgtcacgtcgagcaacatgccgtcgacgcgcttcacggcgtcgtatgccccttcgtcgacaggcttgccgccctcgatgtcgtcggtgcaggccgtgaatgccaggccacccaacatcagcacaagcggaaggaagctgtatttcagatatttcttggtgttcataatcgtttcaggttaaaggttagcagattatttacccagctcgggaagcgatacattcacccacttcaactccttctcgacggtaagatcgttcccgtaggaggtctggtctttgatggtcttgccggctccctcgtcgaatttccagtaggccaccagtccgtcggaagccgcggccacctggtagaaatggtcgggggcattgatctcctcgggggtcagcgccttgttccagatacgcacttccgagatctggccgtcgaaataacggtcgctggcatacgaatagccgatccagaagcaacggggcttgccgtccgactcgtcggaatgcttcacgccgaaattcacggacgaggtaccgacgttgccgctgcacttctccacaccgtcgagatataccttcacgcttcccgactcgaatgtcacggccacatggtaccagcggccggcatcgagcttgagatccgaattggtcaggttcctcgacgaagcgatctgaatctggttgggatccacgcccgaatcgccgatacgcaccaggaacttgccctcgatacccatgatcgtggagatctggttcttgaacgcattgccgttgatcagcgcctcgagcgtgaaggtacgcatgttggttacgggcgaggcatccttccagtcgggccaagcacggttctcggtaataccggccacgacgttgatcagcgcagcacccttgaagatatagtaaacactgcgggcactgggcagcacgtcgatacccgacaccgaacggatcgtcacgggcagcacatagcgctcgttcttgtccagcaggttcacgtcgacgaacctgatcgtcacgggaacgctcgccacgcttccggcctggatcttggtcttcgtctcatcgaaccggtagaactcctcggagagcagcgtcacgtcctcgtcgtagaaggcctggcggtagtggtcgaacagttcgggagccgcggcgaactcgatcgaaatgtcctgcccgacgggtttggcgataccggccgtgatctcgcgctcataggtgggattcgcagccttgataagcatctcgtcggtgaaattcgtcgccgagatgaaaagtttattgtcgtaatgctgcctggacagatcctcgttcttgcagcctgccagagcgacggcggcaagagccgcgacagcaatatttaacttgttgagtttcataggtcgcattagtttttaggtgcgggattcaggatatcgaccgcctcccggatgtttttataaaccaaagtcaggttgaaatagtcgttctgcgcgttggcgatggagatacccagtttctcatagcccgacgccgggcttacgacccactgggcagcgcccttggtggcacgcacacgcgtcttgccgtcggcctcgaagccggagaaatagccgctctcatcgctcaggtcggtgagcgacggggtcgtcacaccgatgacgaaccggtcggtcgggacatcttccacggcggccatcagcacggcgaacgacatcttgtcggccgaagttgcggtcagcgcggggatgacgatataatcgcattcgcccaggacggacttgtcgatgaggttctgcggattgccctggaagaccagcactttgccggagttggcctcgttccaggtcttcacgttcgagaagaacgcctcctggcgtgcggcatactgcgctttttcctcttcctgcatagcctgcggggcacggccggtatagttcacctggacaccgtcgtaaccatatttggcacacaggttcagctgactgacggtctgctgcctgcagaactccaggaaacggagctccagctcctcctcgggggtcggttcgccctcgccgccgccttcgccgccctcgtcctgagttgcctcgggcgtatcgggcgcagcaggttcttcgggtttgttggcctcctcatctgcgaggactttctcccagagtttctcgatcgcattatagtcgatgttgtagatcacccgggtgcccttctcgcgcaccttggcgaattcacccgccagggtcggatgcaggttgtcgggattcatcaggcagatgatgtccacgctgtcgggcatcgtcgtcaggtgctcgttgcgctgggccggagccgaggtagtattgtccatcgagacgaggacgaccttgtgctcgcccgccttgtaatcccggagcgccttcaggtactgcttgtagagctcgggattctgctcctcgagcgtaggatagttgatgtcgaggctttcggtctccgtccagtcgctgcacgccgcaaaagagaggactgcaacggctacggccgggaacagaaatttcttgatatttcgtttcataatcgtttagcgttcgggttggttattatttgatcgcggggttgcaatcccaccacatacgggtcgccatgttgtcggcacccttcagaagcgacgaaaccgcattgttgacgttcacgttgttggtcgtgtattcgtctgccggataaggcatacggcgcgccccgagttcggaatcgacgaccccgaggctcttgtttccatcctcggtggcaggcatcagacggggataacccgtgcggcggtagtcggcccatgcctcgttgcccacctgccagttggcgatccacttctgcgtgatgatgcgctcctgcatctgggcaagcgaagcacccgcatcccaggcaatggtaatgtcggacaactcctgcgaataagaattcgaattggcaggatcggcatagagctgcggtttgcccgtggcattggccaggtaattgtcggcgcccgacacaccccactcctcgaacgagaggcggatgccttcgttatagaaatcctcggcttcgccggagcccatattgaacccgaagacccccttcgcctcagccttcaggaaggcgacctcggctgcgttcatccacgtgacgggcgaggaaaccgagatgttgacgcccgaatacttgcgtccgacggaattcaaatcgggtatcacgattccgcggcggatgccgacataggtttgaccgggccactccgactgcgtgaaatatttctcgcggcgggggtctgaataaccgttcatgtagcagatgatgtcggctgcggcatgcgtatcgccgcccgtcatgcagtctgcgggcttgttgtagttgactgccacgtaaatggggttgccgtcggcaccgaacgacgtcagcctggcgttgtcggcattcgacgtgatgacgcccacctcgctgttcacggccgattcggccatctcgcgggctttagcctcgttcgcatagacgatacgcatcgccaggcgcagtttgagcgaattggcgagcttgcaccacttctcggcgctgccgccgtagatatagtcggcttttgcggaaatagcatccgtgcggtgctcggtaagcaccttgatcgcggcatccagctcttcgaaaaacttgtcgtaaaccttctcctgcgaatcgtacggcacctgaatctggccgttctcaccgatcatcgaataggggatcgggccgtaggtgtcggtcacgcggtgcatggccgctaccttgatgatgtcggcgatcgccagtacgatggggtcgtcggtcaccttcttcagctcgcgcaggttcgagtaaagcaccgggatcgtcctgtcgctatacatgaaaacgttcgtccagtcgtccgtcggattgtaattcatgatcgtacgggtaaagccacccgtcgtggaataatacccacccatggggccgcccagcagcacatcggtaaactgcgccgtattgacgtcggtcgatacgacggtgctcgcgagcgaggtcagcgccgagccgatgatatagccgtcggtctgcatgtcgtcctcggagggctcgtaaggattggtatttatatcgaggtagttggcggtgcaggccgtaccgacaagtaccaacgcagccaaagccggttttaatatattgaatttcatagtcatcgtgcagattagaatttaagtctgaggttgaacccgatattacgcgtcgaaggcgacatgaaatagtcgatgccctggtagtagctgttcaccgtcgcaacggtctcgggatcgtagggagccttgttgtagatcatccacaggttgcgccccacgagcgacaaggtaatttcgcagatgtcgcccagctttttcttcgggatcgtatagccgatcgaagcctcctgcaggcgcacgttggtggcagaataggtatagtactgcggaacggagttaccgctgccgatggccgtgtaccatttgttggcatccaccaggtcgccgccgttgatcatcacgccgccggcatcgcgcgctgcggccgaaacctcggaaacaccgtagtagtcgagcatggcctgcgtacgcgagaataccacgccgcccaggcgggccgaaaccatgaagccgaagttgaagttacgccagcggaagtcgttgcgccatgccatgttggcatcgggaagcacgctacccagcttgatgtagctgttgacgtcggtgatcgactcggaagcgatctcgcccttctcgttgatatagacggcgccgttgctgtcgcgtttgaggtcgatgcgcgaatagaagtcgcccagcgtaccgccctcacgaaggatgaagcgggcatcggcaagacctcccatatcgagctgatcgaccgagaagtgctcgccggtctcggggttgaccacatcgtcggcaagcgaaagaatcttgttcttgttcgccgacagcgtgtagttcgaatcccacgagaatttgccccacgtattgctgtaacccagtgcgacctcgaaaccgcggttgcggacgttacccgactgaatggtcagtttggaggaacccgaaccggtcgagatattcggctcgaaggtctgatcctgcgtcttagtgttatagtaagtgaagtcgaggttgaagtggcgcaggaagcgcatcgtcagaccgacctcgaacgacttggtgcgctcgggcttgaggttgtaaatcgggaaccgggtctgggtgctccagttcaggccgctctcgttccagctgtaacgcgggttggcgaggtaacgctcgaaagccacacccaccgatgcgtacgacgcacggagtttgacgtaggagaggttcttcggcatctcggggatgagctgcgacagcacgaccgaagcaccgaccgagggatagaaaaacgagctcttcaccgaatgctcgccggccagctgcgaaggccagtcgttacggccggtcagcgtgaggaagtaggtgttcttaaagccgatctcaaccgaggcgaagatcgactgggtctgctcgcgccacccttcctgcagccgcttggtcttggaggtgttgctcaggttctgcacgctgaacacgttggccagcagaggtttttcgtcggtgatctcaccgtcgggaatcgggccgcgcaccttcatggcgtcgtagcgcatgtccgagatcgaagcaccggcattggcttgcagcgaccagtcctcgccaaaagtcttgttgatattgaccagcacgtcgccgtagacctgcttgtccttggtcttcgtgatgccgtagaggccgtttttcgaaccctcggtcaactgcgtgaaggtcgaagcatagaatttttccgtatagtcgttgttgctgttgtcgatgcggagacggccggaaacattgagccagtcgagcacgtcgtacgagagtgcagcgttcagcatgtaacggtctttgttgttttcgcgcaggttgcggtagttgatccaataggggttctgcatcgtcatgccggcatcgcctacgggccagtactgggtataaaggcggcgggcgggatcgtaacgctcgtacatttcgatatcggcccaatcgttgccgcgcgggtagacgtaagcgccgaccagcgggttgttataggtaccctggttggtcatgttgcggtctttctgcatcacatagctggcacccacgtcgagtttcagcttgtcaccgaggaacgaggtggtattgcggaacgtaaaattgtaacggtcgtagccgttgttgggaattactccgcgcgagttgaccgccgcggccgagaaataggtttggttcttctcggtacccgtcgagagcgagacgctctcggtacccgttacgccggtttggaaatagtcatcgcgcgggctgtaccccatatagttggagctgttcaggcgattgccccagctgcgaacgatcgaaccttcgctcgaattgagatcgcccgtaccgtaacggttctgaaactcgggaaggacgaacggcgacatcacctcggtgttgctcgatacggtcaccgaagtgtagcccgccttgccgcgcttggtcgtgacgacgatagcaccgttggcggcatccgaaccgtagagtgccgcagcggccgcaccgttcagcaccgacatcgactcgatgtcctcggggttgatatcggcgatgggatcggtcgtaccctgcgaggcgaactccgtgccgccgtcgcgggccgtcgtgaacatcggcacgccgtcgattacgtagagggcgttcgaagtctgcgaaatcgacttctgaccacgcatgacgaccctcgatgcgctgccgacgccaccggacgacgagttgatcgtcacaccggcgaccttgccgctgagcgagttgatgaagttgacgtccttgttggccacgatgtcctcggagttgacctgctgcacgttgtacgacagcgccttttccgaacgtttgataccgagggcagtaaccacgaccgcgtccacatccaccgccgactcccggagcgtaaaggtgatgttggtacggctgcctacggtctgtgcgatcggttcgtagcctaaataattgatttctaatacggcgtcagccgagggggagggaacttgcagcgagaaatcgccgtccacgccggtactcgtaccgatcgtagtccccttgacaatgaccgcagcgccgatcaccggcataccggaagcatcgacgaccttgcccgtcacggtgacaggctggccgggctgtgcggcaggagctttctgcgagagtacgatcgacgtattctcgacggcataagcgatatcggaggattggaaaagcgtattgagcacattgttcagcggcgtatccttcacatcgatcgacacgcggcgcgccacgtccacattcttgtcgtacacgaacaggtaggtggtttgcttttcgattgcactgagcacctgctcaaggggagcgtccgaaacccggagggttaccggtacggactgcgcacttgccgtgcccgcgaaaaggcagcatacaagtgtcaaaacaggcaagagaaacctaactctcgcttggtttttcattttcatacgttggtcagttaattaggttattggtttttccggatcccctgccctggtcgggggaggggttgttaaaggcgctgtccggagcacgcctcatcattcgtctaaggtctggggcaatttttcacataaatctgggcttaggtactacaatcaggttaggttggtcagtgtatataaatcatgtctttcagttcgttgcgcgtatactggaaatcggcgctctgctgcaaaacccacagggcatggtcgataccctcggagatacggatcttcccggtgaaaaggttggtcggtatatcctggcgccgcacctcgatcttcacgccgtaatatttctcgaactcatcgagcaaatccccgaacgaagcgtcgcggaaggcaatcagcccctcgcgccacaggaatccttcgtgctcgggtatccgccccaggatcagccgtccgttgaggtgtgtcacctgttcgcgcgggcgcagctcgacatggttgttcgtattgaagcgatccgtcacgcgcaccttaccctcgacgagcgaggcgacgaattccccgtcttccgaacgggccttgacgttgaatttcgtacccagcacctccacgtcgcaggcataggtctcgacgacgaaaggatgcttccggtcatgcgacacatcgaaaaacgcttcgcccttgagctgcaccttacgctcgcgcccaatgaagaaggtcgggtaatgcagttcggaaagcgcgttcatgcagactttcgtgccgtcgggcagctgcacgtcgatatgctggcctgccgggacggtgatcgtattgcccgtcaacaggaacttgtcatacatccgcgagacgtagatgccccccgctcccgcaacgaccaggatgaccgcagcgtatttgaggacttcgcgtgtccagcgcggcagggtcaaaaccttcggcttgcgtgtcgtgcgtccggggtcggccagcatcagcatcgaatcgaacaaacggcgctcggcaagcagttccctgcggttggccggatcacggtcgatccagtcgaggacttgtttatcctcttctacggacgcgcgcccgtcaaaaaaccggtgtagtaattctttttccatgacatagagataacacccctgccggggaaatccctgaaaaaaatcgcacttttttcagggaaagtccggacggagcaagttaaacgaatgattatcaattgatataaaaccagaaaataaaataagccaggtaatctttgagcaccacacgcaggattttcatcgccttcgagacttcgaactcgacgctcttgaccgtaacgcccatttcggcggcgatctccttatagcttttgccgtcgaagcggctgcggataaagatcgcgcgggtcttttccggaagtttgtccagcgtctcgttcaccagccgccgcgcctcctcgctgaacagttcctcggggttgcaggcttcgagggtcgagatgcgggttcggagcatgcgcgcaccgtgggagtggatatcctcagcggcccgcaggcggacgccctgcgaacgcaggtggttcaggcacttgttcttgacgatcgtgagcgcgtagggagggaaggcggaggcggaaagcatgtcgcgtttttcccaagcggccataaagctctccatgacgatatcctcggccgtggctgcatcggagacataagtgcccgcgaaacggataaaccgttgttggtactccccgaacaggcggttgaacgccttcagatccagaatcgtctcggattgcaactccatacactcatttatttaaacacaatataaggaaagtgtgcaatatccgcgccttacaaacgcaaaaaataaacggccatacccgccagcgccaaactccgggtagggcaacgcaacagaacttataccataaatccctgccatttatataataacaccccagcgcgggaaatccctgacaaaaaaccgttttttccgcaccggacataaaaaaagctccccgaagggagctttcagcccgaattgccagcccgttacctggctttggcctcgcagtaggcgcagcggcaggtgccgtcggccgtgcggtagaacaattggtcgacatcctccgtcgcggagatgcaacggcggttggaacactccatctcgttgaccacatactcgccgttgaaaaccggagtccgttcgaacggcttgttccggtcggcccagcggagcagggtcaggatcagtgccatacgcacaaacttaccgttctcgacctgccggaaataggccgcgcgcgaatcgttgtccacggcacgcgtgatctcgttcacgcgcggcagcggatgcaggatgatcatatccttcttggccgtcccgagtttctcggggttgagcacgaagctgttcttcacgcggtcgaactcctcctcatcgaggaagcgctccttctgtacgcgcgtcatgtagaggacgtccagttcgggcatcacctcctccatggtctccacctcgcggaactccagcttcgagttctcgctcatctcggctagcatgtagtcgggaaggcgcagctcctgcggggcgatcaggatgaccttgatgcccgagtagcgcgacagcgccttgatgagcgaatggacggtgcggccgaacttgaggtcgccgcagaagccgatcgtcatgttgtcgaaacgccccttttcgcgcttgatcgtcagcaggtcggtcagcgtctgcgtcgggtggctgtggctgccgtcaccggcattgatgaccggcaccccggcatactgcgaagccacgagcggcgccccctccttgaagtggcgcatggcgatgatgtccgcgaagcagcggatcacacgtacggtatcggccacggtctcgcccttcgacacggacgacgagttggcgtccgagaaaccgatgacgctgccgcccagctccatcatggccgaggtgaaacttaggcgcgtacgggtcgagggctcgtagaagagcgtcgccagcttcttccccttgcacgcctcgctgtatttggcacggttggcgatgatgtcctccgccagcgcaacaatctgttcggtttcggcaaccgtcaggtcggtcggatcgattaaatgtcgcatgtttttcttctctgttttcggtttcgggtttcgtagtccgtatcggcgccggtatgtcccgcggttccaccccggctgcgtgcgggcatatccccgcacggcaggaaaggcccggccgggaatacgcggccgcagcgaactatttgtccatccagctttcgtccgaggggttgtcgcggaacttcagcagccgggccttatccccgggctcgatatacccctcttcggcggcgacctccaccagcgcatcgaggttcgaaaggctgtaattgaccacatcggcctctttcaggcgctccagccccttcttcatgccgtaggtgaagatcgaagccacacccagcacctcggcaccggcttcgcgcagggcgttcaccacctcgatgcaggaaccgccggtcgagatcaggtcttcgatcacgacgaccttctgccccttctccagtttgccttcgatccggttgccgcggccgtggtctttcgaaccgctgcgcacgtaccccatcggcaggtcgaggatcgtcgccgtgatggccgcatgggcgatgccggcggtcgaagtgcccatcagcacctcggcaccggggaatttggtgcggacgatcccggccagcccggcctcgacatgtccgcgcacgacaggcgccgtcagcgtcaggcggttgtcgcaatagatcgggctcttgataccgctggcccaggtaaacggctgctcgggacgcaggaataccgcgccgatcgagagcaggtctttagcaattgatttctccatgattattttacatttttttcggtttttttcaaatctccggccacccactcgacccacgggtcaacgttgtcggtgagcgtccggggcagcggcagcgggatgcgcacgtcgggggcaatcccctcccggtcgatgccgcgccctgcgggaatccgtttggagcgggtgacgggcacgatcatccaacgcgtcgtgtcccgcgggaaataaagtatctcgcagttcgaatagtcgaggcaccccagcgtgttgtcctgcccgtagacggtcgtacgacggctcgaagcccgtacttcgagtaccaactgctcgcccgacgaagccacccgtccgtcgacgatcagcgcggcgcgccggggcaccggcgacaccgaatcgtaacggatacggtaggttttgccctcttcgagaaattccccggccggggttcgctccatacacgcaaccttcctgcgtccccgctccgtattctcggcaaactcccggacgtgggcgatggcgatatccgaaacgcggtactccatggcatcctccgtaccttcgtggtcgtaaagcagtttgagcaggggttcataggcattgtcgctcccacccatattgccgcggatgtcgacgaccaggttttcgcagcccgaggcgcagtaaaccgcgacagcggcccgcactccggcgatttcggcatcggtcaggtcgcacgacgggaatcggatcaaatacgtatcttcgtccacgcggcagtgcatgaactgcggatcgtaacgcttcatccgcccggcatagtccgtatcgcggcgcagcgacttagcccggtaggcttcggcaccgggtgtttggaggtgcgaatcgtcgaaccagccgaggtattcggcaatggcatcatagacgtcacggtcgccggaaatctcgctttgcagccgcgctttcagtgctgcgtactccgcttcgcggcccgcggtcttgtccggatagccggcataggcgcgttccacgacaccgacggcatagccgaaatcggacacagcgttccctgccggggtttgtgccccggcgggcagcaggcaaagcacggccgcagccgccagcgacattcgcagcaaggttctcatcgggcaggttcgtatgaatcggatccccggatcgggtctcccgaccggagggttattccagtgccgagcgtaaaatcttctccacctcctcgggataaaccccgccttcgtgcaccttcacgccgccgacatagaatgtcggcacgtagtaatagtcgaacgtgtcggccagcgcgggctgttccgactcctcgatcatctcgatcccgacggcagccagctcggggtgcgccgccctggcctcttcgatgtaacgcaacgccttcttgcagaaggggcagtttttcaggtagaaaagttttaccggtttcataactatactcgtttaaaagtaacttcgcggattatccgcagaattcgtccacacaacggcgataggcagccacagggtcggccgcggcggtgatcgggcgtcccacgacgatgaagtcggagccgatctcccgcgcacgggcaggcgtggtgacacgcacctgatccgccacgtcaccgtctgcaaaacgcacgccgggcgtgattgtgaggaactcttttccgcaggcttggtgtaccatgcccgcttcgagcggcgagcagaccacgccatcgagccctgcggccttggtattctgcgcgtatttcacgatcgtgtcgccgatcgaagatgcgatcagcagctcctgttgcatacgctcctcgctggtcgaggtgagctgcgtcacggcgatcagcagggggcgcgtaccgtcctcgcgcgtgagcccctcgagggcatatttcatcatctcgatggtacccgccgcatggacgttgcacatatccacgtccagccgcgacagtacggccatcgctttcttcaccgtattgggaatgtcgtgcagcttgaggtcgaggaaaatcttgtgcccccggcgcttgatctcacgcacgatttccggcccttcggcatagaacagctccatgccgatcttgaggaaaggtttgcgtgcctcgcccctgaacaggtcgaggaatttgaaggtatcttccgcagacttgaagtcgcaggcgataattacgtcatgttgcatatcgtacggttttacgttcattctacaattccgattatgtcgctcagccgcccgatcccgagccgttgcatctcggcaggcagcgcctcgacgatctccttcgaggcataggggttcgccaggttcgcggcgccgacctgtacggccgtagcgccggccatcatcatctcgatcacatcgcgggccgtcgtcacgccgccgcaccccatgacgggtattttgcaggccttggcgacctggtagaccatccgcacggccacggggaagaccgcagcacccgaaaagcctcccatcgtattggcgatgaccgccttgcggttcctgacgtcgatccgcatccccagcagggtatttatcaggcagatgccgtcggcacccgcctcctcgcacgcccgggcgatcgagacaatgtccgtgacgttgggcgacagcttgatgtagacgggtttggtcgtcacggccttcacggcgcgcgtcacctcggcggcacactcgggcgacgtgccgaacgacatgccgccgtgccgcacgttggggcacgagacgttgacctcgatgatgccgacctgcggctcgcggtcgatccgctcgcagcaataggcgtactcctcgaccgaaaagccgctgatattggcgatcacgggtttatggaaaaaagtcttcaggcgcggcagctcttcggcgatcacggcgtcgatgcccgggttctgcagccccacagcattgatcatgcccgccgtacattcggcgatgcggggcgtggggttcccgaagcgcgcatcgcgcgtggtgcccttgaacgaaaacgacccgaggatgttgatgtcgtaaaaatcccggaactcgttgccgtacccgaacgtaccgctggccggcacgaccgggttatccagtctcaggccgctcaggctgacggacatatccgcggcgggtttttccgcgggccggttttgtgcgatgaactgcttgtttaccatatgacctcccctttcgttaatacgggcccctccttgcagatgcgcttgttgccgtatttggttttgcacgaacagcccatgcaggccccgaaaccgcagcccatgcgctcttcgaacgagagctgcccgtcctgcggcacagcgtcgcacaatgcccgcagcatcggcagcggcccgcaggcatagaaatagtcgaactcggggcggcactcggcgatggccgtcgtgacgaaccccctgacacccgccgaaccgtcggccgtggccagatgaacgtcgcagcccagcgcccggaattcgtcggcatagaaaacctcgtccgccgtattgaacccgagcaccacgccgacccgtttgcccgccgcgagcagcaccttggccaggttgtagagcgggggcacgcctacgccgccgcccaccagcaggggacgctgtgcggcattgtgcacgtcgaacccgttgccgagccccgtcagcaggtcgagctccccgcccgcagccatacggctcatctgtgcggttccctcgcccaccaccttgtagatgagcgtgagcgtcgtggcgtcgtagtcgcagaccgagatcggacggcgcaggtaacggccttcgagggcgatgtcgacgaactgcccgggggcggtgatccactgcgtgtcccccccgagcaccatgcgccatacggtcgccgtcagcggttcgttggcaaggattttatagatgcctttcttatacatgcctttctgttccaatgtgccgcataataccggaaatcacttcgcgtcgatggtcgaaaccccgaacgtaatctcttccagcacgtccaacagcaccttcaccgtttcgagcgccgtaaataccgtcacgttgttctcgacggccgtgcggcggatctcgtacccgtcgaggcgcgtgttatgctggttgacgtcgatggtgttgatgacgtagctcacatgtccctggcgcagcgagtcgatgatctccgagctgccttcgctcagtttgcggcgcgtacgggtacggatgccgtggttgcgcaggaactcggccgtcccggtcgtggcctcgatgttgaagcccaggtcgtagaaacgccgcacgaggggcagcgcctgctccttgtcgtggtcggcgatcgtgacgaagatcgtcccgtagttcgaaacgttcatgcccgtggcctgcaatgccttgtagagcgcgcgggtgagtttgtcgtcgtagccgatcgcctcgcccgtggacttcatctcaggcgacaggtacgaatccatgccgcggatcttggcgaacgagaaggccggggctttgacgtaccagcgcttcttctccttgccgtagacttcggtgatgcccagctcgcggagcgtcttgcccaaaatcacctgcgtggcgatgtgtgccatgggcacgcccgtcgacttggaaaggaacggaacggtacgcgacgaacgcggattaacctcgatgacatagacctcgtcgttttcgtcaaggatgaactggatgttatagaggccgacgatgccgatcctcagtccgagtttaaccgtatagtcgatgatcttgtccttggccttctggctgacgctgaaggtcggataaacgctgatcgagtcgcccgaatggatgcctgtgcgctccacatgttccatgatgccggggatgaagacgtccttgccgtcgcagatggcgtccacctccagctccttgcccatgatatagcggtcgaccagcaccggcgaatcctcgttgacctcgacggccgtctgcaggtagtggcgcaggcgctcctcgttcgaaacgatctgcatggcacgacctccgagcacatagctcggacgcaccagcaccgggtagccgatgcgggcggcggccttcacgccggtctcgatgtcggtgacggcctcggcctcgggctgcgggatgcgcaactcttccatgatcttctcgaagcaaccgcggtcttcggcgttcctgatcgcctgcgtatcggtaccgataatgggcacgcccaactgcgccagcggctcggccaggttgatggccgtctgtccgccaagcgacacgacgatcgccttcggtttttcgaggtggataacgttcatcacgtcctcgaccatcagcggttcgaaatagagcttgtcgctggtagtgtagtccgtcgacacggtttcggggttgttgttgatgatgatggcctcgtaaccggcctcgcggatcgaccagatggcatgcacggtcgagtagtcgaactcaacgccctggccgatacggatcgggcccgagccgagcaccacgatcttctccttatcactcacgaccgactcgttctcgtcctcgtaggtcgagtagaaatagggcacgtaggagctgaattcgctggcgcaggtgtcgatcatcttgtatacggggaagaggccgttcttctcgcgcagccggtaaacgtcatactgcgagatgccccacaactggccgatgaacttgtcgctgaatcccatgcgcttggcgtcgcgcagggtttcgacatccatcgggtgcgctttcacctcgcgttcaaattcgacgatgttcttgaacttttcgaggaagaacatgtcgatcttcgtattgtcgtagatcagcaccaggtcgatgccgttgcggatcaactgcgcgatggcatagaggcggtcgtccgtagcgtccttgatgtattccagcagctgcgcgtccgaccagtcgtcgaatttcttgtggtagatatggcagacacccgtttcgagcgagcgcatcgccttcaggaggctttcctccatcgtgcggccgatggacatcacctcgcccgtggccttcatctgcgtacccagtttgttcgacgcatcgctgaacttgtcgaacgggaagcgagcgactttggtgaccacgtaatcgagcgtcggctcgaagctggcgggcgtattggccagcatgatctcgtcgagcgtaagccctacggcgaccttggccgtcacacgcgcgatcggatagccgctggccttcgacgccagggccgacgagcgcgacacgcgggggttcacctcgatcaggtagtatttgaacgacagggggtcgagtgcgaactgcacgttgcaaccgccttcgattttcagctcgcggataatcttcagcgccgaatcgcgcagcatctggaactccttgttggtaagcgtctggcacggcgccacgacgatcgagtcgcccgtatgcacgcccacggggtcgatattctccatgcagcagatgctgatggccgtgtcgttatggtcgcgcatcacctcgaactcgatctccttgtagcccttgatgctcttctcgacgagtacctggtgcacgggcgagaggaacagggcgtggcgcatcatttcgcgcagctgctcctcgttgtcgacgaatccgccgcccgtaccgcccagcgtataggcgggacgcagcacgacgggatagccgatctgggcggcgacctccacggcctcctcgaccgacatggcgattttagattcgatcaccggttcgcccagcgactcgcacagctccttgaaaagttcgcggtcttcggcgcgttcgatcgactcgaacgaggtgcccaggatctcgacctggcactctttcaggatacccttcttggcaagttgcaccgcaaggttcaggcccgtctgtccgcccagccccggcacgatggcgtcgggacgctcgaaacggatgatcttggccacgtattcgagcgtcaggggttccatgtagaccttgtctgcgatatgcgtatcggtcatgatcgtcgcagggttggaattcaccaggattacctcgtatccctcctccttgagtgcgaggcacgcctgcgtacccgcatagtcgaattccgcggcctggccgatgacgatcgggccggaaccgatgaccattaccttgtttatatctcttctcttaggcatttttacgctcctccattattttggtaaacttcttgaacaaatagctgctatcctgcgggcccgaggcactctcggggtggtactgcatcgaaaagacgccgtcctcggcgcactccacgccttcggccgtgccgtcgagcaggtttacgtgcgtcagcctgaggccggtggcggccagcgagtcgatgtccacggcatagctgtggttctggctcgtgatctcgatccgtcccgtctccagatttttcacggggtggttcccgccgcggtggccgaatttcatcttcacggtcttggcgccataggccagcgatatgagctggtgccccatgcagatgccgaaaatcggcagtttgccgcgcagttgcctgaccagcccgatcaccggcgtcacatcctcggggttgcctgggccgttcgacagcacgatgccgtcgggatggaaggccatgatctcctcgaccgtcgagtcgtagggcacgatggtcacattgcagcccacgcggttaagctggcgaatgatattgtgcttgatgccgcagtcgacggccaccacgtcgtacttgtggttgggaacgcgcgacatccagcgtttcttgcagctcacacgtgaaaccatatcgtgcggcaggcgatactcggcgagcttgcgcatcgcttcctcacggggcgtggcggcatcggtgacgatgaccttctggctgccctcgtcgcggataatgcgcgtcagcgtgcgggtatctacgccccagatcgccgggatgccgtactcctcgaacacctcgttcagggttttcgtataccggaaattcgacggcgagtcgttatactcgcgcacgatcataccgccgatggtcgggttcttcgtttcgtaatcctcatcggccataccgtagtttccgatgagcggataggtcatcacgaccatctgatccgtgtaggagggatctgacatgatctcctgataccccaccatcgaggtattgaagacgatctcgttgatagcctcacggtcggcaccgaagccgtaaccgtagaactcccggccgttttccagcacaattttcttcgtaaatggtttcattcttatctattggttttcatcgtttcgtctctaaacacttccctgccgcccacgacggtcatcgccgcacggccctgtacttcccagcccgcaaacggggtcgcccggcccatcgaaaggaacgtcgcagggtcgaccctgtaccgtgcatcgagatccagcaccgtaaagtcggcctggtcgccgacatgcagcccgccgcccaggccgaatatccggcggggattaacagccatcagcgcgatcagcttttcgagcgtgataatgcccggcaacaccatatatttatataacagggggaaagcacactccaaccccacgacccccatggcgcttgcggccaagccgcgcgacttctccgcggcggtatggggcgcatgatccgtggcgatcacctcgatcgtgccgtccgtgatccccgcaagcagggcatcgcggtcagcgcggctgcgcagcggcgggttcatcttgaagcgtccgtcctcctgcagatcctcgtcgcagagcagcaggtagtgcggggccgtctcgcaactcacgcgcaggcccctggccttggcgcggcgtaccagttcgacgctctcacgggtcgacacatggcagacatggtactggcagccggtcttttccgcgagcgcgatgtcacgttccacctgccgccactcgctttccgaacagatgcccttatgcccgtgcgcacggcagtactccccgtcatggatatagccgccccgcagcaggtcgtcgacctcgcagtgcgccacgaccggcttccccacctgtgcagcgcggcgcatcgcctcttccatcaggccgtccgactgcacgccgcggccatcgtccgaaaagccgacgacctcgggcgccagcgccacaaaatcgaccagccggccgcagccgcgctgccctatcgtaatgcagccgtagggaactacgcgcacgacggcatcgcggcggatgatgtcggtctgcgcacggagcgtctgcggagtgtcgggcgcagggttcaggttcggcatcgaacataccgtcgtatagcctccgcgggccgcggccgccgtacccgtcgcaatggtctccttctgcgaaaaccccggttcgcgcaggtggacatgcacgtcgacaagccccggcaccacgtggcgccctccgaggtctacgacccggtcggcaacgcccccggcgggcacgacaccccccccgtcgacggcaaactccccggccgcaaaacgaccgccgtcataaactacggcattggtataaagcgttttcatctgcgtaagcgtaaaaaaatagggcaactgaaacagttaccctaataaaacaaaatcgccgaaaaccggaggaaatacgtcgcccgaccaatagtcttgctgccaggaagcctgcgccgacaatatgctgggtttacaattcataggttctcgggatcactataattgtgcacaaaggtagggcttttttgccgggcatgcaaaatttcgccggaaaattttcaacaaataatccacaccatcccctgccgccggaaacgccaaccgccccgtaacggctctgtaatctggaataagcttcccttgccgggtagcgttatctgacgataatcaggtcgacgcccgcctcttcgacgatggcgaccatctgttcgggaatcccgccgtccgtgatgatcacgtcgatatcctccaacgcacagatgcgtccgaagccgcgctgcccgaatttcgacgagtcggccagcacgatattctgcgacgaggccttcatcatcttgcgcgtgagtttcgcctcgtcgagcgtcgaggtggtgatgccgtgttcgaggtcgatgccgtccaccccgaaaaagagtttcgagcagatgcagtcgtccagcgaccgcgaggcctcctcgcccagcaccgaaagcgacttcttgtgcaccgtaccgcccagctgcacgacattgacattctccgcctcgttgagcagcacgcccagccgcaggaacggcgtgacgatgttcagatggtgccactggcgcatcttgatctcctcggcgaaagaatagatcgtagaccccgatgcgatgatgatcgaatcgttatcgtccaacaactccacggcgcgctgcgcgatgaggcgcttggcatcgcggttgatattgtccttgacatgcacgtcgaggtcggcgacatggggattggcgggacgggcgctgccgtgtaccttgtaaagcagccctttgctctccaggattttcacatccttgcggatcgttaccttcgtaacccccagctcgttcgccacgtcggtgatgcgcacgaaaccatatttgttcagtttgtcgaggatatatttgtgtcgttcggcaatgctcagcatatctctctgtctttttagcagttattggagcaaatatagttattttttcgcttttatcaaaaaaagtgtccgaaaccgcgctccggttcggacactcccggatcgcaagacccgtatcatcatctaaaataggaacatactgtttaattccgttccggttcggcatcgtaaccgtcggcacgcgccccccacatcatcaggaataccagcatgccgacgacggctacgccgataatccctacataagcccagttccaaccgtaatgctgcgccacgaagcccagccccacgcccgaaacgaccgtgctggcataaccgaacaggccggtaagcccgttggccgtcgcggcagcctttttcgtagcctggttcgcggcggcaatgccgatcagcgcctgcgggccgtagatgcagaacccggcggcacacagcgtgaggaagagcaaccacacgggagcatcggcaggcaactgccagaacaagaacacgaacagcgcagcacccgccatgcagaacacgcaggtgcggtgcgcacggcccctgagccatttgtccgtagcccagccggcaaacaacatgccgacgataccggcgatttcgaacatcgccacgagccacccggcatgcgacatgctgacgcccttcgactggctcagcagcgaaggcccccagtcgagcaccgagaaacggacgatatatacgaagaaattggcgaagcccaggatccagatcagcgggttcctgaacacgtgcttcatcaggaatgcgcggtgctcggcactcttcgtctccttcttcacctccttcacctcggtgccttccagttcgggaagcccgaccgaagagggcgtatcgcgcaggaaggcgaccaatccgatcgccccggcgaatgcgatggccgaaggtacccagaaacaccatttccacgccccgacatgcgcagccgaagtcatgacgcgctccatcccggcggcatcgtcgggcgcaacgcccagattggcggcgatcgtcgccacggcgtcggggtcggccgtcatgttcatgcccacggtacccatgatataaccgcagagaatcaccacgaggcccgcaccgatcgaatgcgaggtattccacacagacatcttggtcgccagctccgtaggcggaatccagtgggtcagcagacgcgcgcagggagggaatcccgtcccctgcaacatgccgtttatcacccacatgatccccatgaagaggatcatcgtattggtgaactgcgaaccgtcgtgctgccccgtgatccagtaggagacatcctcgccgaatccgaaggcgaagttggccagcgcacagagcgcaagcccgatggccatgtaccagcgggcgttcatgcggtcggccagaataccattcacgaaacgcgaaagcccgtagaccacaccgttcagggtcaggaaaatacccaggctggttttcgagatccccaggtcggcctccaggccgggcatcgccagcgagaagtttttacgcacgaagtaaaagagcgcatagcccaccatcgtggcgatgatggtacgcgtctgccaatacttgaagcgcttggtttgttcaggagtcatttcggaatgaaagtttagtagtttcagtttgcaaatatactactttatttcccaaattccgcctttcccgaaaagtttatcgagccattgttccatccaaccgcaacggaaagcgatgtcgatgaccgtgaaacgactgcgcatgtaaggtattttttcgaaacttgcccggaacctggcacgcgatacgccgatctgctcgggttcgtagggcgcaccgaccagctcgaggcggcggcgaacttccccgaacgggatgatctgccggcggatacgcacgctcagctcgggccatgctttcttcaggcgctgcaactgcctgcacagcccctccttatcgacgtatttacccttggtctccaccaacccgcgggccacgaattcggggtcgttatcgaagatccggcgaatgtccgcctcggtctcctcccatgatttccaggctgcgacgcacttttcgacgtcgagttccccgaccggagcttcgagcagcatttcgaggaatgccgtcgacgcaagcgtacctatgcccaccttgaacccgtgcgaaacggatgccccgttgtatttgaggtgttccatgtcccacaggtggctgaactggtgttcggctcccgacgcgggtcggctcgactgggttgcctgcatcgcaaaaccactcagcagcaacccttcggccagctgttccactttgacgacattccccgcgtgtacgcccgccgggtcgcagagcgcctctttcaggccgtcctgcaccaccgagaatgcgaagtcgtccatcaactccgaccccacggcgtcggccagcatccagtcggcaccggccgggatcttggcgatcagatcggcatagcccgaggcggagagcttcgcaggcgcagccgcggcgatgttcgggtcgagcaccatccccagcggcgccgggcaatcgaaagtctgcttgttgccgtccttggtgatcgaagccccgtaggccgtataaccgtccatcgaagcggccgtacccacgaccatgtaacggcgtccgttatggctggaacagagtttcgtcaggtcgttgatcacccccgaaccgacggctacgggcacggcatcggtctcggcaagcacggtatccagctccccgacatacgcccattcggcatagagcttcgggtcggtaaagacatatggttcatcctgcgcgacacccgctccggccagtatcttatgcacgtcatcgccggccacgcgccatgtattggcatcggccacaacaagcgcccgcttatccgggaaaagttttctgaacatttccgcaacctgcggaagggtatcggttccgatcaccaacgccttggtgtcggtcgtgcgcgacagggcactttctactttattcatagtacgaaattaatttattaccatccggaaaaggggataagccatcctaaagcaaaataaagacgcaagaattttccctttcatgcctcaaagttaacatattttactttattatgcaatataagaaaacaaaataccaacaaatagctatctttttcttttctttttaatctccaatgtcgataaaaaccagggactgcagacacccgcagcccccggttcaccatatccaccaaaactaattaaccttcttaaccttcagattatccagccacatacgatggttttcaccatctttatcaagagccgaatagattttaatgcgcgtatcggccgtaacgccggtgatcttcactttgtgattcgtatagcgatacgtatccttcagcccctcctcgatcattttatccacaagcacgttacgtaaagtcaccgtggcaccgccgtcgctgataacggcatcggccgaggtctcgcccgttacgctcacgatcgtcgctccggtcaccgtcaccccgaaatactccataatgtcggtgttcgagggtgccatcatatcccccttcgtactaggctcgtaatagggacacgcatcgaattccagctcgatctccgtagcgccggacaacgaggacagtttcggcaaagtcagccatgcgggcttcttgccgccaccgaatttcatatatccggcggcaagcccgatattggaactgttggccatccaatccgcacgatcccactcgggcaggtatgcactgaaataagagtcattatccttcacgccctggcaatagatggagttcgcatcgcccgtcgtaatcaatatcttatccggatcggaaaaatcggtcgtgctgcccaggctgaagccgtaggcaccatagaagggctgaccgcctccgggaagattctcgaagtccttatacaggaggtatccggacttgtcgggagccgcgtcggtcgtaacggaagccgaagcccactcggaatcgagaagcgcctccttattcgccgtcgacttgcggcggagctccagtgtataggtcgccccgggcgtcagtccgccccacacgagccggtaatatttatacttcgtaaaattgaatttcgagaagttctcgatcgaccggatcacattcccgccggcatccttcacccggaaatcataggtatcggtcgaccctacgggctgctgctccaacgctgcggcggacagctcccactccagcacggcaaggccgtgtgtcttcgcgtaaatccgcgcagtgggagcaatcatcggcactggatcggtagttacgaactgagtcgtcgcctcgtccgaatcgaattcattcgccacggagccgtcgccgacgagcgcctgaaccgaaaccgtataatccgtaccggccttgagcccggaagccgtatagctggtggcgctgacgaccgccgaggaaacctcgttcccgtcggacgtcgttttgaccacgacccggtaattggcggcgccgctcacttcggcccagctgatcttggcccccgaggaggtcacgtcggcagccgccaattctgttggcgtcgctaatttttcagccgcaaagcccaaagtccccacgaccttctgcgtcgggtcggaattgaattccgcattcccggcgtaaagcgccctgacggtaaagatataaaggccgggttccagatcggcgaactcgcagttcgaatcctccgtctcgacggttttcctgaagtcgggacgcgtttgctgcgccacggaagcttcataggaggtcgcccccttcacgccttcccacgcaaatgcgatggaagtcttggcgggcgtataggtaatcttttcaagctcgggggccggcagtttctcggtcacctccgtcttgtcggcagccataacgacgatattgtcgatattgatacggtaccccttttcgttataggtctgcgcctcgatcttgatgcgcgtcttattggtagcgtcctgaacggtaaaggtcagcgtcttccatttgcggccggcagccgaagtctgtgccgggagcacggtattgttcacttcgccgttggttacgactccggcaccctcggcagaaacgatgtaggtacccgtttcgttatcgaaacgcaggaagtcgatcgaaaccgacacggtctcgggtgccgccgaaaggctttcgagctccggcgtcatgatccagccgccattggccgtaacccccagcttcacataacccgggtgctcatatacacgcaagcccgaccacttttcaacgccgcgattgatgcgataggtctcgcccatcgtattgaaaacgtcgctcgtaccgtcggatcccgccgaaatcatatcgggttccgcaggctccgtgccatcgaactccttgccggcgccgtcctttccgttcgggccggggcccttcttgttgttcgggtaatcgccgccccatttgaacaggtcgaagcccatgccgaacacttcgttcgacgaacttacgttccccgaaacatcaccctggaatttcacgaccccgtcgagtttgaaagtcacatggcacaccacctcacccagcgtcacgggcacaccggtgataggcaccgaaatcgtaccgctgccttcgtgctcgatcacagactgataggggctgctgatgccgagcccctcggcagcaaggccgtcgagcgtggcttcgatttccacgatctcttcgccgaaagccttgtcataggcgatttcgagcattgcggcggattccgtattggacttgagcgtccccgaaatcacggggtcgttcaccgagaaatgaccgtcggcctgtgcgacctcgatcttgatctcctcaccgttggccggtttcagataaatgcatcccgtacgtttgtcgccggcattacgctcggccgtaacggtcacccactggtaatcgcgtccgttaccgacaccattgtccggagagatggagaaccagttgttcaccggagccccgcttccgtccgtacactcgacacgcgccgaccacgaaccggcatagcgtaccgagatctgggtcgtggcgcctgaattgtacgtcagctcgacggcatcggtatcccgtttgagcggagccacatccggatcgtcggagcaagccgccagacagagggccgacacgaagagcatcgtctttatccaatttttcataagtttcataacattttgattagagtaataactattactgaaaatagcaaagcggatacgcctcggggcgcgtccttactctcaagagatatgtcggaacaacttgcaggacaaacataagcacattttttcttttttgcaaattttcgcaccttaaaaacactattacaacacaaattgtttcctttagtgattatttaaatagtttttaacacgcatgaaacatcaatagacgagctttaccacacaaaagacaataataagacaacacgaatcaagactaacaaaatacaaacactaacaattgattttaaggtatttacaatatataaatataaaaacaccccaaacctacataattattactattctttttgcaaagtttttaaaccaaatagttgcacgaaagaaaataaaaacatatatttgaaagcaaaattagaagaaccttatttattaaataattaaaacacacaaacctgacacacgcgaaaacctaactacttttttttcacactctccagcagaagttatatcgggaatgacttgcaaccagccgaaatccccggaaaaacccggccttatatataataggtatgggatccggcaacgaaccgattgataacttaaactgatgtaaaatgaaacaatgttacacgctgaccggacttaacgtactgggcaaaatacgctcgtacatcaggttcctgacggttattcttttatatgtgacatttgcgctcccggcctcggcacaaggggggggggaaagccgtctcgggtatcgttaaagacgacacgggaaatccactcataggtgtcaccgtcaccgtccccggtaccacgaaaggcacgactaccgatgccaacggtacatacacgatcaatgctgacaactcagagagcctgaatttcagctatgtgggctacaaaccccagacaatccacgtcaacaaccaatccaccatcgacgtcaccatgagcgaagacaacaccagcctcgaagaggtcgtcgtcgtcggctacggcgtacagaagcgccgcgacatcgtaggtgccgtcgaaaccctttcgacaaagggcctcgaagagcgcatgggttcgtcgatgagcatttcgcgctcgttgcagggcgccatccccggccttacgatgaccttttccgacggtaagcccaaccgcggcgcgacggtgcgcatccgcggcgcggagaactcgatcggttcgggcggttcggccctggtgatggtcgacggcgtcgaaaccgacatgtcgaccgtaaacccggacgacatcgagtcgatcacggtgctcaaggacgcctcttcgaccgccgtatacggtgcccgcggcaccttcggcgtgatcctccttaccaccaagaaaccgcagaaaggcagtgccaaggtgacttacaacggtaccttcaccttctacaagcgcgccaccaagccccagatggtcaccaacggctacgattataccacctcgttcctggaatcctatgtcaacgcattcggcaaggatccctcgaacatcaacaacgtattcaaattctcgcgcacctggtacaacgaactggcacgccgcaacagcgacccctcgtatgagaaatggcgcgtcaacaaccgcaacgtctacgaatacttcggcaacaccaactggtacgacgtattctacaaggactatacgaccggacaccagcacaacatcagcgtgacaggaggcggtgacgtggcatcgtactacgtctcgggccgtatgttcgagcaggacggcatctacaacgccggcgacgagaaataccagcagttcaacgtcaaagccaaaggcatcgtcaacgtaaagccgtggctgcgcgtggagaacaccaccgacttcatgtaccgctattcgcaccagccgacgagccacacgggcatctccacaacgccgatgacggtatcgcgcatgctcaaccaccaggcttaccccgtagccctggtcaccaatcccgacggcacgtggacggaagcggccgtatacacgggctgggcaggcttcgtcgagggcaactcgtggcgtaaagaccgcaagttcgacatgaacaaccgcacggcggtcacgatcgacctgttgaaggacgtgctggtcgccgccgccgacgtgagcttctatttcaaccagaccgaccgccggcaggccgtgaatagctacacctactacacggggcccgacagctcgggcgaacgtccctcgggctcgctctacgaagaacgctcctacaaccgccagaaggtcgcttcgagcgccacgctgacctacacgccccgcctgggcgacaaccactcgctgagcattatgggcggttggaacatcgaagattacacctacaagagcaacctgatgagccgcgaaggcatcatcatccccggcaagcccaatttcagcctgctggaaggcgaagcgatgaccctgaaggacaacggcagctacgactggggactggtcggcgcattctaccgcgtaagctactcgtacaaaggaaaatacctgctcgaagccagcggccgttacgacggtaactccaagttcccgtccaaccagcgttggggattcttcccctcgggttcggtgggatggcgcatctcggaagagaacttcatgaaaaacgccaactggctcgacaacctgaagatccgcgcatcggtcggttcggcgggcaacggcctcatcagcgatgcctacgcctacctctccacgatgtcgattgcacagtcgagcctgctgaacaacggttcggtgttcaactacacgcaggcaccctccccgattcccaagagcctgacatgggaaaaggccacgacctatgacctcggcctggatttcgaggcattcaacggccgcctgaacttctcggccgacatctaccgcaagaagacaaccgacatgtatgtggtgggcgaagagctgcctgccgtattcggcaacagcgcccccaagggtaactacgccgacatgcgcaccgacgggtgggaggccagcctgtcgtggcgcgacagccacaaggttgcgggcaagaccctgagctacaatattaaagtcgccgtatgggacaacaccagcaagatcacccgctatacggccaaaactggcacgctcccgaccaactactcgatcaactattacgaggggatgaccctcggcgaaatgtggggctacaagtgcgacgggctgttccagagcgacgaagaggcgcagacatgggccaactattcgaagttcaccaaccgttcggcgacctggcaggccggcgacccgcgctacctcgacctgaacggcgacggatacgtcaacaacggcaacaacacgatctacgaccacggcgacctggtgaagatcggcaacaccacgccccgctacagttacagcatccagggcggcgtgcgctggaacggcatcggcatcagcatgatgtggcagggcgtcggcaaacgcgactggtatccggccaaggagtcgggttatttctggggacagtacggccgcccgtacagcatggcactcccgtggcataacagcgaccgctggtcaccgaccaaccgcggcgcctactggccgcgcctggtcggctactcggccagcgactcgggcctgatcctcgcgcagcccaacacgcgctacgtgcaggacgcttcgtacatccgcctgaagaacctcaccatcgactacaacttccccaaggagctggtcaacaagatcggcctccaggcactcaagatctatgtgtcgggcgagaacctcctgaccttctcaccgctcaagaagtacgcgaaaaactacgacccggaaggtatctacgccggcgatgcggactacggaaccaacaagttcggtagcgacaacttcggcgacggcgacggttatcccgtcatgaaatcgtacacgatcggtttgagcataactttctaaattacggacgacaatgaaaaagataacatatattttactttcggcctgtttcctgctcacgtcctgcgaggatttccttaacagggatcccgacgccaaggtcggatccggggattacttcacggacgaaggctctctgctgacctatatcaacgggttcatccagaaatacacccccagcgcagcagacctgggttacggcgacggatactcggacatcatggctaccgaaaagtcgttcacgttcctgaccaacgcttcgtggacacccgacctgcagagcggctggtcgatcagtaactggacaccgatctacaacatcaactatttcctggtgcacatgcgcgaggcgaaggggctctccgaagctacctacaaccactacgaaggcacagcccgtttctggcgcgcatggcagtatttcgagaaggtcaagaccttcggtgccgtaccctggtacgacgaaccgatcgaccccgaagacatggtggcgctctacaaaccgcgcgacagccgtgaatacgtcatggagcgcgtgctcgaagacctgaacttcgcctgcgagcactgctacacgtcgtcggactggatcaactgcgcccgcatcaaccggtacatcgccctggcttacaaggcccgcgtgtgcctgttcgaaggtacctaccgcaaataccattcggtagacccgtcgacgggcaaggcatgggaagacaagcaggcttcggcgaaattcctgcgcgaatgcgccgaggcctgcgaggaactgatggcagccggcgtatacagcatcgtgaacaaccctgccaaggtcaagacccagtaccgggagctcttcacacaggaggccgtcaacacgaccgaagtgatctgggctcgccagatgagcgtcggcatgaccacgttccacgaccttacgtggcgttacacgtcgggcagctacggacagcgctggtcgctcgaccaggatttcgtgaagacctacctcaacctggacggctcgcgccacacgaccaccggcgaggagttcacaaccgaaatcgaaaaccgcgactaccggctctcgcagagcatcatcacgccgggctacacgaagctggtgggcggcatctcgaccgcaacaccccccgatttcacggtgacgctgaccggctaccaggtcatcaagttcaacatcgacgacaaggcatacgagtcggcatcggtttcctacaactcgctgcccatcatgcgttacgccgaggtgctgctcaactacgccgaggcgaaggccgaactgggcgaattcagcgacgacatctggaacaagaccatcaagccgctgcgtgagcgcgcaggcgtcgacggcaagcgcccgacgtcggcagacccctatctgcaacagtactacgggctgagcgacagcgacctgctcgaaatccgccgcgagcgtgccatcgagttgctgctggaagggttccgttacgacgacctgatgcgctggcatgcgggcgaactgctgaacaagcagtggtacggcatctacatcccggccatggacacttcctacgacctcaacggcgacggcatcaacgacgtctgcgtgacttcgggcgaagccggcaacgaacccggtgtaacgtacatcatactcgacaacagcaaatactcgctggagaacggcacgaccggacgcctgctctataccgtgggccgcaacttcgaggaaaagcgctacctgcgccccatccccaagacggcactgaacatcaaccccgacctgggacaaaactattactggagataaacagggaggaaacgtgccccggagcgatattttcccggggcgcgcatcccgacacaaaccttaattcagcatacaatgaaacgatacatatttatcatcgccgcgctcactgccctgatcttttccgggtgttcgaacgacgacgaccgcccggtaaagacccccatagatccgctgaccgacatctacggcgtggtgaccgacaaccaggggaagcgactgcagggaatcgtcgtaagcgacggatacacctgcacagccaccgacgagaacggcgtataccagcttacggccggggaattctcctatcatgtgtacctttcgatccccgcggcatacgaggtacccgtgtccgaagggctgccctgcttctggcagaaactgaccgaagggcgcaagcgctacgacttcacgctgaccccgctggccggaggtgccgaaaacgagttcaacctcttctgcgtggccgacccccagtgccagaacacgaccaacatcgcacgtttcaacaacgagacggtgcccgacatcgccgcacaggtcgcagcctcggcgctgccctcgtacggcatcacgctgggcgacatagggtggaacaccgagaatacggactacacgaacgacgtattcccgctgatgaaaaaggccatgcagatggacaaggtcgggctgccgctcttccaggtgatgggcaaccacgataacaaggtgatcgccgtcagcaaggataactacaccgtcgcacacgacatcgccgcacagcggaatttcgaatacatcttcggccccgtaaactattcgttcgaccgcggcaacgtgcacatcgtcgccatggacaacatcattttcccgagccacaaggattattcgctcggattccgcgacgaccaggtcgaatggctccgacaggatctgagttatgtttcgaaagacaaaatggtgatcctctgcgtacacatccccatgcgcgccagcggcaaccagaacgtacaggcggtactcgaactgctcaagccgttcgccgaagtgcacatcatgtcggggcacacgcactacgccgagaacaacacctacgacaaccactacgaacacgtgcacggcgcggcctgcggcgcatggtggcattcgacgatcaataccgacggcacgcccaacgggtatgcgatctacaaggtcaagggtgcgacgatcgacaactgggtttacaaggccaccgggttcgaccccgatttccagatacgcctctaccgcggcagcgacatcttcatggaagggtatacgccttcgtatcagttctactacaagggcgatgaccagatcgtggccaatatctggaacgccgacaaggactggaagatcgaagtctatgaaaacggcaccaagaccggggaaatgaagccctacgagagcaatgcgaccaaacgcgacgcatgggcttcgggataccactgcggtgtacagggacgcgatcccagcaactacgaccgtacgaacacgagccacttgtattactacacgcttcagtcaccgacagcatcggtcgaagtgcgcgccacggatcggttcggcacaaccttcacccaaacgaaattcaccacgggccttgccgaggatttcccggtcggcgagtaggttattacggaaaaattcgtaactttgtgaattgcgattcaaaagcagaaacgaaatgaaacgactgatctcgatactcgtcgccctgtcggcctggggcattgcctgcgcacagccctcggtacgcattgcccacgggccctacctgcaacaggtcaccgacgacggtttcaccgtcgtgtggacgacgaccatcaatgccgcatcgtgggtcgaagtcgctcctgacgacggatcgcatttctacgccgccgagcggccgaaatattacgattcgcacatcggcaaacgccgcataggccgcctgcaccgcgtacgcgtggaagggctggctccggggacgacctaccgttaccgcatcatgcagcagggcgtgctctgcgacgaaggcaacaagcgggtagtcctgggcgaaggttacgggagcgacatcctcaaacacaagccctatacggccactacgctcgacgaaaagaaggatcaaaccgaattctgggtcgtgaacgacattcacgcccaggattcgatcttccggttgctgctggaaggtgccgaaaaggccaaacccgatttcgtctgcttcaacggcgacatgctcacttcgatggagtcggagaagcaacttttcgaggggtatctcaattcggccgccgaattgctgacgcccgcgggaatcccgatcttcgccacgcgcggcaaccacgagaaccgcggctctttctccccgagtttcctcgactacttcccgacctccacgggcgaggtatactacacgttccggcaggggccggcctatttcgtcgtgctggactgcggcgaggacaaacccgacagcgacatccgctattacgggttgtcgaccaccgacgcctaccgcgaacaggaagcccgctggctgaagggcgtggtcgaaagcgaggaataccgcgcggcacccctgcacatcgtcgtgctgcacatgatcccgggcgggaaaagcagctggcacggcgaacaggagatccgcagattgttcgtaccgatcctcaacgaagcttcggtcgacatcatgctatgcgggcactaccaccgctaccagtggatagacgacgggagccggggcacgaacttcccgatcctcgtaaattcgaaccgggacaagctcgtggtgaaggcagaccgcaaggggatcgacatcgacgtcgtgaacacgggcggcgaggtcatcaaacgccaccggatcgacaagtaaccgcctgaaaggaaacagaacagggacaaaggcgcttccgggcgcctttgctcttggaacaaaccacagagaaccaacaaaacacactatgaaaacatccagactactgaccgccttcgcctccgccgccctgctgctcggatgcgccccgggcgggcaaaaggcccaagggccctactacatcgacatcaaagaccgcgcacagctgcacgagtggttccgctactcgcccgagcggccggtcgtcatcagcggccaccgcggcggcatggtgacgggattccccgaaaactgcatcgagtcgttcgagaagacgctcacgatgatgccttcgttcttcgagatcgacccgcgcatgaccaaagacagcgtgatcgtgctgatgcacgacgccacgatcgaccgtaccacgaccggcacgggcaaggtttcggactacacctacgcggagttgcagcagttcttcctcaaggatcgcgaaggcaacgtcacgacctacaagatccccaccctcgaggagtgcatcgcctggagccagggcaagacgatcctcaacctcgacatcaaggacgtcccgctcgaagtgatgtcgcaattcatcaaccgcctggcaccggccaacgtgatgtataccgtgcgcaacgccaaacaggcgcgcacgtatctcgaccgcgacccgcaggcgatgttctcgtgctggtgcaagaacatgaaggagttcaacgagtatgtcggggagcggattccctggtcgcaggtgatggcctacgtcggcacgatgatgctgcccgaccagcaggagctttacgacaacctgcaccgcaacggcgtgatgtgcatgatctcgctcgccccgacgcacgaccgcagggccaccgacgcgcagaagatacagggctatgaactcgaaatcccgacgggttgcgacgtcatcgaaaccgactacccctacttattccagaatctcaatctcaatcgcaagtaaacaaatggctgcattcgaaaaataccgctcggtctacacgcacgacgagctgatggaacacctgcgccgcatccggcacgtggcgctcgacatggacggcacgatctacatgggcatgtcgctctttccctacaccaagccgttcctcgcggggctcaaggagatgggcatcggctattcgttcctgaccaacaacccgtcgaagtcgatcgccgactacctgcacaaactcgacgcgctgggcatacgggcgacacgcgacgagatgtacaccaccgcactggcgacgatcgactacatcagggagcattaccctgcggccaaacggcttttcctgctcggcacgccgagcatgatctcggaattcgaggccgcaggtttcgaatcggccgcagattcggcggacgacgtgccggacgtggtggtcgcggcgttcgacatgacgctgcagtatgaccgcctgtgccgcgccgcatggtgggtgtcgcagggcgtaccctacatcgccaccaaccccgaccgggtatgccccaccgaccagccgacggtactggtcgactgcggttccatttgtgcttgcatcgaacatgccacgggacggcggcccgacatcacgctcggcaaacccgatcccaacatgctctcgggcatactctcgcgccacggcctgcaacccgaccagatcgcgatggtcggcgaccgcatctacaccgacgtggcgatggcgcacaatgccaaggccatgggcgtgctggtgctctcgggcgaaacgacgctcgacgtggcggacaaggccgacccgcagccgcacatcacggccgacagcatcgaagtgctgggcgcgctgatccgcgaagcgcacagcaaataaccggacgcagcatgccgtccggcagaccggcagcaccgcaccgccgcaccggcatatcagcgcttgggcgcacaaatgcctgtcggaaacagcactccgaataggcggaggttatactcctatcagaaaaaccgggctccgaaagggcccggttttttacggtgttcaccggaaaagcactatctttgcagaagataaaccgcacccggacaattgggagtttgcgctcttgccgcccggttgcattatcttcgcggcgatagagccatacaaacgaacggtaaaccctatggaacacaatatcctcacacccctgctgctgacgctgggcgccggactggccaccggcatcggcagtgccatcgccttcttcgcccgccgcaccaacaagcggctgctgtcgttctcgctgggcctgtcgggcggcgtgatgatctacgtgtcgttcgtcgagctgttccagcaggcgcacaccaccctctcggacgaatggggtgcacagacggggatcatcgtcaccgtcgccagcttcttcgccgggatactgctcatcggcatcatcgaccggctcgtcccctcgttcgaaaacccccacgaggcacacatggtcgaggagatggacaagcagccccgcaacccaaaactcatgcgcatgggcgtaatgaccgcactggcaatcggcatacacaattttccggaaggtatcgccacgtttacctcggccgtggacaacatggccctgggcgttgccatcgccgtggcgatcgccatccataacatccccgaaggcattgccgtctcgatcccggtttactacgccacgggcgaccgcaaaaaagccttcaaactctcgttgttgtcggggctcgcggaacctgtcggggcggtgctggcctaccttgtgctgatgcccttcatgacgccgacactgatgggctgcatcctcgcgggcgtggcgggaatcatggtattcatttcaatcgacgaactgttgcctgcggcccgcgaatacggcgaagcgcacatctcgatctacggcgtagtggccggcatggcactgatggccgtaagtctcataatgctcggataaaacaatggacatcctattactactcgtcggcctggggctgatcctcggcggcgcaaatttcctgacggacggctctgcggcggtagcccagcgtttccgcgtcccggaattcatcatcggcctgacgatcgtcgccgtcggcacctcgatgcccgaactggtggtctcggtactctcggccgcggcgggcaacagcgacgtggcgatcggcaacgtcgtcggctcgaacattttcaacgtcttcgtaatcctgggaatctgcgcgctgatccggccgctcgtgcttactaaggaaaacatccggcgcgacatcccgttcggcatggccgcgtcgctcgtgctgctggcggtcacttccgaccgcctggtatgcgccggggcaacggacaggatcggccgcccggacggcatcgtcatgctcgcgctctacatcgggctgatgtggtacatgatccgcacaaccaaacgccagcgcagcatacccggtgcgacaaccggaatgaatatccccgtatccggagctgccctgaaaaacggggcgcaacacgccgaaggcacaaagaaaccgatggccttgtggctggcgggggtaatgatcgcaggagggctcgcgggactggtcttcggcggcgagatgtttctgaaaagcgctacggcgatcgcccgcacgctcggaatcagcgaatcggtcatcgccatcacgctcgtggcgggcggcacgtcgctgccggaactggcttcgtcggtggtatcgctgctcaaaggcaaagcagaaatggcactcggcaacgtcatcggatcgaacatcgccaacatcctgctgatcctgggcatcagcgccacgatccaccccctgacgatgggcgggatcacgctgacggacatcctcgtggtcgtgctgagttcgctgctgctgttcatggcagccttcacgttccgcagcaaaaagctcgaccggtgggaaggcgctatcttcctggcgatttacatcgcttacatctggtatttggtcaggtaacggtcgaccagccgcggcagggcatagccgccaagcgcggcggtttccacggacgggaaagcaggcatggcgtcgcattcgatgcggtggaaaaccgcatgcaaaagctggtgcgaaagctggtgcccgggcatcgtgacgctgcgccgcaggtgccacctgccgttgccgagcaactcgcggaacgccgccgttgcagccagctccgcgaaatccgcagccttgtccgtttcgataagcggaaattcatacaacccctgccagatatcgcctccgccgcgacggtgcagcagcgtctgcccgccgcaggtcacgtgcaggtagttgaaccaacggtcgcgcaccttcgcacgcccctgttttacgggacgcacgcccaccgtgcccgcagccagggcgaggcaccgcccagccaaggggcaatccccgcaccggggctgcgcgggggtacattgcagggccccgaaatccatgatcgcctggttgtaaagtcccgggcgggaagtatccagctggaactgcgccaactcggcgaacgtcctcttcccggccgtcgtatctatcgggatgccgatatcgaaaagccgtgccagcacccggtatacattcccgtcgagcactgcgcacggagcgtcgtaaacgatcgagcagacggccgccgcagtatagtcgcccacgccgggcagcgcgcgcacctccccgtacgtggcagggaacaccccgccgaaccgagacatgaccagcctcgcggcagcatggaggttgcgggcacggctgtaatagcccaacccctgccacagtttgagcacctcgtcctcgggcgcggctgccagtgcggcgatgtcggggaaccgctccgtaaagcgcaggtagtactccaatccctgcgccacgcgcgtctgttgcaggataacctccgaaagccatatccggtaagggtcacgcgtgcgacgccagggcaagtcacggccttcgcgggcgaaccaggatagcagtatgtcggaaacaggctccatctttcggatgcaaaagtaacatttttcccgattaggaactatatttgaagaagcaaagccactatctaaaacgcaaggttatggaaagaaaaaaacacacgctggtcgacaatgccgacgaaaagcgctatgaattcgacctgggcgacgacatcgccatcatcgaatacatcaaaacccagggattcattatcctgacacacaccgaagtccctgaaaaatacgaagggcagggcatcggcgccgagctggtgcacgacgtactggaggatctgcgcgccaagaaactacaaatgatcccccagtgccccttcatcgcccaatatatccgccgccatcccgaatgggtggacgtggtactgaaagaaatgccggccaaataaacaggaaacccgcctcccggcgggtttcctgttacggtatcacggcattcaaaaatcgtccgtgcggaacggcacgaccggcagcccccggatgttggccaggttgccgggcatgaagtcgcggaacccgtaccgcacggcaaccggactggcaacctctttcgacgagacgaccagcaacagctcccgcctgtcgacctccacatcggccggatggaatacccggtcggggccgcacacctcgaacccgcggatatcctccatacggctgaacccctcttcggtatgggacaaggcaacgtaagcctttccgtcgcggatcccgatcgacctgaaccgcgggctttcgcaggcgatgtctgaaaaaccgtaggtcttgttgagtgccatgtaggccagccggtgccctacgtcccgtttattcttggggtggatattggttgcctcgtagggttccaccaggtcgttcgtgcaaatcacgccgctgttggggatgagttcccgtgccttccactgcgcttcgcgcagataggggccgttgccgctgccataggcgaagggggcgacttcgacgtaatagaacgggatatcgccctgcttccagagcgaacgccacagccctaccatgttggaaaggcggacagcatagtccttatactggtttacgttcgattcgccctgataccacaggaagccgcggacggtataccccgccaccgggtgcagcatggcattgtacatcaccatcgggcgcagccagtgggtcgtggcctcgatgcctttttccgtcaggtcgatatcgggataggtttccagtatctcgcggttcgtccagccctcgacgcgggttccgccccacgtgcagtcgacaatgccgacaggcacgtccagcacgtcgctgagcagttcggcaaagaaataacccgtggcggtgaaatcgggcgcggtctccaccgtacatggcctccatttccccggaacccgatcctggggcgtataggccgccgtgaggggtattttcacgtagcggagcctgtcgcgcatactccccgcacgggctatgatctcgttggccccggcgatgggacagttattgaacccgcggagcggcatctccatattgctctgcccgccggcgaaccagacttcaccgatcagtacgttgtcgagtacgacccgctcgccgcttacgatcgtcacctgctgcggctcgtaactgccggccggggtgttcaccagggcagaccaacggccgtcggcatcgcttcgcacggtgcattcggcaccccacgaggtctcgatccgcaccgtggcacggggatcggcccagccccagaggcggcattgggcattttgctggagcaccatgtcgctgccgatgatctcgggcagttcgaccttggccacggcaccccatgcggcggcaaggcaaataagggacaaaatgagtttcttcatatcggtgcggtatcaatttatttcccgcaaaattacattttttccggcaaccgggaataccccgcgtgcataaaaacaacccgggtgttaatataggtatcgaattttttcgaaaattcccatccggaaatttggtttgttttataaactactttatatttacaacagatttataaaccaagagagtcatttcacaccgcaaacctatggaacttctggaaaacaccaccgacaaacgccgtcttttcggccgctggttcgcccgccgtatcaccacctacgtcgcggtatgcgcgttcctcaccttcgtcaattggtacacctcgccccactactggtgggtggtatgggtcatggccggctgggggctgaacctgatcctctcgctggtctggtacctgaccggctgcgacgaggacaaagattaccgttaaacccataaaaatcccgattatgaaaaccttacacctgttactggccgccagcttcatgctggcctccacggccgcctcggccaaaacgctcgaagtcaccgtatcggacattcgcaacgacaagggcaacatcctcgtcatggccaagatcgccgggcaggaacagcccgtctacggcatggcagccgcaagggccggcaaagtcgtcgtgacgctcgaaggcatcgaagccgatgcggccgagctttcgcttttccacgacgaagacggcgattacaaaatgaagatgggcgagcgcggccccgccgaaggctacgccacccgaaaatgcaagcttcccgccgagcacaacacggccacgctgaagctctactatcctgccaccgaaaacgaataggcgcatgtaccacccgcagctcaccgcactgctgctcgccgcgacgatcccggccgcagctcaacataccctccgggggcgcgtcctggagggcgagagcccggtcggctacgccacgacagtcctgctgcgcgacggacgccaggcagcgggcacgacgaccgacgacgcagggggcttcgtgctcacggcggatacgggccgttacacgctcgtactgcggcacgtcgcctaccggcccttcgaacaggaggtatgcgtcgccgcagcggataccgacctcggggatttgccccttgcacctctcggaatcagcgtggtgacggtgaccgccgagacggtgacacggcaggccgacaggttcgtggtcagcatcgggaatacgcccgcactcgcgggacaggacggcaccgaactgctggcgcgggcgccgggcgtatggctgggtgacaacggcatctcgatcaacggcgccggcgggacgaaagtctacgtggacggccgcgagctgaaaggttcggcggaggagaccaccacctacctgcgcagcctgaccgcagccgacatcgcccgcatcgaggtcatgccgctgaccggcgccgagttcgcagccgacacgcgcggcggggcgatcctcatcacgctccggcggcgccgcgacggcggcatggacggcaacctgcaattctccacggtgcaaagcaatcggatagcgggctataccccttcggggcgtatcggcatccgcacagggcgctggacactcaccgcatcggggtcgggaagcttcactccggttgccgaaagccgcttcacggagacccgcgaacaggccggtcagccgctgcccttcgccggcaggagcgattcgaagagccgcacaaactacgggcgcgggcatttctccgcggtcttcgacccgacgccgaaacacaccgcaggtttcgacatcgaatacacggaacgcagcacccacatgccgaccctgtcgcgcaccacactcggacaaacccagagcgacagccgctaccgccagcacatgggcgggaataccctgaccgcaaccgccaattacatctggaagatcgacacgctgggatcgcagttcaaactgatcgccgactacacgcgttacacctccgacggcgacaacagctaccatacgacgacctgcgcacccggaaccctgcgcgactcgctctacgaatccgccacgggttccgtatacgacatcctgacggccgacgccgggcttacgcgcaaactgccgcacagcctgacactgcgcgcgggactgcgctacacccgcaacggcatggcggacgacagccgctacgcagcacagacgcagggcacatggctggcactgcccgaatacagctacgaccagcactacaccgagcagatcggtgcggcctacgcctcgctggaatacagcgccggacggtgggagctttcggccgggctgcgcggcgaatacacctccgtcgcatcgcagacgctcgaccgctcctatttcgggttgttcccaaacgtttcggtcagccgcgcgctcaacgccctgcgcacatggctgctcgtggcgcagtggagccgcaacatcgaacgcccggcattcccggcgctgaaccccgcacggatccgcatatcgaattacagctggcagtcgggcaacccctcgctgcggccgacctacatacaccgtttttcgctcacggccgtatggaaataccgttacacgctcaccgtgggcggcaacctgcaccacgacctgattcgcgaaatcgcacacagggaggcaaccgacccggacgccgtgtatatccgtcccgaaaaccattacacggagaaccactggttcgtggcggcgagcgtcccggcgaaaatcacccgctggtggaacctctcggtcaatgccgtcggggtgatgcagcgcatccggctcaacagcaccgacagccctgcgacgcactacctgatgttcgccgacgccacctgctcgttcacgctgccggccgggttcttcgccgaagccgtctaccgtgcccaaagccgcctctactcgggcaacagcgaggtcgggccgcgccacacgctctcggcgaccgtcaaaaaacagctcttcggcaaacgcctgacgcttttctgcaccctgtcgaacatcaccggctgcgactgggagttcgcctccctgaccgacggcatgcggcgcacgatcgacacacggcaagcctggtcggggcgcttgtggaaagtcggcgcggcctggaatttccgcaccggcaaaaaattccgcgcccgcaccgtcgaaagtgcagcggaaacccagcgcaagcgcctcgtgaaaagcacggaacaataaaaaataattcgtaactttatcccccgtaacccaccatccgccatggaagaaaaaaacctcgacgcagaccagcgcatcgaactcatccagcagatgatccgcggcacccgccaacggctctcattcggcagcagcaacctgttcctcctgtggggatacctgctggccgcgaccgccatcgtgatcttcgtcctgctgaaaaccaccgactgccgcacctggctatggttgtggctgccagccgcgacaacagggggcgccgtgacctggtggcataacaggttccgcgccccgcaggtcaaaagctacaccgaccggctgctggaacagatatggagctgcatagcctcactggtcgtcctgtcggcgatcctgatttgcgggtacgacccgtgggcggtcgacccgctctttcccgcgttgctgctgatcggcgccgggctcttcatctcggggcaggtgatccgcaacagatacatgtactacgcgtcatgcatcgtcgtaccgatcggcttcggcattacccgcgactcgtggctcaatgccgaccccgactacaacctgctgcaattcgccgcagcgatcctcatcgggctcacgggtgccggctatgcgctcaggcggcaggtaaggcgcgatgcggacgaagggcggataacaaacggagacaactgaaacgacatgaaacggacgcaaaaacacatcgctatggaagacaagcaactgaatgccgccgagagcatcgcgctcatcagccgcatgatcgacaacacccgcaaccgtatgctgcgcaactcgggacggccgttcctggtctggggttacgtgaccgtcttcacgacgctcttggtcatgggtgcggtgtattatttccagaatccgaaatggaacatcctgtggatgctgctccccgtactgggcgcattgctgatgtggctgacacgcgacaagcataccgaaggcaaagtcagcacgttcgtcgaccgcgtcatcaacaacgtatggctggtaatgggcctcacggcgtggttcgtcagcatgctctcgcttttcagccagatacggctgccgatcctgttcatcatcctgctgacgatgggcatgggaaccacgatcacggggctgatcatccggttccgcccggccaccgccggcggtacggcggctatcgtcctcgctcccgtttcgctcatcgtgagcggttactggatgccggccctcttcgccgtcggattcgtcgtgatgatgattatcccggggcatatcctcaactacaagtcgaaccatacgaacggataacgcaatgaacggacagaaaatatccgaaacggaagcgctggacatcatcgcccgcgtcttcgaccgcaatatgcgccgcatgaattacgtacggggcgaattgttcatctgctggggagcgctgctcagcctcacggcactggccgaatacgggctttatcgctggacaggcgacgtgcgcgtgctgtggagctggctggttccgctgctctgcggctatatttggacggttcgcaattcgcggcggaaggccctcgtccgcacggggttcgacgacctgctgatcctgatatggggcatgccggcaatgatctcggccgccgcgatcgtctatgccgtaaccatccccgggaatacgataaaccccgtaggcgtcatgcagctgctgctcggcacggcactggccatcaccgccgaattctaccggggcaaaggttcccagcaatcgggatcgttcgcagcgttgctcatgctctcggtcttcgagctcatcatggcgttcaactatacgttccgcatgccgttcgacgcccagggcggaacatggatgctcgaactctccgcccatggcatactgctcgtactgctacccggttttatcctccgccacataacccgcaagcaatgttcaaagaactgaatcccctgttgcattcggaactgagactggccgtgatgtcgatcctcatcggggtcgagagcgccgacttcgtctttatccggcagcagacaggggccacggcgggcaacctttcggtacaactggacaagctggcgaaggcggattatatcgaaatcgaaaagaccttccgcgggaagatgccctgcacggtctgtcgcatcacggacaccgggcgcgatgccttcgccgaatacgtcgcggcgttgcagacctacataaaaagatagccccgaaacaccccgcagcggaacgccgcgtttgttgcctctgctacggcaccccggaaaggcatccgtatccgaatttaaatcgcaaaatttacatcgtacagaagaacgtcaccaggaacgggacgctgaaatcgagcacgcagccgtggaagaccgacaccacggcatagggttttcctgcggactgcgtgatgatcggcagggtggtatcgaaagtcgtggcgccgccgatcgagacggcggccagcggcccgaaccaccgggcgacgaggggcgcggccaacagcgtgaacagctcgcgcatgacattgcagagcaatgccacggttcccagctccgcaccccggaaatcggcgatgaagatactcgaaagcgagtagtagccgaacccagcgccgacggccatcgtgtccccggccgtaagcggcggcaggagcagtgtcgacaaggcagcgccggccagcgtaccgacggccgtcatcacgggcagcagcgccagccgcggatcgagccgccggacacgtcccgcgagggtcgtatcgttgccgagggtgatccccacgcaaaacatcagggcatagagcacataagtgctaaggcgcgaccccgccacgtcgaacggcaaggcggaggagagccccgccagacatcctgcgacgaaaaaggcgacgatcaccagactcccccgcaaggcgccccacatcgaaagcgccgcgtccgccccgcttacgacgtgctcccccgcaatacgcccggcgttctgtccgggacactccactgcaacggccggcccgggcattcccgtaccggcagaggtcgtaacgcgcggttgcggcgcctcgatccccgcagcgacagccccggcctgttccggcatcccttctgcgggaggccgggatgcggttccccgccggacgcagcgccacaacagccacgacatgcagatactgcccgcgaccgagcatgcgaagatgacgaaggccgtgcgtccgagggtcgccataccacccacgacggcagggtcggaaccgacttccagtcccagcaggaacagcaggagccagataatcacggtaatcatacgggagacgaatacgaggcgccagctcgacagcaggcgccccgcaatgattcctccgatgatgacggcaaaaatgacaagcatcgtttattcctgcttcgccgtgagtttttcgatctgtttatcggcctcggccgcaagtttgtcggcctgtttgcgggcttcctcgaccagtttgtctccggccttctcggcagccagcttggccagcgcacctttctccttcgcaccgtcgataagcttcatccgttgcgcctgggcggcctcgacgagtttctcacccgccttcgcggcctcggcccggaggttgtcggcctgtttgcggatctcctcgccgagcgactcgctgcccgtgagcttctgaatctgctggtcgacgacgttcttcacggcctgttcggcggcctccttcacaccgagcgtgatcttgggcgaggtgaacgtgccgccgataccgacgttgaccgattgcaggataccgcccgtcgaaccggccgggagggctaccctggccgtatagtcgatggtctggtcgagccccgtcgaacccgacatgttgatcctgatgtcgcccatcttcaggtcgaaaggctccgtagcgatacgtccgtcgcggatggcgaagcggatagccacgtccttggcctcgatcttacgcaggttgtcgttgttgagcgccttggccagtgcatcgaacgcctcaatgttctggatgcggatattggccgacttgatctcgcccgtggcgttgaccgactgcaggtcgggcgacatctgcgcatcgagcgtcgcggacatatcgagcgagagcgaatagtcgccgcccgtcttggcaaagaccgggacgagtttctgcaccatctccaactcgtcgaaggtcttggagaacgatgcccccgaaagccccaacgagagtttcagcgccgggcgctgcggatcgaaggccgtcgaatagctacccgatgcggtagccgtaccgccgaagagccgcataccgaggcggttgagcgacagcgtaccgtccgccatgcgcatttcgccggtgatgccgccgatagtcatcttctggaacaacaccttctgcaactcggtattgagcgaaaggtcgaggttgcgcgggacttcgagcgcctgcgcgggagcaggagactcggcgggcgtttgggcagcagcttccccgccggcggtttcttcgtcggccggcatggcgttcatgatctcgttcaggtcgagcaggtcggatttcacgtaaaggcgcccggagagcttgtcgccccgcagcaggtagccgatataccccgtaagctggccgttggccgcaaggtcgctcttacccacggtcacgccgaactcgcctagcgtcatcgacgccggggtgatcgtagccgcggcacggcggatatacaccgcgggcaggccgggcatggagaggccgagtttctcgacgacgaacgtccccgaggcgccgatctgcctgtaacgggccttctcgacatcggacatgcgccccgaaaccttcacgtcggcgctaatcagtccgctcagggctacatcctcaccgagcgggtaaacctctttcaccgcccccaggtctacccgtccgtcggccgcagcgcggaataccggatcgctggcgaggttcgtcgcatagagcgatgccgaaagcgtgttacccgccatgcggagcgtgaatttcgaaaggtctacctcggtcttgtccatgacgccgccggggttggctatccgtgcggcgatattgattccgtcgaccgccttgggcaaagacgaatactggaaactgccgttgcgcacctcagtcttgagttcgaaggccgggagcgccgccccgcgcatctcgccacgggcccacagcgccatcgaaagttcgccggaggcggacaggttgcggaaatcgcgggtatagaatgccgggacgagcgaaagcacgtccttgaactgcaccttgtcgcatccggccgtaatatccatagccacgacatcgtccttcatctcggcccagccgtcgagcgtaagctcgatcgcattgaggcgcagacggttccgggagaaggtaaaacggttgttcttcaggtcggccgcgatcacggcgtcgagctccgcctcggcgccgctcagcagcggaattccgcccgaaaccagccgcacggcaccggccgtaagccgcaggtcgaggtcggtctggtcggccgacatgtcgccccgcaggcgaagggagaggggtgccgtcgaaaaacgcatgcccgtcgaatcgtcttcatagcggatcgtcgcgtcgctgatcctgaaatcgcgaatcgagaggctgaacgacgaagaaccttcctccgaagacacttccccggcggcgggttcctcccccgaagccttcacgatgtcccagttgaccttgccgtcggcgagtttatgcgcgtgcagcgccggttcggcgaggatgaccttcgtcacttcgaacccgtcgtcgccgaacagcgacatcgggttcacgacgaccgatatgcggttcgcggcaacgatcgtatcgccttcgaacggccccgcgcccacgacggtcagccctttcaggtcgagcgacgcgcgcgggaaatggcgcagcaggctgatgtcgagtttttcgaaatcgacccgtgcgtcgagcatctcattggcttcgcgcttcacgatctgggcgatcttccccctcagcaacatcggggcgacaaaagccgccaccagaacaacggccacgacaatggccacaatcttcactatttttttcatttcctatctgttttaaagacgaaaaccgtagtccccacctcttcgaatccgattttacggtaaagggcccgggcagcttcgcgcgcagggttcgaggtgagcatcaccttcacagcaccgatgcgggcggcatgctccgtggcagccttcaccagcgcctcaccggcactgcagccgcgggctgcggcatcgaccaccacatcctcgacccatgccttccggcccgaaggtacgtcgtaccacaccagcgtcagcaccccggcgatccggccatccagccgggcggcgaacagcgccgcgccatcgctgcacacaacacgttccatggcctggcgggagagtgcccccagccggggcgaaagctgaggcatgagccttgcgaacgcctcggcgagttcatcggatacctctgtcacacactctatttcgaccgccatacttcccggatatttttcacaaagttaatctttttttcgaaaccccggctttttgcccgtatcccggctgccatatgccgaaaaaagagtatttttgtcccgttcgggacaggcaggcaaaccgacaccccgacgcggccccgtgccaccctgcggcggatcgtacgccgggcgaccggtgcagtgacggacagccccctccctccggcgcggagaaaacgcccggggagggggggggcaggagctcatgcgccgacaagcccggggaatccccgggccgaatcccggccgaaaccgtaaaaacattatggaaaacatgaaaaaatatgcattcccgctcgcggcgcttcttttcgccgcctgcaattccggcgaagagaccactaccacgcagatccaggagcctgtcgccacgatcctcgaatacaccccggcaccgggccagttcatcaacggcacgatggccgggttcgaccatgtggcatcggaggcagacgccctgcgctatgccgccgaccgcctcgcctcgaacaactgggtttcgctcggcagctggggaggccgcatcgtggcggccttcgcggaacccgtgcccaacacaggcggatacgacctctacgtcaaaggcaaccagttcgacacgtcgtccgaaccgggcatcgtgtgggtgtcgcaggacgccaacggggacggagcgcccaacgatacgtggtacgaactgcggggcagcgaatacgacaacgccgaaacgatccgcggctacaagatcacctatacccgccccgcggaggcggacgccccggtagcctggagtgacaacgcgggcggcagcggcacgatcgaccgtgtgaaagaacatacgcaggcctactaccccgaatggctcggggagcgattcacattcgaagggacacggctgccggacaatatcggaaaagccggggaaaaatggacgatggagccttttgcatggggttacgccgacaactattcggcctccgaccgcaccggcatgaccaaccgcctgcggatcagcgacgccgtaacggccgatggcgccccggccaacctcgcacaggtcgacttcatcatggtgcagacaggggtgaatgccaaagcgcccctgatcggcgaggtatcgaccgaagtgagcggcatcggctgctaccgcaccgtaacgaaaaaacaataaccacacacggcaatccgccctattcggggcggcaaaattccaaattccgggaacgatgaccctccgcgaccaactgctcgaactccaggagccgaaatacatgaaattcaccgcggcactgatgccgggcgtggaaaacgtactgggcatacgcctgccggtactgcgcaaaatagcccgccagatcgccgcaggcgactggcgcacataccttgccgaagccgaggatttctatttcgaggagcggatgttgcaggggctggtgatcggctgcgcccgctgcacgccggccgagaagctggagcatgtggcgcgcttcgtgcccaaaatcgacaactgggcggtctgcgactgtttctgctggcgcctgaaggcggccgaacggcagccgatgtgggaattcatacagccctatttccgatccgaagccgaatacgacgtgcgtttcgccgtggtgacggggctggggaatttcgtcgacggggagcacctcgaggcactgctgcaactgctcgacggcgtccgccacgaagcctactacgcccgtatggccgtggcatgggcggtgtcagtctgctatgtaaaattcccgcagcggacacacgagtggctcggcagctgctcgctcgacgactggacattcaacaaatcgctgcaaaaaatcgtcgaatcattgcgcgtgagcgacacggacaaacaggcgatccgcgccatgaaacggcgcaaacaggcaacttcacgggccgccgtgaacccgcgccccggcaccgaaacggccgggcaggcggaaaaacggcctggacaggccccaaaacaaccgacagacggtaaaacggcagcccggcgacggcgcccggcagaaaaacagggcgcacggcacagatttgcaaaataatgttacctttgtgtaagaaattccaaaacgagcccctatgcgcaaactggtaattatcccgacatacaacgagaaagagaatatttcggcgatgatcgacaaggtcttctcgctgcccgagactttcgaaatgctcgtcatcgacgacggttcgcccgacggcaccgcagcgatcgtcaaagagcgccagcaggaattccccgcgacgctgcacctgctggaacgcagcggcaagcaggggctgggcacggcctatctgacggggttccgctggggactggacaacgggttcgactacatctgcgaaatggactgcgacttctcgcacaatcccgacgatctgctacggctgtaccaggctgcggccgaagggaacgacgtagtggtaggttcgcgttacgtgcagggcgtgaacgtcgtgaactggccgatgtcgcgcctgctaatgtcctactttgcctcgatgtacgtacgcatcgtgacccgcatgcccctgcgcgacgcaacggcggggttcgtctgctactcgcgccacgcgctggagacgatcgacctcgacgccgtgaagatgaagggatacgggttccagatcgagatgaaatactcggcatggcggctgggactgaaactcaaggaggtgtcgatcatcttcgtcgaacgccgcgaaggcacctcgaaaatgagcggcggcatcttccgcgaagcgttcttcggcgtgctgggactcccgttccgttcgatcagaagcgcgaaaaggcagtgacagccatccggcaggaatacggacgccagcctcccgggaggctggcatttatgcatacatactttacagcggaatccgagcaccccggaaatcagaacgtaaagaaatagttcatgaagaaattccagaaggtgaccaccccgatggcaaataatttagccaggtagaaattcagtttccagcgttcgtgcagcagatagatcgtgaggttgttgatcacgagcccgacggctgcgataccgaggaaacggaggtattgcccggcaatgtcggggttttcattatggaacgtccagatgcggttcaggacatagttcgaggtcgacgcacagaggaaccccagcgaattggccaggtacttgttcaggcgcagccactccttgcaaaggtaagtgatcccgaaatcgacgaagacccccgaaccgccgacgacacagaatttgatgaactgctggatcatggtgcgacgacctccgtgcggagaggtttcccgttaaaccaattcgtatacccatcgcggcgcagggcgaaaccggcatcgaaaccggcgccggagagttgctccgggacgacgaaccgcacctcgcgcgtgatggtatccccggccgggatattgaaatgctcccccgtatcgaattcctcgacgcggaagcggccgtgcttccaaagcatcacgagcgaccgatccccgcagaccccgatcgcatagggataggggttcgagatgcgcagcgtcaaacgcagcgtatcgcccgcaacgacctgttcgggcagccccgtaaaggcaatatccaccaggcgcgtcggatgaaaatgcgggtcgacgaaccacgaaaaacgtttgccgttgggcaacacgacgctccggacgcggcccgtggtatccgccccgtcgtaaggcgtttcgaccagcacctcgtgtcccgcgaagcgcgtatcgtcatcgcggaactgccactggtgcgtacggtagcggatattgggctggcagtaggcctcacccccggtatagaaggcgtatttggccgcgacggcatagccatggcggaaaacgacggggcggccgtcggcgatcccggcgatccggccgtagctcgcaggattgtcgaagacctcgaaacgcaggcccagcggattgaagatcatttcgagacgtaccagaccgaccagcaaaacggtcgccagcccggcgcacatcaggtaacgccgcgtgcaggaatgccggcgggcataggtgaaaagcgtatagatcaggccgaaaacggcgacgatcacccattggggttgcacgtaaccgcggaatgtcgagagcaggaaaaaaacgatgaacgccacggggataaacttcagcgcacgttcgacggcgttctgcggcttcacggcgatccaggccttcacgtacaacggcacgaagaagggattgaagaccaccagcaggttgagcaggtattcggcgacataattgggccggaacaccgaattacgccccgccagatgataggccagcgaggcccagtcgtgctcgtactgccacacgaaatgcggcacgagcagcaacagcgctaccgcgccgctgagatatagggtcggacgcaggaacacacgggggggggtcgccgcaagcgcgaagagtacgaccagcgccccgtggtatttgctgtaagccatcagcgccatggcaacccccatccagagccatgcacaacgccggttctcggagaaccacttgaatgtcagcaggaacagcgcggtggtcatcatcagcgggccgtcgggcacggcgatgaagccgtagagctgcaacatcagcgtcgcggccgagaggacgacaaaaagcgccgcgtcgcgccggtcggcatccgcggggcggattatccgccatagtatataaaggtagagcggttgcagcaccgtaaagaaaaaccgcacgcccagttcgcccccgaaaaggtgctcgccgagccaaaccagcaaggcggtcatcggcggatggtcgaaatatccccatgcgaggttttcagcgaacatatggtaatacgcttcgtcgttggccagttcggaaaacccggcctgcaggaggttgcacacccaccacacgccgagccacaaagctaccaggccgtcggcgtcgagcgaagcataagtctttttgagcgatgccttcatacaagcgacaaaggtagcaaaatttatcgtttttgcgccattcccgtccgaaagagaggggaggggcgaaacagctttcgcgcaaatcagtccgcggggacacactttgccggtgtaaaaaacgtttccgtaatatcggatcgttgttacgggccggccccatcggcggaaaatcccggacaataccgtgtcccacagccagatgcctgcaatggaagcggaagagggaaacacctgtggcatgttaccatatttggaagtccataaaaaaatgtttcagacaatgacacaacggattacagatgcctgattcacaaatccggcattatgtcccagaaaagaagcctccggaatatccccggctcccgaagcgcagcaatcgccaaagacaccctaaaaaatacgaatatcagacaataaatacataaaaagaaacaatatttatcctataaatagccttaacttcgtagcataaaatatcatttttttacggcagcccgcaacctgccgtttttgctacggaaggctgcatacgaagaggccatgaaactacgaaattccatacgtccgataaggttactcctgctgctctccggcttgctggcattagcgtcgtgccggcaggacgagacgcaatccctctcggaatatctggactacgtaatcgagaacaaacatattttcgaagccgaaaaggaagagcggatcagcaggctaaggaacctgctgggcgtaagcaacctgaccccggaacaggagtacgagatcaatacgaagctgtacgaagaattcaggaaatacaagttggattcggccatccgctacgtcgaacggaacctcgaaatcgccaggcagctggacaacaaaaggctgacctacctgtcgaacatgtacctcgcccagctctactctttttcgggcatgtgcgtcgaggcgaaccagatactccgctccatccgatcgtccgaactcccgcgcgacctgcttcccgtctactacgaggccaacaaccgttatttccagcactatgccacgctgagcagccagcgcagccacctgcacgaaatgaatatctaccgggactcgctgatgatggtttccgacccgggatcgttccggtacaggatacacctgagctacaaactcatgggaaacggcaagatggacgaagccagggcgatcctcgacgagttgctggaagaggtcggcaaggacacgccgctctacgcggagacggcctatgcctacggctgtttctaccggctgaacaaagacccggaggcggaaaagaaatatttcatgctctcggcgatcgccgatgcgaagagcgcggtgaaggaaaacgcctcgttccacacgctggctctgatgtactacgaccagggcgatctttcgcgggctttcaagtacacgcaggcggccatcgaagatgcggtcttcagcaacgtgcagttccgcacgacccagatgtcgaagttctattcgatcatcaactcgatctaccaggccaaggaggccaagtccaaatccaagttgcagcactacctgatcctgatcagcgtcctgtcgctgttcctcgtgctgctgttcatctacgtttatcagcagatacacaagctgtaccgcatcaaggaggagctgtcgcggacgaacgggcgcctgatgcagctcaacgacgaactgcatgagaaaaacacgcagctcaccgattcgaacatcatcaaggaacagtacatagcgaggttcttcgacctctgttcgatgtatatcgacaaactggaggactaccgcaaatcgctgaacaaactggcgcagaaccggcagatcgacgagttatacaaacagctgaaatccacgtcgatgatggagaacgagctggatgaactgtataagaatttcgacgccatattcctgaacctctacccgtcgttcgtcgcggatttcaacgccctgctggtcgaggacgaacggatcgtgctcaaatcggaagacctgctgaacaaggaactccggatttacgccctgctgcggctgggcatcaccgacagcgtcaagatcgcctcgttcctgcgatgctcgctgagcaccgtatataactaccgcaccaaagcccggaacaaggccgcaatatcgcgtgaggacttcgaaaaaatggtcatgcggatcggtgtgccgcccgaaaacaggccttgagcgattccacggcaactacattttttttgtatatttttttgataaaatatttatttacaaacatataatactttacaggttctacaatttccgccccaacctataaatatggtatataataggattaattttgtaaacacagcgttcagccacccgctcccgcagcgggcagccggattgcatcggattgtaaacacctacttaaacctattttatacgaaatgaatccaattaaagtcggtctgatcggttttggcagaatgggaggtttttacctcgaagagatgcaaaaaagcggtaactgggatatcgtttacatctgtgacgtatctcccgcatcacgggaactggcccagcggctctccccccggtcgaaagtaatatccgacgaacaaatcatattcaacgaccccgagattcaggcggtcgggctgttcgccctggcggattcccgcccggagcagattcagaaagccattgcgagcgggaagcacgtcatagccgagaaaccgatcgccgacacggtggaaaaggagtggcagacggtcgcgctggccgagaaggccaaaatcttctcgacggtgaacctttacctgcgcaattcgtggtaccacaacactatcaaggattttatcgcacagggcgaaatcggcgaactggcgatcatccgcgtatgccacatgacaccggggctggccccgggcgaaggacacgaattcgagggcccgtcgttccatgactgcggcatgcactacgtggacatcgcacgctggtatgccgaatcggaattcaagacctggaacgcacaggccatccgcatgtgggattacaaggatccgtggtggctccagtgccacggcacgttcgagaacggcatcgtattcgacattacccagggacatgtatacggacaactggccgaaaaacagacacataattcatacatcgacatcatcggcacgaaaggcatcgcgcgcatgacgcacgatttcaagacggcgatcgtcgaactgcacggggtgacacagacgcaccggctcatacagccctacggaggcaaaaacatcgacgtgctgtgcaaactgttcgctgagtcgatcgaaagcgggaaacgcaatccgtcgctcccctcgttccgcgacgccgccacggcatcggaatacgcatggcggttcctccaggattcgcggcagcacgacctgccggcaatcggaaatctggaaacgctgcaggagattcgcgaacgccgccgcacgatgtcgaatggctacgggttgctgaggaagcgcgcataagccgcaatctgatactaaaacaaactttataaaccttaaaaacaatcggtatgaaccacttactgtttatcggcaacctgggtgcaggcgaaatcatcgtcatagccctgatcgtactgctgctcttcggcggcaaaaaaatcccggaactgatgaaaggtctcggcaagggtgtgcgcagcttcaaggaaggcatgaacaacatcgagaacgacatcgaaaactcgggtacggaaaaatccaacaacgaaaataaatagtccctcaaaaacaactaacttaaatcaagaaacaatgtcaagcgaaatgtcaaggagaaagttcctgaaaaaaggagctgctgccgcgatcggcttagcggtcgttccgggtacggttttaggtaagaagttcgggcacacggctccgagcgacaaactcaacatcttgggtgtcggtatcggcggccgcggctcgtcggtgctccgcggcctcgaaagccagaacatcatcggcctgtgcgacgtcgactggaaatatgccgaccacgtgttcaagcgctacccggctgccaagaagtacaacgactaccgcaagatgttcgacgaaatgctcaagtcggcagacgccgtgatggtggctacggccgaccacacgcacgcgatcatcgcagccgatgcgatgacggccggcaagcacgtctacgtcgagaagcccctgacgcataccgtatacgaatcgcgtctgctgaccaagctcgccgacaaatataaagtagccacccagatgggtaaccagggtgcgtcggacgagggtgtgcgcaaggtctgcgaatggatctggaacggagaaatcggcgaagtccgcaaggtggagaccttcaccgaccgtcctatctggccgcaggggctcgcacgtcccgaggacgaccagcgcatccccaagacgttgaactgggactctttcatcggcccggctccctaccgtccctacaacgcgatctacaccccgtggaacttccgcggctggtgggatttcggtaccggcgcactgggcgatatggcctgccacatccttcacccggtattcaagggcctgaagctcggctatccgaccaaggttcagggtagctcgacgctgctgctcaacgaatccgcaccgatggcgcagacggtgaagttcgtcttcccggcacgcgacaacatgccgaaggtagccatgcccgaggtagaggtatactggtacgacggcggcctgaaaccggcgcgccccgaagggctgcccgcaggcaaagacctgaacatggccggcggcggcgttattttctacggtacgaaggatacgctgatctgcggctgctacggcgtgaacccctacctggtttcgggtcgcgtgcccaacgcaccgaaggtactgcgcgagatcaaggagtcgcaccagatggactgggtacgtgcctgcaaggaggatgccgacgaccgtgtgcccagcgcatcggacttcagcgaagccggcccgttcaatgaaatggtggttatgggtgtgctggcagtccgcctgcagaacctgaaccgcgagttgctctgggacggccccaacatgcgtttcacgaacatccccgatgacgccacgatcagtgccgtcatcaaggacgggttccacatcaaggacggtcacccgaccttcgacaagacctggacggatccggtcaacgcacagcaattcgcacaggagctcatcaagcacacctaccgcgacggttggaaactgcccgacatgccgcgttaatctacggacaagattatcaactcaaattaaaacaacggaaagaatatgaaaaaagtcattttattctcgacatgcatcgcagcagccgcaacgatggcggcatgcggcggcccgggggccaaaggcaaagcggcagccgacacggcagcggcagaaaccaaagccgtacccgaatacacggtcatcaacaatgcgacggtagacctcgcaggtttcccgcaggacaaggacggctactacgtgatcttcgacggcaagacgttcaacggctggcgcggctacggcaaagaccacgtgccctcgaaatggacgatcgacaacggtgcgatcaaattcaacggttcgggcggcggtgaagcccaggacggcgacggcggcgacctgatcttcacgcacaagttcaagaacttcgagctcgaggtggagtggaaagttgccaaaggcagcaactcgggtatcttctacctcggccaggaggtagccacgaccaaggacggcaagcagcggatggagcccatctacatctcctgccccgagtaccaggtactcgacaacgagaaccatcccgatgccaaactgggcgtcgacggcaaccgcaagtcggcttcgctttacgacatgatcccggccgttccccagaacgccaagccctatggcgagtggaacaaggcgaagatcatggtttacaaaggcaccgtggtacacggccagaacgaccagaacgtgctcgagtaccacctctggactccccagtggacggagatgctcgaaaagagcaagttcagccccgagaagtggcccctggcattcgaactgctgaacaactgcggcggtgcacagcgcgaaggttacatcggcttccaggatcacggcgacgatgtatggttccgcaacatccgcatcaaggtgctcgactaattccgttaacaacggtaacgtatgaaacgtaaactgtttacagcggtttgcatcctgctcgcttcggcaattgctccctacggggcatttgccaaagcgaagaaggacgcaaagaaggatatcggtatccagctctactcggtcagggatctgatcgggagtttcggaagaaaccagcacgactacaaacccgtcctgaaggcactcgccgacatgggttacaccagcatcgaggccgccagttacaacgacggtaaattctacggcaacacccccgaggagttcaggcgcgacgtggaggccgtaggcatgaaggtgctctcttcgcactgcggcaaaggcctctccgacgaggaactggcttcgggtgacttctccgagtcgatgaaatggtgggatcagtgcatcgcagcccacaaggccgcaggcatggagtacatcgtgaccccgtaccttcccgtccccaagacgctgaaggagatgcagacctactgcgattacctcaacgcgatcgggaagaagtgccgggaagccggaatcaaatacggctaccacaaccacgcccacgaattccagaagatcgaggacaaggctgtcatgctggactacatgatcgaaaacaccgaccctgaaaacctgttcatcgaactggacgtatactgggccgtgatgggcaaggcaagccccgtcgactatttccacaaataccccggccgcttcaagatgctccatatcaaggatcgccgcgaaatcggccagagcggtatggtcgggttcgatgccatcttcgagaatgccaagaccgccggtgtggaaaacatcatcgtcgaggtcgagcaatacagctacgatgtggagaagagtgtcaaactgagcctggattacctgctcgaggcacctttcgtgaaggcttcgtacagcaaataacccctccggaagcatgaagacgatatccggctgtctgacggatggccggatatttcttcgctgaaagataccttccggaaaacaagcaataaaccctactatcccatggaagaaaaggaaatgacgttctgggcgcacctcgaagacctgcgctggtcgctggtacgcgtggtcgccgtcttattcgtgttcgttgtcgtctgtttctgcctcatgccctatctgttcgacaatttcgtactggctcccaccacgtccgatttcccgctttacagatggctgtcgaaactgggaggcggcaacccgctgctccccgatttcagcaacgaccacttctcggtagaactcatcaacatcaacgtagcctcgcagttcctgacgcatatcagcacttcgttctggttcgcgcttgtactgatattcccctacctgacgttcgaaatatggcggttcgtacaacctgccctgttcgacaacgaaaagaagagcgtcgggttggcattcgcattcgggacattcatgttcttcctcggatgtgcggtcggttacttcctggtcttccccttcacgttccggtttctgaccgagtatcagttgagcccgcttatcacgaaccagatctcgctgacttcctacatgggtaatttcctgatgctcattttcgtaatgggcatcgtcttcgagttgccgctgctggcatggctgctttcgaaactgggcctcgtgacaaagacatttttccggaaataccggaaacatgccgtagtcgtcctgctggtgctctctgcggtcatcaccccgacgggcgacccgttcacgctgatgatcgtcttcctgccgctttacctgctctatgagctgagtataaagatcgtccgggcatagcaggcaacgacacacgatttgccggctttcgccggcatacgaattacggccgggaattacccggccgtaatcgttagacggggacaccctgccggatcagccgccctgcccctccgcctgaggtgcattccgcatcgaagcccggtactgcgtcggtgaaacgccgtaacgctgcttgaatgcccggttgaaatagggaatgtccgtaaaacccactgcatagcagatttcggaaatgttcttggaagagcgggtcagcatcgtacaggccatctgcaaccgaaagacattcaggtaggcgacaaacgactcgccggtcgccttcttgaaaaacaggcagaaggccgtcttgttcattgaggcataggacgcgatttcctcgagggttatcttacggtggtaattctcgacgatatacttgtaaacatcctgcaggcgctgcttgttcttatggatttttgccccgcggaatttcccgggcccgatggggcggcaatgcccgtcctgcgcgatcagaaaaagcaactgcaataacgtcacgaaccgttcggggtctgagctgcgctcaagacccgccagtaatttacgcaccctgaccgccgtttcgccagtgagcccgaccgcctggcgcaactccttataaaaccgtacgacgggctggaactcgggcgagagctgcgacaactgcaccagaaactcctcgccgaattgcagcgaaccgttttcgatcatcccgtccggggcgcacaatgccttgtcatagacccagccatgcggaaaatagggcggcaacacgacgacttccccctcgcggaagggttccgtgaagtcgttggtcacccgctggccgttcccgctaaaaaccaccgtaatctcgtattcgggatgctggtggtacgggaattcgtcccggtaccacagcctttcgtggcggtaagtgaaagagcgggaggcacccttgaatatttgcccgcatgcaacagttcccatcggtcttatgcaatcattttttgcgaatataagacaatgttccggaaaatcggaaaaaacaggggaaaatttcgcaggcacacctgtttcagccccgatcagctctgcaaccgatattccctgggggtgtagccgacatggcgtttaaagaagcgtacgaaatgctgcggatactggaatcccagttcataggccacctgcccgatggttttgttcgggtcgagaagcccctccttggccgcgtcgatcatcttcaactggatatactcctgggccgatttcccggtctcctttttcaccagatcgccgaaataattgggcgacaggcatattttgcttgcaaaatagcgtaccgaaggcaatccttccctcgcagcggcgccacccgtaaggtaatcgtcgagcaaccgctcgaaacgtgccaggacatcgagattcatgtccccgcgcgtgacgaactggcgctcgtaaaaacgcatacaatagtcgagcagcagttctatattggtcgcaataagccccttggtatgcttgtcgatggcgtggcgcagctccatgcggattttttccaggcagtcgaggacaatcatacgttcttcctccgacagatgcaaggcttcgttggactcataggaaaaaaacgtatatttcttaatcttctgccccagcgacgtaccgcggataaaatcgggatgaaacagcagcccgaccgatttcttgggaacaccctccacgtcggtataccccaccgtctgccccggagcgatgcagatgaccgtctggtcgtcaaaatcataactcgtcttgccgtagtcgatccggcatcccgcagtctccttgatgaataccgaatagaaccccatcgtcatccggtagtttccctggctctcggccgtatcgaacgaaacgacgccgacctgcgggtggcgggtctcgaacccgaagagtttgttatactggtcgacagtgtcgattttcaggatttcttccatgtttttttctttaccttttgcaaagatagtgtttttgcagattcggcccacatgccgggccgccgaaacagtaatcggggtaatattatccgtaataggggtatatcactgtacatcagcatatttcatagacgaccaaaccagtaatcagggtaaatatatccgtaatacgtatacaaaacgaatgccccgcgggatgtagttttgcagtgtggaaaaaacatcaaacacaatagagccatgaaaacaaaactgaatttcaacatgtggatcccgacccgcatccttttcggggcggacgaactgaaaaacctgcacaggcaggagatgcccgggaaaaaggcgctgctggcaatttcgaacggcaagtcgacccgagcaaacggctatctgggcgccacggaggaacagctccggctggcagggatcgaaagcgtggtattcgaccggatcgaagcgaaccccttgaaatccaccgtcatggccggagcggcagcggcacgggagcacgggtgcgacatgatcgtcgcattgggaggcggcagcgtcatggacgccgcgaaggccatagccctgatggcatccaacgacggcgacctgtgggactacgtattcggcgggacgggtaaagaacagcaggccgaacacgcaccgctgccggtcatcgcaataaccacgacggcaggaaccgggtcggaagtcgatccgtggggcgtcgtaaccaacgaacaaacccatgaaaagatcggcgtcgaagccgcattccccgtactggccgtagtcgatccgaagctgatgctcaccgtgccgccgaaattcacggcataccaggggttcgacgcattattccacagcgtggagagttacatttcgaaattcgccaacctcgcaagcgacatgtacgcactgaccgccatcgagcatatcgcccgcaacctgccgcgcgccgtggccaatggcgacgatctcgaagctcggacccgcgtggccttcggcaacaccctttccggcgtggtgatgtgcctgagcgccacgaccagccagcactcgatggaacacgccatgtcggcctaccaccaggatctgccccacggcgccgggctgatcatgctcagcagggcttacttctcgttcttcatcgaccggcacgtctgcgacgagcgtttcgtacggatggcccgtgcaatggggatggagcaggccgcacagcccggagatttcatcacggcgctcacccgcttgcaacaggcatgcggcgtcgccgacctgaggatgtccgactacggcatcacccccggagagttacagcaaatgacgttcaacgcattcgacacaatgcccggactgttcgaatcagaccgccacaggctgagcatcgacgaatgcacagccatctaccgggccgcctataaataacccgaaaaaacgacacgatcatgaaacgaccattaattctgacaacagccatacttatgatactcggcacgaacacatccgtcgcacagggcgatgcagacaatttctacaaaagcaattcggtaaacacagagaaagtatccttttccaaccaatacaaaatgaaagtaggcgcacggctcttcctgcccaaggagctggaggaagggcgaaaataccccgccgtcatcgtcgggcacccgatgggcgcagtcaaggaacagagcgccggtctgtacgccacgaaactggccgaatgcgggttcgtcacgctggcactcgacctctccttctggggtgaaagcgacggagaaccgcgcaatgccgtcctgccggatgtctattcggaggacttcagcgcggcggtggatttcctcggcacccgcccctttgtcgaccgggaacgtatcggcgttgtcgggatctgcggcagcggcagcttcgccatcagcgctgcaaaaatcgacccccgcctgaaagccatcgcaacggtcagcatgtacgaaatgggggcagccagccgcaacgggctgaaacacgccctgtcgcccggagagcgcaaacggatcatcgcccaggctgccgaacagcgttatgccgaattcctgggcggggaacccctttacaccggcggcacagtacacgaactgacggccgaatccacgccgatcgagcgcgaattctacgaattttaccgtacgccgcgcggggagttcacccccgacggggccacgccgcgcacgactacgcaccccacactgaccagcaacgtgaaattcatgaacttctaccccttcgccgacatcgagaccatctcgccgcggccgatgctcttcatcgcgggagagaacgcccattcgcgggagttcagcgaggacgcctaccgcctggctgccgagccgaaagagctttacctcgtgccggatgcagggcatgtcgacctctacgaccggacaggcctgatcccgttcgggaaactggaaacattcttcagggatgcgctgaaataatcccgctgcgcgggcaacagtgccaaaagcacaccgggatgccgcacctgtccggcgcccgcgtacccgggatcgaccgacctgtaaaaccaataaagaacgactatgaaaaaattatggttactgcccctcatgctgctatcgctggtactgccggcggcatgcggggaatcgggcgacgaccccgccccttccggagggcaccccggtcaaccggagacgcccggcggaaacgagggcggcgacccgggcgaaacatcgctgaaaatcggcatcacggtcggcagccgcacgattaccgccacgatggaggacaatgccgccgcacgggatttcctttcgcgcctgccgctggaggtgacgttgtcggattacagcaacgccgagaaaatattttatccctcgccggcgctgacgacctccaaggtcgcacgcggctgcacccctgcaccgggcgacatcacgatctatgtcccgtggggcaatgtggccatattctacaaaaacgggtcgaggagcaacgacctgatccggatcgggcgcatcgacggcaacggaatcgaagccctcagcatccccggctcgcttagcgtccggttcgaaaggcaacgacaggaaacaccggaaaacaatagcgaacaaaatccgacatgacggagcggaagaagcagtcgtcgtatggctttgcagccccggagcgagctacattacgggccaggcaataaccgtcgacggcggatatacggccatgtaaattcaaactaaaaaacaagaacgatgcagataaaaaacgccacctacggaggcgaacgcccgctgttcgcctcgcacggcctgcgcatggagcacgtaaccatacaggccggcgaatcggcactcaaggagtgctcggacatcgaagccgtcgattgccgtttcgaaggcaaatacccgttctggcacgtcgacgggttcgtcgtccggaactgcctcttcaccgagggcgcacgcgcggcgctgtggtattcgcgcaaccttacgatgagcgacacgctggtcgaagcccccaagatgttccgcgagatggacggcatccggctggagaacgtacggttgccttttgcgcaggaaacgctctggcactgccgcaacgtgcggctgcgcaacgtgcgggtcgacaagggcgattatatcttcatgcacggcgaaaacatccgcatagaggattacgcgcaacggggcaactattcgttccaatactgccgcaacgtggtgatccgcaacgccgtcatcaactcgaaggacgctttctggaacaccgaggacgtgacggtctacgactccgagatcaacggcgaatacctgggctggcactcgaagcggctgcggctggtcaactgcaaaatatcgggcacccagcctctgtgttacgccacggatctcgtcatggaaaactgtacgatggccgacgactgcgacctggcgttcgaatattcgacattgcaggctgccatagacggccccgtccgcagcgtaaagaacccccgcagcggttcgctcacggccgaaagctacggggaggtcatcctcgacgggaatgtcaaggcaccgggcgactgccgtatcgcaacgtgggacaaacaaagcaactgcgcatagctggaatgcgatttcgatgccgggaaacggagcatcgggcattttttttgtaaattcggaacaaaacaataacgccatgaaaaagatatgggcctatattctcccgacagcgctgtgtttcgttctcgggggacttgccggatggttgcagcaagacgcgatcgaggaatggtatccgctgctcgacaaaccgacgctgacaccgcccaatgcggtttttccgatcgcatggagcatcatctatctctgcatgggtatctcaggcgggctggtactgacctccgaagcccccgcccgtaaaagtgcggtgaggctatggttcctccagttagggtgcaatttcctgtggagcatactcttcttcgtctgccgcagccccctgctgggcatggcggacatcgtggtgctcgacgtcctggtgattctctatctcgtccgcagtgcaaacgtacgcgccgctgccgcatggctcttcgtcccttacctctgctggctcctcttcgccacctacctcaacgcctatatcctcgttgcgaacgggacggggctgtaaaccggggaaaggcgcgatgtgcagcaggacgaagatttgaaaaatccccgggaaggaaactcccggggattcgacggcgtatcacataaggcggctattccagcaacggcaacctgcccagcatatccctgagccggatcgccgtacggggcatcggctcggcgaccgtaaggcccaccagctccttttcggccgcaatatcgtttatcacacggacgaccgcctctattttcatcccgtcaggatcggtgccgaccgccgcaacgatctccgccgggtcgagtacgtccatgtcgaaatgaaccaccactttcgacgcgccgcacgatttcagccaggcccggagcgcatcgctgtccgcagccacctcttcgggggtgagatgctttatcccgtactgccgctggcgggccctgatctcgtcccgttcccagttacgcaatcctacgaacagggtcttcgacgggtcgaatacggctggcaattccgccacgatcttcgcgtcgccgcaccccatgcaggccgtcacggccatggcatggtagccgggatagggatcgcccggaagcgtgatgtcgggatgggcgtcgatccataccatcgccacgtcgccgccatatttcgcggcaaggtaggtaaacggcaccacgctcacagagcaatccccgcccagggtcacgatcctgccgggatcgctcgcccgcagcatccccagcgcggctttcgtctgccggaggataacgtcgcggtcgagtacaccgtccgtcaccctgcgttccccgatctgggtggagacgggaacggtgagcgtttcctgcccgccgcggggagccaggaagtcgagcagctgcgccccgaggtaatatccccgtgcggcatcgtcggggttctctacctcgggtaccatcgccgcgacattaccgccctgccattgcgggtagaccaggcggatcgtcgatgtatttgttttcataacttcgctgtttgtcgatactttttgctgcactccgccagaaaccactccgccggccagcacgccgggcaacaaaaatcctttcatagcgggttcgtcccttttgcaggacatgcaaaaatacgaaatgcctccgggagatgcaagtacgtgcaaattattcgtatatcgataaatttacgggatagacaaattacggaaatacggctggcagttattcgggaagcgttatttttgcacaaaaccgatctctgctggaagccgcgcacaggagtagcgcattttaccagggcagatccctaccgatacggaaattctacgccctcccgattgcgaggccgggcgattttttttgtgatttgtataacaatcaaaaaaaataattacctttacgccgttatggttcctgcccggtatgccggacaggatgaaaagggaatccggtgaaaatccggaacagtactcgctgctgtaagtcccctccttcgggagaagttgtttatcgtactctttgccactggtttagactgggaaggcgcgataaacgggacgagtcagaagacctgccttaacgattgatttgcacccgcgggtttcgggttggaatcgaatggtacggtcgtcgttatcgcaacgcactccctccccgatttgattttcagcagtttcctgtcgtgcaatcacccgcgtgattcgaatgacaatgggaataattcataacagacagggttatacaacgggagaggctaatccgcgccccgtccggatctcctgttcatcctctacgcttgccgcaggccgtcgcctgtcggcaggcgttttttatcccccggaaatcaaaccgattaataattaaaatctgaaaagcatgaaacaactatttaccattttggcaataaccctgttcggtgctgcgacatggagctgctcgtacgacgacgacgatctgtggaaggagatcgacgggatcaagacccaactcgcggaactcaacaaagaggtttcggcgctgcaaacgcttgtggatgccctgcgccaaagcaagacgatctccgatgtgacccagacggacaccggatacaccatcacgttcaacgacaacacctccgtttcgattgccgacggcaagaacggtacgaatgccccggaggtcggtatcgacctcttcgagggaggctactactggacgatcggcggcaagggcaactggctgaccgatgcgaacggccacaaaatcccggtagctggcaaagatggttcgaaacccgaaatagccgtcgatgccgacggttactggattgtggacggagcgcgcatcaaagatgcggccggcaacgacgtaaaagcgacgggaagcaacggaaaagacggggattcgttcttcaaatcggtcagcgacggcgacgatgccgtaacgttcactctgaccgacggcacggaaatcgtcattccaaaaacttcggtgtcctcattctgttttgtacagcccgacgacggccgttcgtacttcgtattcgacttcggcaagaaaaaaacgctgacgctgaatacgacggatgtggaaaccgccgacttcatgaatattcccgaagggtggaaggcgtcgctgaaccttgcgaaaaatagcgtaaccgtgcaggctccggcggcttcggatgcagcttactcaggtggcatcatcacgctgatcgggatcgataaaaaaggggatacggtctttgcctcggccgacgtgtgcgcttcggtggactacacggacaaggacggtacgttcgtggtctgcgaaggcaatatgacttcagtaaacggtatgctggtctactacgacaaggccggcaaggagtaccgggaggtattcgagcaggccaacggcggattggagatcggcaacgtcgtacaggatatgttcatggccaacggaaaaatctacctgttaacccagaacggcgaccgcatgggcggcgcaggccgtttcgttgtgtgcgatgcccggacgatgcgcatggaattcgccgacccgctggtatttaaaacccccgaagacaaagacacatggcctcagcatctggtcgttgtaagtgcaacgaaagcctatgttcaatattccgattcaagtatggaaagcacttcgggcatagtcgccctgaccctcggtgaaaattcggtgcaaatcggcgcgaccctcgaaggcacgttcggagcctttacttcggtgggcgcgatcaaaacccgcatggtctattcacggggtaagatttatgcgggatgcggacacagcgtcgttatcatcaatgccgaaagcggaacggtggaaaagcggctgacctatgagggccggcaagtaaaaggcatcgtcaaaggtgtcgacggcaatatctatttcgcccttgccggaacctattccggcacgagcccgaatatgggaaccctgacctccgatccgatgatcgttggcatcgatcactctggcacggtcgtttcggaaaaagaactttccggaggtgttcgattcccgatcgcaacatggtctccggctatcggcatgtgcgccagtttcaccgatccttatctctattttgtggataccgatgctttcaacgccacgagcgcaacgcggtacaattaccagacgcagaccgtcgattacaaatatctatctggaaatgaaacgatttacggcattatggggcagcatccgacaaccaatgtgttgtgggtcggcaagtcgagctacgtcgattcgaatatctacacctatgacgtgagcggaagttccgcctcggaaatcaaccatttttcctatcccacgcagaaaggtgccagcccggccgggatcgatttcgtctaccgtttctccgaagcgtatattaacaaataaagcataaagagatgaaaaaactgttatcctgtttatttgctgcgttgttcgtgttgtcgtcctgcaacaaagacgatgtgatcgaggtcgattcgcagacggccccccgtatcacgctcgacagcgagaatgcggtttacaccatcaaatcaggccgggaactgacgatcagccccacttatgaaaacgcggacaaggcactctatgtgtggaaaatcgacggaaaagtcgtcggcacgcaacccgcccttacggtgtgcgaacaaaccgtaggcgagttgttcgtgctcctccaagtgtcgaaccgttacggcacggcctccgaggagctgcgtgtggatgtggtagaactggaaatcccgacaatcagcctgccggttcccgaaaaagggtatacgattctggtcggcagtcctctgacgctgaaaccctccgtaatcgacacctcgatccccacgacctgcacatggagcgtgaacggcaaagaagtttcctccgaaaaggaatttacattcgacacgtccgaagccggagattatacgctcgaattcgccacccgcaatgaggacggcgaggacagcaaggaattcggggtaaaagtctgcacgatcgacgaaatgccgttcggctggacattcgatcagacggtcttcaacctatccgccggccgccgcatccgtctgatgcctttcgacattaccaatgcgttcgatgccagttatacctggtcggtaaacggcaaacaggtgcaacagtcctccgatccggtatatattttctccgaatcggccgaaggaacgtacacggtcaaagtcgaaatgaaaaactcatatctgacggttcctcaggaattgaccgtcaatgtctgccccgcagaaggccgatactaccgtgccggatctccggcaagcagcaaggattggaacaaggtctacgagtttcttgccgctcccggacaattcgtcaacgaacgttatgacgtgacgacgatggacgcagcgtgcgcctatgccgagtcccagatgaaactcaacacctacgtgtcgctgggagctttcggcggctatctggtagtcggcttcgaccacagcattgaaaatgacggcggctacaacatcggcgtttcgggcaactcgttcgacggttcatccgaaccgggcatcgtatgggtcatgcaggacgaaaacggcgacggactgccgaacgacacatggtacgaactgaaaggctccgaatacggtaagcctgaaacgacacaggattatgccgtgacctattaccgtccacgcgctgccggcatggaggtgcagtggacggacaacaagggtgcgagcggttccgtcgattacctttcgcaattccatacgcaggactactattatccggcatgggtcgaggctgacagctacacgctgcgcggcacttgcctcaaggccaacaattacgaccagtcgggcaacggttcctactgggtcaatccggcttacgactggggctacgcggacaacttcagcccgatcgaccgtctgaccgacgatccgaactccggagcgggcgtcaacgccaaccatttccggatttccgacgccgtcactttcgacggcaagcccgccggcctcaaatacatcgactttgtcaaggtacagaccggcattcaggcaaaaagcggctggctgggcgaaatttcgaccgaagtgttcggcgtattcgattacaacatgaccaaaaagaaataatacgatgagaaaaatactgatcctggccgcggcggttttcgcgttctgcggctgcaacgacaaagaggaggaacagccctttgccggcatcgacaaccacatcacttcgttcgcgctcaccgccaaggacggaacggtataccgcgccgcactcgtcggcgacgaaatcgtggtttccattccccgcaatgtgtcgctcgaaggtgctactgctgactacgaactttgcgagcaggcgatcctgtaccccgatccggcgaggatcaccgactgggacaacgaacaccgtttccgcgtcatggcctataaccagaccctgcgcgactacgcctactcggtcaagcgtaacgacgttacggccggcagcgtcgcactgccgacacaggccgatgtcgaagcgtttgccgcaacgggtgcgacggtgatcgagggaaacctcacgatcggcgatttttcggcctgcgacgatcccgtgaccgaccttgcgccgttagccggactgaccgacgtgcgctacaacatcgtcgtaggcaactcattcgctggggaaaaactctccgggctcgaaaacctgcgttcggcaggcggtctggtgttgggaacggccaccacgccgcttacgaccgcccaggatttcgacgtggtactgcccgccctcgaatcgctcggacagctctcggtaaacggcaatacggtcgccaagctcgacctgccgaaactcgtatcgacggggacggtctatatcaatgcagccaaactctccgttttcaatgttccggcgctgaaggagtgtacgggcgatctgacgatcctctccggcacaaatgcctcgaccggcaacaaggccctggccgcactcggactctcgtcgctcgaaaaagtaacgggttcgctgtcgctccagtatctcagcgaattgcagttattggaactcccgaagatcgcctccatcggcggcaactgcacgctgacttacctgacacagctcaaagtactcaatatgccggaactggtgcatctgggcggtgcatttacctggaactacctgacggcagcgaccacattcgcaatgccgaaagttccttcgctggcctcgttctcgctctcggacagtagctctgcagccatgctttccagcatcgacctctcgtccctcgaagaggtacgtgcggattttaagatcgacacgaaattttcaagcgacaggctcgaactgcccgcgctcgaaaccatcggaggacagttctgcctgcgctacctttctctgatcgaaacactctccatcccccggctcacggcctgcgaaaacatctatttttaccagttgaacctgctgccgtcgctcgacctgtcgggcgtggagtcgctcccgaaggtcgaactgatcgcctgttacaaactggcgaaggtcagggttcggaaaaatgcgctgggcgatctgtcgctgaacggcggttcgagagcgtgcgacttcaccgcactcgaaggcgctgaaaccatctcgggaaaactcagcgtttccaattatacgcagaacgacctgattaccttccccggcattaaatccatcggtacctattcgcagtcgggcggcaaagccaacggccagacaactgtttcatttcccgatctggagcaagtcggaactttccagatgagcagttgttcgtacctcaaaaaactcagcgccccgaaacttaccgaggtgacggacaagtgggacacgagctatatgcagtatgtggatgaaggcgatctcgaattacccttgctgcgcaagatcggggtattcaaattctggggcggaacctactccggtgcggccagccaaatgaagctgacaggcatggccgatttcgcgggcgtcactgaaatcggttcggtagatatcaaatactggggcaagatgaccgatttctccgggctgaaaaatgcgctgccgtcactttcggccgacaagtggaatgtctcgggcaacggttataatccgacctgggagcaaataaccgcaggggagtatgtcaagccgtaggatgaaccgctttatattcatcgtcgcaggctgttgttcggttctcaccggctgcatgaagtgggactacgatctcggtcgggagatcgcagtccgccccgaggtgggacacgggctgttcatcaccaacgaggggaatttccaatacggcaatgccacgctctcgttctacgacacgcaaacccgtaagatcgacaacgaggtgttcttccgcgccaacgatcagaagctgggcgacgtggcacagtcgatgacgatgtacggcggcttgggctggatcgtcgtgaataattcgcatgtgatctttgccatcgaccccgtgaccttcaaagaagtcgggcgcatcacgaacctcacctccccgcgctatatccattttttgtcggacgaaaaagcctatgtcacacagatctgggacaaccgcattttcatcgtcaatcccaaacggttcgagattacgggatacatcgactgcccgggtatgacgatggaaaacggttcgaccgaacagatggtgcaatacggcaaatacgtctacgtgaactgctggtcttatcagaaccggctgctgaagatcgacaccgaaacggacaaggtggtcgacgagctggtcgtcggcatccagcccacgtcgctggtgatggataagtacgacaagatgtggacgatcaccgacggcggttatgagggcagtccctacgggcacgaggccccctcgctctaccgtatcgacgccgcaactttcaggatcgaaaaacagttcaaattcaaattcggcgactggccctcggaggtgcagctcaacggcggacgcgacacgctctacttcatcaacaacgatatctggcggatgccggtggtggccgatcacgtccccgtgcggccgttcctcaaatacaagcagacgaaattctacggcctgtccatcgaccccaacacgtcggaagtatacgtggccgacgccatcgactaccaacagaaggggatcgtctaccgctattcgcccgaaggagagttgctcgacgaattccgggtgggaattattccgggggctttttgttggtattaaaccgatacgcaatatgaagaaaccaatacttctgtttatcggtttgtgcctcgccgtaacaatcactgcacaagaaaaaccggccggcaacggctggtggaacaacaacccctcgctggtgatgcccattcgtgaggtcggtgttacaggaattcgtccgatgaaagagatcggcgtacaaaaaacacaactggacaccctcgtcctgcacgagaacatcgccctgtcgatggccgacgtgctgacgttcaatacggcaatcttcatcaaacagtacggccgggccacgctttctaccgtggcatttcgcggtacggcggcatcgcacacgcaggtgatgtggaacggcatgcgtatcaactccccgatgctgggcatgaccgatttttcgatgatcccgtcctatttcgtggacgacgcgacgctgctgcacggcacctcgtcgctcaacgtcgtgggcggcggtctgggcggggcgatcacactggcgaccaaacccgccgatacacgcggattcaaaatgcagtatacacagggaatcggctcgttctggacgacggacgaatttctgcggctgacctacggcgacgaccattggcagacctcgacgcgcgtggtctactcctcgtcgcccaacgaattcaagtaccgcaaccgcgacaagaacgaaaatgtctacgacgacgataaaaatattatcgacacctaccaccccatcgaaacccaccgtgacggcgattttcatgactttcacgccttgcaggaggtctattacaataccggcaagggcgaccgtttcgggctgaacgcctggtttctcacctccaagcgcggcctttcacaaacgaccgtcgattacggcgatccgaaggatattctgcaccagcagcgcgaacgcaccctgcgcagcgtactctcgtgggatcatctgcgtcctacatacaaggtcggagcaaaagccggttacatccacacatggctcggctacgattacgcccgtgacaaagggaacggcgaatgggcctacatgattacttcgcgcagcaaggtaaacacgcttttcgcatcgggtaacagcgaattttacgtcggcaaaaaatggcttttctcggccgacattgccctgcaccagcatttcgcgaaaaatcaggatcgcaacatcatcacccagcagggcgacaaggcggtggtcggttacgacaaagcccgcacggaactatctgcttatatgactgccaagtggacgcctaccgaacggctgggcctctcgctggcgttgcgagaggatatgtacggcaaggattggacgccgctcattccggcattctatgccgattacatgctctcgaaagccggaaacgtccgggccaaggcatccatttcgcgcaactaccgtttccccacgctcaatgacctttacttccagccgggcggcaatcccgacctgcagcccgaacacggcttcacctacgacggcggcgtatcgtttgccttcgccaaagaggggcggtacgcggttcacggcgaggcgacgtggttcgattcctacatcgacgactggattctgtggatacccctgggaggcaagcaggatttctggacgccgaagaacctcaaaaaagtacatgcctacggagtggaattgaaggcgggcttcgaccgaacctggaaccgtgactggcaagtcggtgccgacggcaatttttcgtggacgccctcgatcaacgagagcgagccgatgagcaagggcgacgagtccatcggcaaacaactggtctatgtaccggagttctcggcgtcggtaacggcgcggctggcatggaaaagctggcggctgctctacaaatggtgttggtatagcgaacgcttcaccatgtcgagcaacgactacacgatctcgggatatgtacctccgtatcttatgagcgacatgtcggtcgaaaaacttttcgccgtaccctgggctgatttttccgtgaagatcgcggtcaaaaacctgtttaacgaggagtatctttcggtgctggctcgtcccatgccacgcttgaatttcgagattttcctcgacatacgccccaagtggggtaaaaaaagataactctgcggcggcgggccttttgatcgcggtgaaccattgcaaacatttcaccatttgaatcccgccgccgttcgtttacaatctgttcgcgggaaccggaataatagagattagtagcacgttgtctgccataacaacgcaatactccggtttccgcagacagattctgctgattttgtattttgaaaaaatagaaaatctttacagcaaacagagaaagggtcaatgcccaattcatggcaaataaaaaacgcccatgatttgattattaaatcatgggcgttttaaaaaagtacccggagccggggtcgaaccggcacgacattgctgtcattggtgtttgagaccaacgcgtctaccgattccgccatccgggcaagcctcttccgtagaatcgggagggcaaagatagtcgattcttcgcaattttcaaaaaatccggttatttttcaaagaaagccttgatttttttcgccttggcggggccgaccagcgctgtcaactcctcgaacggtgccgccctgaccttggccacggtgcggaaatgttgcagcagcgtacggacggtcttgtcaccgatgcctttgatctgttccagttcgctatggataaaggccttactgcgtttctggcggtggaatgcgatggcgaaacggtgcacttcttcctgaatgtgtgccagaaagtgaaaaaggggtgaggtgggacggatgccaaccagcacgggcgggaatccgcagagcaactcggaggtgcgatggcggtcattcttggccagcccggcgacaggtatatccagcccgagatactccagcacctcgtgaatgacgcccatctgccccttcccgccgtcggcaatgatgagatcgggcagctcggccccctcctcctgcaggcggctgtaacgccggaagacgacctcgcgcatcgaagcgtaatcgtcagggccctccacggtcttgatgttgaaatggcggtagtccttgcgcgcgggttttccgtcgcggaacaccacgcacgaggctaccggatgggccccctgcagattggagttgtcgaagcattcgatgtgccgcggctggcggtcgaggcgcaattccttttgcagggcattcatcaaccgctcggtatatcgttcgggattcttgatttccaggttcttgagctgctcggcgcgatagatacgggcgctcttctgcgagaattcgagcagttcgagcttttcgccgcgcttgggcaccgtgaaggtcacaccgtcgaacagcagcgtcgtcgaaggcaggaacggtacgatgacctcacgggccagcgtcccggcaatatgctcgacgacatgctggatggccagcgtcagcatgtcgcgttcgtcgcccccgacacccgtcttgagtttcacggtataaacgcccacgaccgacccgtggcggatacgcacgaaattgcaataggccacatcgtcgtccggaagcagcgaaaaaacatccacgtcgacgatcttcgcactgacgatcaccgacttgcccgcatagttgtccagcgcatcgaggcgctgcttgtagcgctgcgccaattcgaatttcaatcccccggcagcacgttgcatctcctgttcgaggtagttacgcacggggcgcaggtcgcccttgagcaccgcgacgaccatgtcgacgagccggccgtattcctcttcgccctgcgccccgatgcaggggcctttgcagttgcccaggtggtattgcaggcagaccgtatattttcccttggcgatctgctcgggagcaagattgagtttgcaggtacgcaagggaaccacctcgcggatgaaatccagcacgctgtgctgcatcatcaccgatccgtaggggccgaagtactgcgacccgtcgcggttcagttgccgcgtcgactgcacgcgcggaaaatgctcgcggcgcaccacgatccacggataggtcttatcgtctttgagcaggatattgtaccgcggctggagggtcttgatgagcgagttttccagcaacagggcgtcggtttcgctgtccacgacgatatggcggatctcggcgatctgcttcaccagcacgcgcaccttggggctgtgctccttgctctgcacgaaataggacgaaacccgcttgcgcaggctcttggccttaccgacgtagatgatcgtccccgagcggtctacgaactggtagacgcccggtgacagcggcagcatcgccacctgctccctgaggttgtttttttcggttcccgccatagcgttaatcgcaatgcaaatgtagcaattatttcacaaaacgcgccatcccctgcggcatgcctccggcgcacgcagagatggccgcatttgacacacgcataaactaaaacgtccgattttttgttttattcgtcggaacggcatatatttgcggcacattgaaaacaaacccaaaccctatgagaaaatttttaccttttctcttcgccgcagcactcgcatcgtcctgtatcgacaacgcttacgacctgtcgaacgtgaccacggacgatgtaaccatcggcgacgaggactcggaataccggctgccgctggccacggtatacgtaagtatgagtgaactgaaggaaggaggcgcggacatcaaaacgctcttcgacgaagcggacatctggcttccctcgcccctgcccggaaacgccgcatacgtcgacctgcgggaactccagaacaccccggagacaatcacgccgctgctcgatgcactgatcgaccagatgatggacgacgatgccaagatcaccgccgtcgccgacctgctggcggaaaaatacctctcgaccttcctgcccctgctccccccgaatacggatccggcagatttcaaaccggtcttcatcgaggcgttccgcaatatgccgatgctgcacgaccggctttcgggcgaggtcaaatccctggccggcagctacctgacagagctcaaagtccaggatgtaacctacgacatcggtaagatcgacatcggcggcgacgtggtggacatgctctgcgagaaccttgacagtgaaggcacccccaaccccaaaaacacgctgcacctctacggcagcatcacgagcgccctacccgtgagcctgcggctcgtgccctatttctcgcctacgaacgtccggttcgacgtaacggtcgaacccggcaaaacgaacgagatcagggagacgcaacttttcgaaagcgacctgcggcagatcatcgagggtgccgagatcatcctccccgtctcgctggagaaatactatccgggctacgatttcacgtccgatcagcaaatcgtcatcaccctgcgcctgatcaagcgcggcggcctgaagctcaacctctaatccggcacagaacatgaaaaaaatatacgcattcctattcacgctgctgctggcatccggcgccgcggcacagaacccgacggcctatttcatggaggggtcgaccctccgcagccagttcaacccggctttcgcccccttacgcggctatgtcaatatccccgggctgggcggactggacatcaacgtgagcggcaacctctcgatcgacaaaatactctatccgcgcaacggaaaactcgtcacactgctcgacagctccgtatcgacggccgacgccctttcgggactcaaagccgacaacctcctgggcttcgacacgcgcgtgaacctcatcgggttcggcgccttcacccgcaaccacaaaaatttctggtcgttcgacctcaacgcccgcgtcacgaccgacgccaccctgccctactcgctcttcgacttcctgaaacgcggcaatagcggcgacatcagcgacatcggcatcacggccgacagctatctcgaagcgggtttcaactactcttttccgctgctcgacgacaagttatacatcggtgtgcgggcaaaattcctgatgggcgtggcacgtgcgcggatgtatttcacgcaattcaacgtatcgcacaacgaggaacgctggctgatcaacgccgcgggcgggctggacatcacggccgcagggctcgacgtcaagaccgaactcaacgaccacggcgaagaggtctacaagatggacgacatcagcctcaagcccacctcgcccgccggctacggcttcgcggtcgacttcggagccacgtacgacatcctgcccaacctgcaggcatcgctggcggtgaacgacctgggcttcatcggctggagcaagaacaagaacgtaacgggttattcggcgaaggagctatccttcacgggcgtgacggtcaccgaggacggcaccgagtcgcccgacttcgacatcgacgtactggagttccacaagggcgcggccaagagcgtatcgcgcatgctgcgcgcctcgatcaacgccggcctcgaatacgaggtatggcgccataagatcggcatcggcctgttgtatacggcccgcgtgtgggaatacaagaccctgcacaacatcaccgggtcggtcaatttccacccgatccgctggtttaccgtcacgggcagctattcggtgatcgacaaccgcggcggcgccgtggggctggcgctgaacctgaaccccagctggatcaatttctaccttgccacggacatcgtcacggccaagcatacaccccagttcatccccatcaagcagagcgtgatgaacgtcacgctgggcatcggcgtaccgatcggcaggcgcagccaccgtatcgcggcctatgtgtacgacaaggatcggcggtaaacgaacgggaaacccggccttttcaggccgggtttttcttatcaggacgcccgaaaattctgccgaaccgggcataaagacacttggagtacgcaaaaaagacagcctgcggcaacaaacgcaccctccctttccatattttaggcgcacccataccataatcgggcaatgacattggtttatcggaaactttatttatctttgcaatatagagattacgaaagcatttctcaggggacgaacttatttccccgccccggatgtttttgcgtttaaatattgcgacggcccctcaaatctgtgtgaagttgcgtcactacttttgaattcttcaaaatcacgggccgtcgcaatctttttatccctttaaacaaaaatcatgccatagcccatccgattttcctcgcccccagtctatcccgcttcgacgaggctacgctccagtgcggcacgcgtcgccatgcggccggcctcgacaatttcccgggcgcggtagaattcaaaaatcccgaaacggtcggcaggcatctctatcagcaggtcgggcttgtaaagcttgcacatcaggcgtgcgatatgctgctgcatgatctccgacgaggcggtaatcaccttataatagttcagcgaagccttgttgcggacggccatctcctccgagaacggcgcgctcacatccacggcgaccaggacgtcgcccggttcacggcgcacccggttcaacggcagcggattgaccgtaccgccgtcgaccagcacctggttcccccggcgtacgggacggaataccgacgggatggagatagacgcccggatggcatcgtacaagcctcccctgtcgagcacgacttcgcgccccgtcagcaggtcggcggcaaccgcggcgaacggcagcggcatcttctcgatcttcacgtcgggcaccagctccttcatggcccgcatcacgcggtcgcccttgacgagtccctcggtgctcagcgcaaaatcgaccagcccgaaaaccttatacttgtcgagcgtatacatccactccttgaagggttcgagatgccccgaggcatacatgcccccgaccaacgcccccatcgaagtgccggccacagcatgcacctcgaatccctgactctccaactcctcgatcgccccgatatgggcaacaccacgcgcgccgccgcccgcaagcaccagcgcagcccttctttttttcataaattcatcttgtttatccgctcccggactttatcccacgcatgggttccgaacagacagcttgcacgcatcgtgccgcacatcccggcaaaacgcgacattggaataacgaaacacaattcgtccgcaccgacccacgggcgcaccgaaggatcgaacagccccaggaaacatctgtggccgccgttacggttttcccgcacggcctgcgacaccacggtactgcatcccgagccgaacggcgccgcaacggcatccggggcgtcgttgtcgaacccggcccatgtcacgagccccgccaagacgtctggcgtagcgaagaatagcacgccttccgccccgtcgaacgtccccgccgcatccacacgcacgaactcgagccacgccttcggccccggccgcaggtcgagcgcagcgatgaagtccagcaccatttcgggcgtctgcttataacgctccttgagcgagacgaactgcgggacgaattccggcatggggctgaaacccgtatagaacttgccgcccccgcaaccgataatcgaggcgttgagccccacgggccgcccgtcacgcgcctcggccaacgccttgaaaaaacacccgcccgcctttgcggcggggcgcagcggttcgtccgtatagcgaaacagcaggggcagctccggcaccgggccgaaagcctcgcggaaagcggcgacaaattctcctgtctgcatggcattcatccgtttgtaattacataatccataaatacgtcgtgcggttcgacgggcagtgccccgaccagctggtgggcgtagcagaccccgaccttcacgccccggaacccgggctgcgagaggtatttgtcataaaacccgcggccgcggcccatgcgggcaccggcttgcgtaaatgccgttccaggaacgacgatcaaatctatttcggacggttcgcacggcattgcgtccccgtccggttcggcgatcccgaaggcccccgcacggagtgccccgggtacgtaatcgaagaaccgcatcgcgtcgcccccgacccgggggacgacgatccgcctggcggagccccaccgggcaagcgcctcctccgtcgcgggttcgtcgggcagggcacagaaaaacgccacgcaccgcgctgtcccgaaaggccccgattccgctacccggcggaagatccgcccggatgccgccgcacgttcttcgggggagagggacaggttctgttttttcatcgctgcacgcagctcttttttagtcataaaaccctccttttcggcataaaattcccggccgtttctattgttattctgcaaacaatggctatctttgcgtccgggaacacaaaactttaacaaatataaacaaatttaaatcattatgagctgttttttatctaattcctcgctcggcaagaagttggtgatgagcgtgacggggtgcttcctcgtgctctttatcctcttccacatgtccatgaacattgtggcgatcatctcgcccgaggcttacaacatgatctgcgcactgctgggggccaactggtacgcgctggccggtacgctcgtactggcggcaggcgtggtcatccacttcatctacgccgtcatcctgacgctcgaaaaccgcaaggcacgcggttcgcagcgctacgccgtaacggtcgtggaaccgggcgtcaaatgggcttcgaaaaacatgctcgtactgggctttatcatcctgggcggcctggcactccacctgttcaatttctgggctaaaatgcagctcgtcgaaatcatgggcggccatgagaattcgctgggcttcggcgctgccgacggcgcttcgctgatcgcctacactttctcgcagtggtattacgtggtgatctacctcgtgtggttcttcgccctctggttccacctcacgcacggcgtatggtcgatgttccagacggtaggctgggccaacgacacgtggtatccccgcctgaaatgcatcgccaatatcgtagcgacgatcatcttcctcggctttgccgccgtcgtggtgggttacttcatcaagagcatctgcccctgctgcgcaggcgcctgctaaccgattatccagaacaataaacacacaacagatatggcttttaaattagatgctaaaatccctgccggcgctctcgcagaaaaatggagcaaccacaaggcagctatcaaggtcgtaagccccgcgaacaagcgcaagctcgacatcatcatcgtcggaaccggcctgggcggtgcttccgcagccgcttcgctcggtgaactcggatataacgtaaaaatattctgcatccaggattcgccccgccgcgcgcactcgatcgccgcgcagggtggtatcaacgctgcgaagaactaccagaacgacaacgactcggtataccgcctgttctatgacacgatcaagggcggtgactaccgcgcacgcgaagccaacgtataccgcctggccgaggtttccaacctcatcatcgaccagtgcgtggcccagggcgtacctttcgcacgcgaatacggcggcctgctggccaaccgttcgttcggcggcgcacaggtatcgcgtacgttctacgcccgcggccagacgggccagcagctcctgctgggcgcttattcggtactcaacaaggaaatcgcagccggcacggtgaaaagctatccgcgccatgaaatgctcgacatcgtcatcgaggacggcgaggcaaagggtatcatcgcccgcaacctcgtcaccggtgagatcgagcgccacggcgcacacgccgtggtgatcgccacgggcggatacggcaacgtattcttcctttcgaccaacgccatggcatcgaatggttcggccgcattccagtgctaccgcaagggcgccggcttcgccaacccctgcttcacgcaaatccacccgacctgcatccccgtacacggcgaccagcagtcgaagctgacgctcatgtcggagtcgctgcgcaacgacggccgtatctgggttcccaagaaactcgaagacgtgaaggccatccgctcgggtgccaagaaaccgtcggacatcgccgaagaagaccgcgactactacctggagcgccgttacccggccttcggtaacctcgtgccgcgcgacgtggcttcgcgtgccgccaaggagcgctgcgacgcaggcttcggcgtgaacgaaacggggctggccgtattcctcgacttcaagaccgccatcgagcgtctgggcaaggacatcatcaagcaacgctacggcaacctgttcgacatgtacgaggagatcaccgacgtgagcccctacgagcagccgatgcagatcttcccggccgtgcactataccatgggcggcatctgggtcgactacaacctgatgaccaccatccccggcctgtatgccatcggcgaggccaacttctccgaccacggtgccaaccgcctcggcgcctcggcgctgatgcagggtctggccgacggttatttcgtactgccctacaccatcggcgactacctctcgcacaaaatccaggctccgaaggtgaagaccgacaccaaggccttcgaccaggctgagaaggaagtcaaggagaagatcgccaaactgctctcgataggcggcaagcaatcggtagacgatattcacaagaaactcggccacatcatgtgggagaacgtcggcatggcccgcaccaaggagtcgctcgaaaaggcgatcaccgagatccaggcactacgcaaggagttctggaaggacgtgaaggtcgtaggcaaggaaaacgacttcaacgtcgagttggaaaaggcgctccgcctggccgatttcctggaactgggcgagttgatggcccgcgacgcactcaaccgcgaggagtcgtgcggcggtcacttccgcacggaacaccagaccgaggaaggcgaggccaagcgcgacgacgagcacttcgtatatgccgccgtatgggagtacaagggcgaggacgcagcccccgagctgacgaaagaaccgctgaacttcgagttcgtacaccccgcacagcgcaactacaaagactaaccgtttgacgttgtaacactttaataacaaattgaaattatgaattttacattaaagatatggcgtcaaaaggacgctaaagcaaagggtggtttcgaaacttacaaagtcgaaaacatctcggccgacacctcgttcctcgagatgctcgacatcctcaacaataacctgatccacgagggcaaggagcccgtggcattcgaccacgactgccgcgaaggtatctgcggcatgtgctcgctgcacatcgacggccatgcccacggccccagccaggcggtcacgacctgccagatctacatgcgcaagttcaaggacggtgcgaccatcaccatcgagccctggcgctcggcagcgttccccgtcatcaaagacctcgtggtgaaccgttcatcgtacgaccagatcctgcaggcgggaggtttcatctcggtacgcaccaactcggtgcccgacggcaacgccattccgattccgaaggccgacgccgacgagtcgatggacgccgccgcatgcgtaggctgcggagcctgtgccgcgacctgcaagaacggttcggccatgctcttcgtcgctgcccgcgtatcgtcgctcgccaagctgccgcagggccgcgtggagggtgcacgccgcgccaaggcgatggtcgccaagatggacgaactgggcttcggcaactgcaccaacacgggtgcctgccaggccgagtgccccaagtcgatctccatcgcgcacatcgcacgtctgaaccgcgaattcctctcggcaaaattcgaggactaagcgatcatatgcacccggctttccccgctatgcggaaataccgggcagacaaaggggagggacaatgcagtccttccccttttttattgtatcgttatgcaaactccgcttccggttctcaatatgcgccccgcccatccccggccgtcgtctggcaccaatgcagggcgcggggaaacaggcggtatcatttttgcggcgacggatgaaaaacaaaaccgcaatgccatggaaagaattgtagaatttccgaccgaccgcaccgtcatctccaccgaaaacaacgggttcgcaggcgacgaacgcgacgaaaccctgatcgacgaaaacctcgtggaaaccgagatcccgctggcggacaggatcccgggtgccgtccgggagaccgaagagggcgacaggccgatctatgacgaagaagggtaccggaacgatccgggcggggaataaaacggaaccggcgaatccccagcctttattgcgggcgaatcgacgaaagccgcgccacctgcttgaggtcgaactcgccgtagatgttcaccacgacggtttccttcgcaccgtaggtaatcatcaccagctctgacttgaccgacagggccgtttcccggatatagaacttcgtggtctgcccgtcctccgtaccggaggtgacgggctggaatttccggtcggcggcgacggcggcctcggcatcgcgcaccagcatcccgctgtccccgcctttgagggcaatgatacggatatactcaatgtccttcagtaatacggcaagtcctttatcccccctttgcgcggcctgacggctcatcatctgcatcatcttctgctccagcagcacgctggtaaatccttcggaggcatcgtaccgccggaagaaatcgtccacggagctgctctgcgccgatacagaccgcggcaggaagaggcaaagggcaaatatcaataacaatcgtttcatggattccgtgattataattacatgagccgcgaaatgccgaaactcagcgtatggcactcggggccgacccccttcttgaaaaggggcgtcacaccgtaacggacgaaaacaccgacaccgctataggaaaccgaaccgcccacaccgaactgatatgtccgcaatcccgaaagctcgtactgcaccttcggctttttatgcagtgaagtcagctcgatcccgaagtcggaatacgcgatggccgacacctgaaaatttctgaaaggcttgtaaataagcctcagaggaataccgagcgacgaagtgacgaacttcgatttgtcggccggttcgtccagcgccacgggcaggaggcgtccatgttcgtacccaaggcggatttgcgcatcggaaagccggtaattatccacggcaaaattcaaatctgtggcaaaatagagtgtacggttgcggttcagagcaacctgcacctgtaaaaccgaggctgcgacatggatcgaactccccagcttctggtcgagaaaacccttctcttcgggggcataaccgtcgtaatcgaccccaaccagttgcgagaacccgaattcaccgcagttgaacagatagagtttcacacgccccgaccgggtcaccacatcggcgtactccggttccggggcacgccccagtataatcccgaacccggccacctcgagtatgacattgccctcgcggtctgctccgcgcagtgccatcaggtcgttgcccaccgtatcgatcctccgcaacgtatcgagccccagtgaatcgcggttcatcgccataacgggccgttcgcaggttcctccccgctgcacacggagttctccttcggtctgcgccgataccagccgaggcaaaagcagaataagtgccaataataatcttttcatagccattccgtttcaggttttacagcgagagcgaataggcaaacccgaacgagaccgtatggcagtcggggccggcatcgtgcttgaacagcggcgtgataccgtaacgggcataaaggccgaacccgcggtatgcgaccgacgcacccaggccgaactggtatgcccggaatccggacaaactgtgcttctccttcggttttttatagatggcatccgcccccagcatgaaatcggaataggcgacggccgtgatccggaggcgtttcacaggctcgtagatcaaccgcacgggaataccgagcgaggaggtgaccgccttagacttgtcgggcggttcgtccagagctaccggcacgaggcgtccgccgatgttgccgagggtgattcccgaatcggcaaggcgaatgttgtcgagcgtgtattgcaggccgaggccgaggctgagcgtccggctccggttcagcgacaggcatatctgcatgaccgagaaactgaaatggaacgacgggccgagtcgctggtcgaggaaccccgcctcaccgggggcatagccggaataatcgaccccggtcagctgcgtaaaaccgaactccatatcgctgagcaggttgagccaaacccggggcgatttcacctccatcttctgcatcggggtatgccccagccggaggccgaagccggcgacttcgagcaccatgctgccgtcgcgtcccccgtcacgcagggtcaccaggccgttgtcgaccgtgtcgatacgccgcagcgtgtcgatacccagcgagtcgcggtcgacggtttcgatagtcacgggtttcccgtcggcacggcggaaactaaccgagtcggcgttctgcgccgcaacgggtgaaaaggccaggagcaatacccccgcaaaaacaaacagtttcttcatgacatatcattttaatcgttcacaatcaattcttcgaccagatactcagggtcggcgaactcggaaaaaccctgcaaatagaccgtcgtccgcatggcgacgtccttgtcgtagaccgcttgcccgtcgatgtaacaataggggcggcgcatgtactccacgcacagaaaaaggccgagcgccacgacggccgccgccgcgatcccgcacaggcgcaggaacctccgcttcctgccgggtctatgcccgaaggtgtgcacccgctcaggcaggcattccccggcaagtccgtccatgccgcagaacatcgcccgggcatagcgcaaaccgggatccgtttccccctcccggaaataagccttcagttcctgctcttcggcatcggtcgtccgcgcctcgcaatagcgctccaacaacttctcaatccgttctttccgctctttcatcgtccatcatttttttcagtattcccctcagtgcattgcgggcgcgggagaggatcatgcgcacctgggcttcgtcgcaagccaccatgccggcgatctcacgggtcggataaccctcgatgtccttcaggtacaagacctcgcgctgcctctcgggcaactccgccatcgcacggcgcaccaggtcacgcgcttcccacccttcggcatcccccgtcgtcacgcgctccgcccatcctgccagcgcattgtcgcggcagccatcgagccgcccccgctccgtccacaaccgctccagcaggtcgtgcgtcacgtcctcggcctcgtcggcgcaaagcagcaggctttgcgcatagcggaacatacggtcgcggagcggcacaacgtaacgggtgaattcgaattccttcattgtatttgtaagacgaagcaagcgggcaaaacgcaacaccagatcggtaaatatcgtaattttttcctcaatagaagcctttccgatcccatgccggggctcctataatataggtatggcaaaaaaatgcagattttttgaagaaatttagtactttgtattgcataatactaaaatgtgtattatatttgcaataccaaagtagtagtaaaccggaaatattaaccctaaaatacctctacgactatgaaagagacagtaaacgtaaatatcggctcgcaggctttcaccctcgacgaagatgcttaccgtgtactcaggagttatcttgacgacatacgcagccgcctgcccgaatacgacaccgaaaccatgggcgacatcgaggtacgcattgccgagatattccgcgagatcgtctcctctccgatgcgcgtcatcaccctcgacacggtgcgcacggcgatgcatcgaatgggggcaccctcggacttcggcgagcgccgcggcaacaccgcccggcaggaggacgaggaagccgagccggaaacccgcaagctctaccgctcgcgcaccgaccgctcgatcgccggcatctgcggcggactggccgacttcttccatgtagatacgacggtcatgcggctcctcatgctgtttctgataatcttcggcgggctttcgatctgggcctatatcatcctctggatcatcatccccgaacaacccgccccgaaattcaatattaaccgtaaaaaccgataaaaccatggcaacggacaaaacaaaaaaactgtaccgggtacgcgacggcatcatcgctggcgtctgcggcggactggccgacttcttcgggctcgacccgtcgctcatacgcatcgcaactctcatcctcatactcttcggcgggctttcgctctgggtatacatcatcctctggctgatcgtaccgaaggctccgaagcgattaaccgaataaagcattatggctgaagacaacgtaaaagcgcagatgcgcaagggaatcctggagtattgcatcctcgccatcctttcccgcgaagattcgtatgctccgaagatcatcgccgaactcaaagaggccgagatgatcgtggtcgagggtacgctgtacccgatcctcacgcggcagaaaaattcggggctcctgacttaccgttgggaagaatccccgcaggggccgccccgcaaatactacacgctgaccgacaaggggcgtgaatatcttaaaacgctcgacgaagcctgggacgaactcgtaggccagatacaggtcattcgccacggaaaataaaaaatcaccccttaaataattacaaccatgaaaagaatacttttgatcgcagtcctgctgggcagcatgatcaccgccaccacatatttcgtctgcatcgcagccccgtcggtactcttcggcaaaggcatcaaaggcagcggcaacatcgtcacgcgcaccatcgacgccccggatttcgaccgtgtagatgcggcacgcgccgtgaaggtcgtcatcaccgacaaggcgaccggcaaaatcacgatcgaagccgacgacaacattatggaatacgtagtagtggaagccaagggcggacgcctgacggcgaccatcgacaagtcggtcaacaacgtatcgaacgccgacgtgaccgtcaccgtcccggccaacgggcgcatccgcgcactcgacgcatcgagcgccgcacggatcacgagcgaggtcacgctgacggccgacaaattctcgatcgacgcatcgagtgccgccaggatcgacgcggccgtgaaatcgacctcctgcacagtggccgcatcgagcgcctcgaacatcgacgccgccatcgaaaccggctcctgcacggtaggggcatcgagtgcctcgaagatcaccctgaagggctccgccgacaaatgcagcatcgacatgagctcggccgcaaaactttcggccgccgaattcacggtcgccgactgcagcgtcgacacctcgagcgctgccaaagctacggtcaactgcacgggcaaactccgcaccgaggcttcgagcggcagttcgatccgttacacgggcgactgccagaccagcatcagcaaatcgagcggcggcagcgtaagcaggaaataatcccccaacggcacaactatgaaagaggttaaaaaatgcagcatatcgggcgtagcgttcacgatggacgccgatgcctaccaggagctggagaactatctcgacagtctgaaaaagacctacaaggatacgcccgacggagccgagatcgtcgccgacatcgaagcccgcatagccgagctgatcctcacaacgcaggacaacacccgcgtggtcgagaaacccctgatcctgaatatcatccaccagatgggctcggtcgaggacatctccgaggagagttcggacaaaaaagcccccgaagagccgcgtatcccgcgccgcctttaccgcgacacggagaacgccaaactgggcggcgtatgcgccggcatcggcaagtacttcgacgtcgatcccgtatggatccggctgggcatgttcctgccgatcctgctgagcttcctgcactggattccgttcatggactggacgggaccgatgatgggcaacctgttcggcatcttcgtcatctgctacgttatcatgtggttcgccgtaccggcggcacgcacggcacgccagaaactcgaaatgaacggcgaaaaaatcaccgcacagtcgatccgcgagaccaccgaagccaccgcaggctgcgatcccgacgtcagggccaagccgatcgtggcggaggccgtctcggtcttcggcaaggtggtgctgatcctgctcaagcttttcgccgggctgctcgtattcgggcttatcatgggagcctgcgccctgattatcgggctgttcgccctggtcataggcggcggaggcatcctctcgcctttcttcccgctgggcatgacgctgtgggtacctattctcggcatatttattgtactgattcccgtcatactgctcatttatgtactgatgtgcctcatcgcttcgcgcaagcccggaggcacggccgtgctgatcatcttcctgctgtggctcgcgagcttcatcgcatgcgcctgcatcgccatccgcgaggatgtgggcgaccggttccgcgccaagcgtaacgtgatcgaacaggtgctcaacaccgaagtggtgatcgacaacgacacgacgacggtacaaaagctgctcaaggagtacgaaagccagaacgtcatcgaagacggccagaagacactgcacatcagtatcccgaacaaatcgatcgacattacgatcgacaaagacaaggccgggctggaagtgaaggccgacggcaatcgggtgaaggtggggaaaagccgcaaggcttcctcagaaaaggccggccagagcacgcaggcagccgcagaggcggacgcagacactgctgcgcagggacagcagaccgaataaggccacaggcgttaggtaaaataaaaagttttttcggaacgcagggcgcacccacgggtagcgccctcgtttttttgaaaaatttaaaataattactacctttgagggattttgtgtttaaacgaaaaactatggctggcagcaaatgcatcggcattctcacatcgggaggcgacgcccccggcatgaatgcggcaatacgtgcggtaacccgcagcgcaatctataacggctttacggtaaagggaatcatgcgcggatacaaaggtctcgtatacaacgagatcgtagagttcaaatcccagagcgtaagcaatatcatccaactgggcggcacgattctcaaaacggcgcgcagccaggagttcaccacggccgaaggacgtaaggcggcttacgacaacatggtcgcagccggcatcaacgcgctggtggtcatcggcggcgacggctcgctgacaggcgcagggattttcgcgcaggagtacaacgtgcccatcgtagggcttcccgggacgatcgacaacgacctcgggggtacggactcgacgatcggctacgacacggcgctgaacacgatcgtggaggcggtcgacaaactgcgcgatacggcatcgagccacgagcgcctcttcttcgtcgaggtgatgggacatacggcgggttacctggcgctgaacagcgccatcgccacgggttccgaagcggctatcatccccgaaatggacaccgaggtcgaccagctggccgaactcatcaaccacggcttccgcaagagcaagaactcggcgatcgtcatcgtggccgaaaaccccaagacgggcggcgccacggcactggccgaacgtgtcaagaaggagttcccgcagtacgacgcccgcgtcacgatcctggggcatatccagcgcggcgggtcgccgacggccgtagaccgcatcctcgcctcgcggatgggcgaagcagccatcgaggcgttcctcgacgaacagcgcaacgtgatgatcggcattcagaacggcaagatcgtctacgtccccttcgccaaggcgaccatgcacaacaagggcatcgaccgcaattcgctcgacctggtaaagatactctccatataatttcacaacagacaaccccgaacttaccgaatgaaacgtgttatcggaatcggcaatgccctgacggacatgctggtcaacctggaatcagactccgtgctgggtcgcttcaaactcgccaaaggctcgatgagcctcgtggataccaaactgcagaccgaaatctcgaaatccgtggcaggactgccctactcgctctcgctcggcggttcggccggcaacaccatccgcgccatggccaaactgggctgccaggtcgggttcatcggcaaggtcggacaggatacgacgggcgacttcttcgtccaggcactcgaaaacctgggcgtggaacccgtaatcttccgtggctcgaaacgttcgggcaagtgcgtgtcgctcatctcgcccgacggcgagcggacgatggtcacctacctcggcgcggcactcgaactgaccgccgcggagatcgacccggcgatcttcgacgggtacgactgcctctatatcgaaggttacatcgtccaagaccacgacctgatccgcaaggctgcccgcacggccaaggagtgcggactgaaggtcgccatcgacctggccagtttcaacatcgtggccgaaaacctcgaattcctgcgtaacctcgtcagggactatgtcgacatcgttttcgccaacgaggacgaagccaagaccttcgcctgcgaggcggagccgctgaacgccctgcaatgcatctcggagatgtgcgaactggccgtggtgaagatcggcatcaagggcgccatgatcaagcacggcgacgaagtggtgcatgtcggcatcctggctgcggcaaaacgcgtcgacacgacgggtgccggggatttctacgccgcggggttcctcgcagggctttgcgagaacctctcgctgcgccagtgcggcacgatcggcgccatcacggcgggcaaagtcatcgaggtcgtcgggactaccttcggcgaagaggcctgggaggacatctcgcgcctggtgaacaaggtcaggaacgagaaatacctgttctgacccggaaaattggaataaagaaagcggcccgtaaggccgctttctttattccaaaggcaggaaccgaacctgcaacgcccataaaatcggaatttattgttatttttacgacacaaaacaccggcggcatggacaaaatatggacttcggccaaagtcaaaatcaggaaccggctggactttatccattacggccagcgaatcggctacatcaatatcgtcgcgatcgtcatagacctcgccattctgctctattcggccatcgactaccaaacgctgatgcaaaccggcaacctgttccttttcctgttcctggtctttacgacccttatctggcagacgatctgtttcgtaaaggatttctacgcctacacgcataagacggagtattacaacctccaagacatctaccggcacaagactccggaggcagccgacgagttggatgagatttataccgccgccccgatcgccttcccgggcaccgtattgcggcacagcgacaacatagaccgcttattgcaagcagaccgccccatccatgcgatactatgcaccgacaaggaaaagcgggtattgaaatacataaagaattaccgggacatcctgctgccgttcctcaacggcaagtggcacgaaatgaagaacaggaacggcagtttttacaacgagcgcaaactgtgcatggcatccgaattcggggaaagcggcggagaatggtacgtccgggtatgcaaaggctgttactacaactcctacctgacgaacgtaatctatgcgaaaaaactctcccaccaaagcggttggggcatgacccctcccgcgaacatcgccaactacccggtacgccggctcgaaaaatcggtcatgagcgaccacatcggcatttcgacgctggccgtcacaaccgacggatatgtcattatcctccaccagaacgacaaggccctcacttcgacagaccgcctgactccttcgggatcgggatcggtcgacttcagcgatttgcgtccggactccgatttcagggagacgctgaaagccgcagccgagagggagctgcgcgaagaaaccaacctccccgcaggccggatcggacacacggaggtcatcggcttttaccgcgacctggggcgcggtgggaaacccgagttctgctgcctgacccagctaaatgccagctcgttcgaaatagccgagctggaacccagctgcgaggaacagcgggacgatttcgaaacctaccagatactgggggaaatgggagcattggacggaaaagatttcgggcggttttcggacatggcgctcaacctctcgcccggatgcgaagaagagcacccctcattggcgctctacatgtgctacatcatgctttgccgatatttcggcaaggaaatccccgtacgcaattaaagcacagctcaatggccggcacgggagaaaagcccccggctgatctcgtaacgcatccgaatcagccacaatgatttgcggggcgacatcgtcagcgaaagcaacagcgtagccgcccacttcatacattccagcacaacggccttcggataacggcggtagatgcccgcccgcaggcgctggctcacgccgacattgtagcaaaggcggcggaaatagtcctcggtgagtttcccgggcgggataatatgccacatgacggcattggggacataccagcatgtctcgccgccgcgcatcatgcgttcgaagaaatcgttttcctcgccaccgatcagcatccgtcccacacgccccagcgaggggtcgaacccgccgtatcgggcggttgcggagcggcggaaagccatgttgcctcccccgggaacacgtccggcaggaaaaggccgtacggcatggccgaaatccatcgggttggcgacaggcagttcggtatatttcgacatccacgccggacgtcccgagacatactcggcaatgatgcgccccccggccacgacggcatcgggatgtgcatcgaagaattcgacatacgcccggataaaccccgcattgatacgttcgtcgtcgtcgatgaaggccatgtagggcgccgaagtttccgcgatcccccggttgcgggcataggaaacccccgggccggtctcggtcaccatgcgcaggttgagcgccggataccgtgccgcgaaggccgcgaaccgggcgggcgtatcgtccgtcgaattgttgttcaccaccacgcactcccactccccggcgggcatgtcctgccgcacgacggattcgagcgccgcgagaagctgcccggcacgattatgcgtcgggattatgagcgagaggcggatcatcgtgcgaatgtagcaatttatccgtaaaaaaccgttatatttgcacaaattataagcgatacgactatgcacaatctgtttcgtacccttttgctgcccatagcggccctgtttgccgtgacggcggtctcggcgcaaaacgtaagctggaaaagcaccgtggagcacctcgacggcgacatgtaccggatcgtactcgaagcctcgatccccgcgccttaccatatgtatgacatggggccctatgaaggcgggcccaatgccacgacgatcaccttcaccgcgggtgccggggctacgctcgagggcggcgtagagcaactctccactcccgagcgccactacgacaagaccttcgagatggagatcggcacctttgccggcaaggcgctcttcacccagcgggtgaagctcgcggccgaaaaggccgccgtcacggcccagctggagtggatgatctgcgacgacacgagctgcatgccgcccgaggatacggaaatgacgatcgacctgacggcacaggccggcgcagcgacggcatcggccgccacgccgcaggatagggccccagccgggactgcggacaaggccgccgttgcggaagccccggacaatgccggcggaggctcggcacaggccgcagcggaacctgcgcagaaagacgccgcaggcggaggctcgctgtgggcgttgatcatcgaggcgatcctgtggggtttcgcagccttgctgaccccctgcgtattccccatggtgccgatgaccgtatcgttcttcatgaaaagctccggcagccccgcgatgggacgtttccgcgccggcatgtacgggttcttcatcgtcgcgctctacacgctgccgatagccgcgatcatcgtcatcacacgcatcgtcgggggcgatgccgtgacggccgacatcttcaactggctggcgacgcactggctgcccaatattcttttcttcctcgtattcatggtattcgccgcatcgttcttcggggcgttcgaaattaccatgccctcctggatggtcaacaaaaccgacagcaaagccgactcgaaaggtctggccggcatcttcttcatggccctgaccctcgtgctggtatccttctcctgcacgggcccgatcgtaggttcggtgcttatcaaatcgacgtcgggcgaattctggagcccgatcgtcaccatgctggcgttttccgtcgccttcgcgcttcccttcaccgtcttcgccttcttcccgtcgatgctcaagaagctgcccaaaagcggcggatggctcaactcggtgaaggtcgtactgggattcatcgaggtggcgctcggcatgaagttcctctcggtcgccgaccagacctaccactgggggctgctcgaccgcgagatatacctcgccgtatggatcgtgaccttctcgctcctggggctctatctgctgggaaaaatcaaatttgcgcatgacagcgatacgccctacctgggcgtaggccgcctggcactggccatcgtcaccttctcgttcgtcgtatacctcgtccccggcatgtggggcgccccgctcaaaggcctctcgggctacctgccgccgctgcatacgcaggatttcgtgatcgggaaggaagcgccgaccgcttcgggcgcagaaacgcgcatgctgctgaccgtcgacggccagaaacccaagcacagcgatttcctgcacctgccccacggcctcgaagggttcttcgacctgaaagaagccgaggcctatgccgcaaaggtcggcaaaccgctcttcatcgacttcacggggcacgggtgcgtcaactgccgcgaaatggaagcccgcgtatgggcagacccgcaggtgctcgacatcctgcgcaacgactacgtgatcgtggcgctctattccgacgacaagaaagtgcttcccgagagcgactgggtaacgaccgacgcgggaaaggtgcttaaaagtctcggcaagataaactcgtattacgccctgaaaacctacggggtaaatgcccagccttactacgtgctccagggacggaacgggaaacaactcgtgccgccccgcggatacgacctcaacgtcgacaatttcgtgggattcctcaagagcggcgtcgaagcctacaacgcccaaaaataagggctgcgacgacaaaaaaacaagcactgcgacagcaaaaaagcctgcgactttccggtcgcaggctttttcacatccatcgtccgcacatcagtccgcgaactcgtcgaacatcgtcgtactcaggtatttctcggcacggtcggggaaaaccaccacgatattgccccgttcgatgcgctgcgcggtgcgcacggccgccagcatcgcggcgccgctgctcatgccggcgaagatcgcctccctggcgatgatctcccgcgccatggcgatcgcctcttcgctctcgaccatctcctgcatgtcgatctgcgaaggatcgtagatgtccgggacgatagcctcctccatattcttcaatccctggatatagtggccccggatcggttgcgcgcagacgaccctgatgtcgggcttcatcaccttcaggaaccgcgaaagccccatcagcgtccccgacgtgccgatcgcacagaccaggtagtcgatcctgccgcctgtctgctgccagatttccagtgccgtagactggtaatgcgccaggtaattgcccgcattggcaaactggtcaggcatgaaatatttgtcggggtcgccggccaccttgctgcgggccaggcggatcgccccgtcggttccctcctcggcgggcgtaaggatcaccttcgcaccataggaacggattattttacgccgctcgaccgacacggcgctgctcatcacgatctccacgggatatcccttgacaatgccgacgatggccaggccgatgcccgtattgcccgacgtcggttcgatgatcgtcttgccgggcgtgaggcgcccgtcctgttcggcctcctcgatcatccggagcgcaatgcggtctttgatgctgcccgtggggttgaaaccttcgagtttcgcatagatattgacgttcgggttggggcaaagccggttgatccgcaccatcggggttcccccgatagtacccaaaatattcttttttaccataaatcgacctaattaaccgcgtaaagataatcatttccccggaatagcggcaatccgcccgcccgattccgcgccgtacggtcgccccagaacgcaggggtgcccgcacaatcgttgtgcaggcaccccagtcctcatcgggaacggttatttttccggcttcccgtgttcgtcgaaagcagccttgacctcggcctccttctttgcacgctgctcggtatcgggggcttcgccctccttgaccagctcattcactttacgttcgaaattctgctcgcagggcgtgcaggtcgtttctttgttttccataggtacgaattttggcatattacgtacgtttccctgcaaaatgcacaccggaattgcctcggttcggatctgccgattatatttgtatacctgaaacaaaataatcatgaaaacctgcaaactactcctgctcgcactttgctgcggatgcgtctccgcatccgcagccggcaaggccggctccgaggccccccacatcgtcaacatcgtcaacttcatccgcaatatcgaaccgcgcagcgaagagatcaccgaaacagtactctacgaaaccgtcgcacggcaggcggcacagctcgccgaatacgggctcccggccacgttcctgctgcaatacgacgcgctgatcaatccccgctaccggcaactgctgacacaggacgtctatcccggcaccgaggtgggcggctggtgggagatcacgcagccccacgtggaagccgcagggctcaagtggcgcggccgctacccgtgggactggcatgccgacgtgggcttcgcaacggggtacacacccgaagaacgccgcaaactggtggacgtctacatggaaaaattcaaagaggtattcggcaaatacccgacggccatcgggtcatggttcatcgacgcctatacgctcgggtacatgtacgacaaatacggcatcgtcgcttcgtgcaactgcaaagaccagataggtaccgacggctacacgctgtggggcggctactggaaccaggcttattatcccagccgggtcaatgcctacatgcctgctcagacccgcgagggacagatccccgtccccgtattccgcatgctgggcagcgacccgatctaccagtacgacaactgcgtgggcggagccttgcagggggtgatttcgctggaacccgtctacggcgacagcggcggcagccgccagtgggtcgagtggttcttccggtcgatgttcgaagaaccctgcctcgcattcgcctacacgcaggccgggcaggaaaactccttcacctggggcagcatggagaaggggctcaacatccagatcccgctgctggcaaaccgtttccgcaagggcgaaatccgtgtggagacgctcacccggtcgggcgaatggttccgggagaatttcccggtaacgcccccgacggccgttacggcactgaccgactaccgtgaaaaggatcgtaaaaccgtatggtacaacagccgttactaccgcaccaacctgctatgggagggcggcgcattgtgcatccgcgacatccacatgttcgatcagcggatggagtcggactactaccgcaaagccggcaccaccaaccagtgcgtctacacgacgctgcctgtcgtggacggctgcatgtggagcacacgggagaagctggccgggctgcgggtcatgcggcgcactgccgacggaagtctggcccaagcgcagggcggcacccccgccgtaacggaaaagggcaagggcaaattactcgtggagtggccgatggacgacggacggaagctcacgatactgctttcggaagaagggatggagatcgccgtccccggcaaaggccccgactggatgctggagctgactgcagcacccggtgcagcgttgccgttcacggcgttcggggcaaggcggatcgccgcagtccaaaaagggttcgcctacgcattcgattgtacgaagggcaccattgcgaccgacggcacctccgcgggaagcatattcgtcctgtatccttcagacggaaagatctcgctgaaattcaaataacggcgcaacggtttcacaagccggcggcctgcctcgggatcggggcgggccgccggtgtttaaaaccgttccgggaatgcggtattcccgcaaattttcgttagctttacgacatgggagccgtcactaaccgacgccgtccgcacaatcatgaaagtatgcaaatcacctctcccggaaaattcgcggatcatccgctaccccgacgccaattaccgcgactgcttccgctgccgcctgcaaaatccgggaaaagtatccccgaaccaggtgatggcggcattttggacaacctgcccggcatggctgaagtttctcttccggctacgcgacctgctggtcaggcccttcgggctgaaaaccggggagggagcccgccgagaaaaactggaagaagccctgaacaacggcgaaagctgcggtttcatgtccgtcgccgaaaggacggccgacgaaacgatcgtcgccctggacgacaaacacctggtggcctacatgtccatctacatcgaaggcggccaagtcttcgcgagcacggtcgtgagataccacaacaaactgggagtggtctatttcaacctcatccgtccgttccacgtcctcgtcgtgaaaaacctcttcaaacagatgatgcgcgaacgcggattctgacacggggttattcccgcgtcacccgtaaacaccgccggccatgaaaccgaatgtcctattactcggaatactgctattcctgtcgccggccgccctcggaaataacgcaggcgacgatacggatgcgctgctgatcgccgccacatatatcggcgacgggaacgggacgatctaccgcggatacggcaccaacccgctggatgcggcatatacgttcaaagacggcagaatctacaaaggcgacggcaggttcaccctgtcgctcgacgccctgtatacgatcagagacggaagaattttcgagggcaacaacacctggccctacgatgccgcatactccatcgaaggcgagcggatataccggggcaacgccacatttgcttcgtggttcgacgtgttgtttacggtaagggacggacagttttacaaaggggacagttcgctcatcctcgacatagcctacaccgtcagggacggccgggtttacgaaggtcgcggggagttcgcaaatacgctattcgatgtgctgtatacgatcgaatacgggggttattaagcatcggaggaaatcccggggcaagtaatttacagaccgggcgccggaaatataccgtgtatcccgatctttcatgatccctgttatttattacggttggcaaaggggcgccgcccgtcgtgggaatccttgaacgagcgtatcaacatcgtttcatattcaccggggagttcttctgccaattctttccagcaaattatcaggcggtcacagtcttccatctgccagatatagcaaccaccccggtgtcctacgggctttccttcaccaaattgcatatactgttttatccgtcggcgcaatgaacgtccggtcattcctatataaagaatatttgttcccgttacccaattgtttttcaacacggtaatatccacattgggatcctttcccttgaaaaaaccgccgcggcctacctcggcaaattcagggaaacttatttcttttctgagaaccagatatactcctttcgtctgcggaatacagtccacctcctttttaagggccgcaaccgttttaaaacccacaaatccccatgcccttgcatcttcaagcgtattcataaacaaaagattttagtacaagcccatagtaaatccggacagtcattggttatcaatcaactacacctaattccaaacataaaaacaggggtcggatttttcaatccgacccctttggtagcgggaggaggactcgaacctccgaccttcgggttatgagcccgacgagctgccaactgctccatcccgcgatgtatcttcagtgatgtactatcgcttttgcgtgtgcaaagataagacaaatattcggactttacaaataattctgcgcatgttccctccgcacaccgcttatcgtactatctatcagccgcaaaaaatattttattatttttcgaaggttagccccacgctgatttttccacagatttcctaccacccggaacagggccggatgaaaacgcacacaccgtctgcagatcccattcgccacacacaccgtcattcccaatcagcggatattggctgcgacaatctccgccaggtcgcggacttcccctttcgtaccgcgcccgatggcttttttgcaaagcgggcaggccgtgacgatcacctcggcaccggtagcttccaactgcccggccacggattttgcgatctgcacctgctgaccgtcggagatcgccgtattggcgaccgaagagccgcagcagggagcgttttcgcgggtttccgcgggttcgagcaattccccgactgcttcgatcacggcacgcggatcgtcgtaaatcccgctgccacgccccaattcgcaggggtcgtggtaggtataacgcgtcgagccgtgcccgacatggagacggcctgccttcatcagacgcaggatatattccgaatggtgcagcacctcgaccccttcgagcgcataatcctcacggaaaaccttgaggcagatcggacacgaggtcacgagcgtcgtgatgccgtgcttgcggaacaactccgtattgtagcgcatcatcttgcgcgccgaatccgtctcaccggccagtttcaacgggcgtccgcagcagacgcccccttcgcggtcggcccaccagacctcttcgccggcggcctggaatactttttccatcgccgacatcgtacggggcgtcaggagggtcatgcacccggcgaaatagcccaccttcccctcgccggacgagcggtctaaccctttgaaataaccgtagcgcttttcgtcgggaacattgcgcatcgtatcgcgggaattgaggcgcagcgtattgaggtcgatgtccaccgggcatttctcggcgcatcgtccgcacatcaggcaattgtcggccacctgcaggcgcagcatcttatatcgccggtcgcgcagaaaatagaccgactgcacgttgtcgatgcccagcacgctctgcaactggcaggggtcgatacaaatgccgcagcgcgaacaggcctcgacctggaagttgtcgaacgccccctccttttcggtcgagcggagcttgtagtggcgcaggaagatcaagggtatctccgtgaagatgtgcatgtaacgggagaacggcagcgccacgaagaaaacaccgagacacgaggagtaaaaccaccacgccacgctttcgaggtttatcagcacgaaggtgctcatgtgcgcagccatccatccgcccagcgaaccggtgaggaatcccccgccgccataaagggcgcaagtcgtgctttcggcgatcaggcgcgccgggaatacgaaccacagggccgaaagcgcaatgcggtcgcccggcacatgcttggtcgtgcggcgcatgcccattctcttcgagaaaaagcgcttgccccaggccagcgcaacgcccgacaggacgaacagcagcaacagatccatcagaaaatcgaagaccggcttatgctggagccccgtcgaaaagtacttgaagaagacatgcccctgcaacggcacatagcggaacccgaggtaggcgacggtctcgatccaccccaaggcgatcagcaggaaccagccgaaggccaggctcatgtgcatgtagcccaacagcgggttgaccctgaagatcctgcggtggagcagcgattcgccgacgacctccccgatcgccgagaaggtacggcgtgtaggcagcccgaacagaatccgtttcttgtcggcgagcggcaggcggtagagccacaggccccacttccacagcaacacgatgaacatcaccgcggcgccgatcatgaaaggtatgcagaatggtgcgaaaaaagtcatcgtcagaagtcccccagtttacgtttgataagcatcaccacaccgcgcgtattgatcccgcgcggacataccagacgacatttgccgcacagcatgcacttgttcatctcctcgtaagccccctggtattcgccgcgccgcaccagtgtatgtaccttgcggaagttgaattccgtaaggttgcccgccgtgcagaccgccgtgcaggcgccgcagccgatgcaggcctgcaactcgggcatctcgcgcaatatctcgtcgctcttgcgcaggttgttgcggtcgatgtcgatcgcccgcggcttggagatggtatatccgaaattgatcgctgccatatgctaaacccctacataccgggccgcagcatcggcggcggccgtcccttcgttcaggctctctccgatattcttcggcgccgtgaccgtcccggcatagaaaataccctcaacattgctcttcacgttgccgaggaacatgtcgcgcggcgccatgaagccgctcggcgcacggttcagcccggccccctcggcaaaagcggcgttgtcgtcgttggcacgcatgcccacgatcaggatcagcatgtcgacgctcatgcgcagcggacgtcccgtgagggtatcctcggccttgatctgtacgcgtccgtcgatcatcgggctcgcctccgaaatacgcccgcggatgaaatgaatgttgtatttctgctgtgcctcgcggtacatctcctcgtaaccggggccgaacatgcggatatccatgtaaaaattgaacacgtcggcctcgggaaacatctgccgcatctccatggcctgcttcacccccgtgatgcagcataccttcgagcaatgctgctggcaaaccttctcgtcgcgcgagcccacgcagtgcaggaaggcgatgcgcctggggcgcgagccgtcggctttcgccacgcggccctcgttgagcatccgctcaatgtcgaccgtcgtaaagacgttgtcgtagatgccgtagccgtattcctccttgatcgaggcatcgaaaagcgtgaagcccgagcagaccacgaccgaatcgcatgccagcatacgcccgtccgggagctgaaccccttcgcggctgaaccccctggcttcggtacgggtcatcacctcgatcccgcgctcggcaatgcggcggcgcagttcggtgagtatctccgacgccggggtgaacgacggaaacagcacatgccatccccggagcttgccgcccagttcggcctccttttcgatgattacgggctcgacgccctgttctgcgaggcgcagggccgtctgcatgcccgctacgccgccgcctatgactgcaactcgcttcattattctctgatgtcgtatattgtgtccgtcgggcagcaattgaccacagccgacgcgggtttaccgatatattttccgttgcggccgaggtatttggccgcggggtcgtattcgatgcccatcttgtcgagcaggggttcgacgtcgacctggtgcatctgcattccgagcacccacgggtcgtagcccagcaccagcccggccatctcctcgtaggtcagcaccggaatgccgtggccgttctcgccgtaggtcgtcccctccatctcggcgatcgcatactgccacttgtcgaggaacatcgcgcaccccgggcagttggccacgatgaaatcgggtttgtagggcgccatgctttcgagtttcttatgcgaattggcgatcgaataaccgcggttggcctgcaccaggtagttgcggaacccgaacccgcagcaatgccgccgctcggggtagtccacgcattcgccgccccacgactcgaccatgccggccagcacataggggaattccgaaccgccgatgcccgacttggggaatatcttggcgtagtgacaaccgatatgctccaccacgcgcagcggctctccggtctggacgtttaccagtttatgccttgcccgggcggcgatctgctcgcggaaatggaaaacgacatccgaggtatgcgccaggctcgcgggcttgcggaactcgcgccccgtggctttaaacaggttttcccgggctttttcctcggtctcggggaactcgtgccacgtggccagtatctccgaatagacaccgaacgaagtgatgcacgaggtcacgaaattctcatagcccgcctcggtcatcagcgcgaactgccgcgccacgaccgtcatgatggtttccaacggcacgatatccgaatggtagccgatacccgtacacgacgaatgcatgggatcgtccagcagatccttgcccaggtcgttgtgcagcatgtctatgaacaatttttcgctgcccgggaaaaaattctgccggatacagctgcggccgtaataatagttatcttcggcgatctgtttctggtattctttccagcttgcccgcttcatcatgatcaatagtgttcgttgttgttatgaaggaagacatccatcatgtattgctggtcggcgccctccccgtagcccagttcccgggccttgcggtcggaatgctcctcgatggagtcgaacatctccttgccgccgctgacttcgaagattttgttgatctcctcgagcgactgctcgtccagacggcgcagggcccccgcgccgtggcgcatgtatacgggcgtgaattgtccgtagacctccttgtcgttatcgtagatccactgccacacggttccctgctcggggtgcagctcgggcttcaccaaccgcggtacgatgcagtagcccgtgcggaggatattttcgccgatgatgcgcttgagggccagctgctggcgccccttctcgctctcgacgaagaaacccagcttctgcgacagtgtgcgcagcgcctgaatcacataccccggcgtattgccgcgcggacagcgcgggcggcacgacatgcactcgccgcaataccagatcgtatcgcttttcagcaactcctcgatggcatcgtcgtcgcgcgtctgcacgatattgacgatctgacggggatcgtagttgtagaactcggccgcggggcatacgcccgtgcagacaccgcagttcatgcacgagtgaaggccctccttcatccgtacgtcctccatcagcatatcgaaatattttcccataatctcacctttcaccgggcacgaaaccgtcccggatgcaacaaaaaaacctttgcagtgcaaaggtagggaatacgggcgagccgtgcagtggtataaatacctaatttcgccggcgctcgtaggtctcgaacgcgaaaggataagggtagttcgcacccgatgcgaaggattcggacgacaggagccgccactgcgcttcgtcccactcggggaaatgcgtgtcgccctcgtaagcgcggaacacgcgcgtcaggtagaagcggtcggccaggggcagggcctgcgcataaatctgcgcgccgccgatgacgaagacctcgtcgtccccggggaacagcgcgagggcctcgccgagcgaatgcgccaccgtgcaaccggcaatctccgcctgctgccgcgtaatgaccacattggtacggttcgggagcgggcgcccgagcgattcgtaggttttgcggcccatgatcacgggatgccccgtcgtgacggccttgaaatgtttcaggtcttcggaaatatgccagagcaacgtattcttatccccgatcacgccgttttcggcaacggcaacgatgatgctaaccataaatttcaaattttaacgtccggcggcatcgcagccgcgtataacaatgcaggtacagccggcaggggcttgcgaccgctcagaacgacatcggcgccttgatcgccggccagggatcgtagccttcgagcgtgaaatccccgtagcggaaatcgaagagcgatttcacatcggggttcagccgcatcacgggcagcggccgcggttcgcgcgacaactgctcgtcggcctgttccatgtggttcaggtagaggtgcgcgtcgccgagcgtatggacgaactcgccgggttcgaggccgcatacctgcgccgtcatcagcgtcagtagggcatacgacgcgatattgaacggcacgcccaggaacgtgtcggcgctgcgctggtacaactggcacgagagccttcccccggccacgtagaactggaacaacacgtggcaaggcggcaatgccatgtccccgatctcggcgacattccaggccgagacgatgatgcgccgcgactcgggattgtgccgtatcagttcgactgcctgcgcgatctggtcgatgaagcggccgtcgggcttgggccagctgcgccactgatagccgtacacatggttcaggtcgccgaaccgatacccttcgacgggcgattcgacaccgtcctgtgccgcacgcaggaacgtatcccggtcgacgggcagcacgccgtggcgcacgcagagttcgttgtagtagcggaaagcgtcgttgtcccagatatggacgccgttgtccacgaggtacttgatattggtatcgcccgccaggaaccacagcaattcgtggatcacgcctttcaggaatacttttttggtcgtcagcagcgggaagccttcggaaaggtcgaaacgcatctggtgtccgaagacgcctttggtgccggtgccggtacggtcgccgcggacgacgccctcggctttgatccgccgcagcaggtcgaggtattgtttcatctctccagcatttttaaagtcattccgcccgatgcgtccagcacggcgcacgaagggtatttctcccagcaccccaggtttatcacatgcaggctctgctcgcggtagtcgcgcgggaaatgcatgtgcccgaagacgaagtggtcgacgtcgtgctcggcggcataccggcgggcatattcgatcagcggctcggtaagcgagacgtcgagctcctcggcaccgtgcgatttgcgcgacttgccgctccaccagtgcccgaagcgcatcgccaggtcgggatgcagcagccacgaaaagagccagcgcaacgtccgcgagcggaataccgtattgaggaatttgagcacgggctgtccgtcgatgttcatgttgtcgccgtgggcgatgaagacgtttttaccgttcaggcggaattgctgcggcgaggtatggatctcgacgccgcattcgcgggcgaggtaatcgccgacccacatgtcgtggtttcccgtaaagaataccacccgaatgccccggtcggtcagttcggccagcttgccgagcgtccgcacgaagcccttgggcaccacgccccggtattcgaaccagaagtcgaagacgtcgcccaccaggaaaatcgcctccgcatcctgcgccgcatcgtcgagccagcgcacgaagcgccgttcggtctgctgcgcaaacgcctcgccgcctgcgcccaggtggatatccgatgcgaaatagtacatcaacgggtcagttcatcgagtttttgttcgaggctcttgccgtaaatatccttcccgacgatattcccctccttgtcgatcaggaaattggccgggagtttctgcacgttgtaaagtcccagcgacgacgatgcgcgcccgcgcaggtcgctcaccgaaacccagggaagctgctgctcctgcacggccgaaatccacaggggcttcgacgtgtcgatggcaacctggtagacctcgaatgcgaccggggcgtcggcatatttcttatagacctccttcagttcggcattgagcgtattgctgttgcccagctcggccgaccagaaatcgagcagcacgactttccccgcgagcgacgagaggcgtaccttcttgccgtagatgtccgacagctcgaggtcgggataccccgcctcggtaatctgggacgacaggctgatgcgggcgtccatgcgggcgatctcccccatgagcgattgcaggtagggcgattcgggataaatctgttcgatggcctcggccaccgtgcggtaataaaccacgtcgctgtcaccgttgaacaggtatgtatccccgggcaaccgctggtaaagggcatagaccgccgccagcgacgctttattctcgatgatgaagcgcaactgttcgcggcggatacggtaatattcggccgtgtactcctttaccagtgcctggcggtcttcctcggacagcgttgccttggcaaactgcgaggcgatgttacccagccgctgcgcgcccgaaacgaaagcctggtagaactgccgcagcagttccgactccttcgaaccttcgaccgtatagttgcgtacgacgctccccaccgaattcagggaaagtttctcgccgccggcgaggaacagcggaatgcgttcgccgttatatattatattataaagcgacggggtcttcgccacgcccttcaactcgaaacggtaattcccgtccttgtcgagcaccgcggagtcgatcaccgactgcgtcaggggcaatacctgctccagataaacatccttggcatcgttacctacgaagcgacccgaaatcttcaccttcgacgactggcatgcgcacagcatgacggccgtggtcagggacacgaaaagcgtttgtttattcatttatccttgttatcgcagttaaatgcttacaaatatagcaaaattccggatatgcgcactttttatttcgacgaattgcggtgtgcgccgttgtttttcgagaaattgcgcccgtgctgctggttgcggtttttctgcgggcgctgctgctgacgctgctgcggccccttctggggacgtgccgtaaagtgctgtttatagtcacttcggagattatttaatgccacttcatcgatttcgatcgctccgccggacatgcgtttgatgtcttttacgatcacttcgttgttgggatgctcctggttgtactcgtagctcttcgtgcgcatgtagcgggccaggttgtccaccgtgcgcgccatggtacgccggtctttttcctcggaaagcccggcgatcatccgctcgacatacttgccgtaatgcttataggagatacgcccctgcgtgtaagccatgcggcgcggcgtaatggtcagctcctgacgcgaaggctgcgggtatggagaatccacatcgagctggaaatcagacattatgaaaaggtgatcccacagcttgtgggtgaagtcggccgtatcgcgcaacagggggttcaggttgcccatcacggcgatcacggcacgcgcctggcggttgcgctcgcgacggtcttcgatcaattgcaacgagtcgatcatctcctggatatgacgcccatactcgggcaggtacaacttgcgtcgtgtgtaattataattctttttcatattgtatttgcggttctccgcactgtttcaatccgtccgccggagcgtccggcaagcccgttgcggtaaaccgattcaagacgttttttccgactttccaccccatccggcaagaccctacaagattggttttacaccgcagaaagtcataactttgggacaaaagtaggtaaaatttcaggaaaaacaagctatggcaaaggttttaattttagaccaatcaaaaagtatgcgaaacacgctgcgcgagcggctcgaatacgaaggtttctcgacagaggccgccgaagacgaagaggcggcctcgaacatgtgcgagaaaatcccgttcgacgtcatcctgtcggacaccgggtgcaaaatccccgacaagggcgtcccgttcatcgtgctgtcgtccgaggcgtcgatcgactcggccgtggaggccgtacgcaacggcgcccaggactatctgaccaaacccatcgacatgaaccgcctgctgcagtccatccaccgcacgatcgacgacccggcccccgtgcccgcccccgcggcggccccggcacgccgcacccgccgcgggcacaatgcgcagacggagcatatcatcggcacctcgccccagatcgaacatgtccgcctgttgatcgacaaggtcgcgccgtgcgaagcgcgcgtgctgatcacgggcgaaaacggcaccggcaaagagctggtcgcacgctggctgcacgccaaaagcaaccgcgccgcggctccgttcgtcgaggtcaactgcgcggcgatcccctcggaactgatcgagagcgaactcttcggccacgaacgcggcgccttcacctcggccatcaagcagcgaaggggcaagttcgaacaggccgacggcggcacgctgttcatggacgagatcggcgacatgtcgctggcggcgcaggccaaggtgttgcgggcgcttcaggaaaacaggatcagccgcgtaggcagcgacaaggacatcgaggtcaacgtacgcgtaatcgccgccacgaacaagaacctgcgcgaagagatccggaagggtaatttccgcgaagacctctaccaccgcatcggagtggtcgtcgtgcgcgtcccggcgctgcgcgaacatgcgcaggacatcccgctgctggtcgaccatttcatacacacaatttgtgccgaataccacatcccggcaaaacgcattgaagaagaagcgcttagcgaactgcaaacgatgccctggagcggcaatatccgcgaactgcgcaacgtcatcgagcggctcatcatactcagcgaggagcgcatcacccccgccgacgtcaaggcctactgctgaccgaggctcagaacagcaccccgaccttcagcaggagggtgccgtggttgagctgctcggcaaattcggcggagaaccagcagccttcgtatttccggagccgctccagccgctgcaactcatagcccgccgcgaagaacaggtgcaccccgcagcgcaatgcatactgcacccccagttcgggattgagcagcagtcccccgttggcatccctgcgcggtgcgaaagcatatccggcggcgcacccggcatagggcgtaaagctgcggcggcgcataagcaggaacttcgcatcggcaaagagcggcacgagcgttttttcatagcaggaaacccccgttccggcaccgaccgaaaaacggcggctcacattgtaatgacccgtcacgcgccagacgacgggcaccgacgacgggcgggtcaggccgaagcccgtccctacggacgccgaacaggaaaagcggggcaactcctgcgccggcacctcggcggcaaggaaaggcagcacgcacagcgccgcggccaatactcgggatcgccccgtcatcggacacggatcgtaatgcgttccacgatccggagcgctgaagtgagccccgaaatatcggggtctatcccgcccaaacttccgtcgggactgctgtggccgaccagcacggcttcgaactcctcgctgcccgacgacaggtcgacgtcggcggcatagaccacggccggctggccgctcccgtgccgcccgcccgagtaaccgggctccccctccttggccgattcgggataggtttcgttgaaatcggtcgaatggttcacctcgacctttacgacgaaccgatcgagccccgcctcgggcgagagcttcaggtcgaaactgccgcgcggcgtggcacccgatatgccgtccgccagcggttcgcttttcgtcggcaggtaaagcccgtcggcatattgcacaccccggctatggcaccagtgaggcagcgcctccctgcggcggtttccgcccgccgccagccaggactgggtggcgattttggaactcgcataaaccgtggagaggtagcgcccctgcgcatcttcgatccagaccgcgatctggggcgggttcttccttttaatccccaggaacaggggaaaatcatgcagccatgcgtcgccccgttccacgacaatttccacgcttcccttttcgtattcgaccaactccttatcgcaggaaccaagcaatacgaacggtaaaatccatgccattgccatctttctcattgtttttggtttccattttgttacctattggtaacatttattgtaaaaaaaatacacactctttcccgggccgcgggccggtcattccttaaaagtcttgtcgatcagcaggtctatcccgaggacgatctgctcccagccggcagcctctccgatcggaatcccgttgtaaaccgggcaatattcctccagcaacacgaggtaggtcaccgaagccgtcaggaaagtagccagcacggccacctccgactcgggcagcccggttttccgcgacacccgggcgatcaactccagcccggcctgctcgcgctgcctgcggagcgccgccacgagttcgttcttcgaggacaactcccagcggtacaggcgcctaagcgtagggtcgccgtgcaaacgcccgatcatcgtgcggaacgtctttttcagaaattcgggcaaatgcgcgcggccgggaatgtcgagcggaaaattgatccagaaatcgtgctgccggatataggcggccagcagtccgtccagcgaaccgaaatagcggtagataagtattttcgagactccgcaatgcgccgcgacggcattgaccccgagtttctcgaaaccatccctgcggatcatctcgcccaccgctttcagcatacgctgttcggtagcatcccggtcacgctcggtattgttgttcttcgccatatgttactattcgggaacaaatatatgtcttttttcccggaatcatgcaactttccgggaatattcacatattcggcataaattgagaagaatccgcaaaaggatccggactgccggacaaccgcggcacccggactataacaactccaatatcttggccggattgtcgacgatgtgccgcgccccggcctcctcgagctcggtgcgctcacggaacccccacgtcaccccgaccgagcggacaccggcgaccgcggctgtctgcatgtccacgcccgagtcgccgacatagagcacccgctccttcgccacgcccgtaagcgcaagtatctcccccaccaccgcggggtcgggcttgagcggcacgccctcgcgctggccgaagaccgcggcgaattcgacaccggggaaaaacaaccggatcagtttttccgttccggcctggaacttgttggatgccacggcgatacgaacacctcgccgcgcgatctccgcaaccagctccggaattccttcgtagggtttcgtataaacgtcgatatgctcggtataatatttcacgaaatccgcgcgcacggccgcgaccgtataaggcgtgcggagctcttcgggcaacgcccgctccacgagccgcatgatgccgttgcccacgaaatggcagtattcgtcataggtatgctgcggcaggccgcgcatggccagcacggcattgcatgcgacagccaggtcgccgatcgtattgagcagcgtgccgtcgaggtcgaatatcacaagtccggtatccatcttatgtcccataatttaatgcggatgcgccgcagtgcctgcggctcttttaatcttccacccgatagccgccaccatcagcgacatcaggggactgacaatattgaaaatacagtaaggcatgtagacgaatgtggaaacacccagcacggtggcctgcgtcatgccgcacgagttccacggcaccagcacggagcagaccgtggccgaatcctcgaccgagcggctcaacagccgcggttcgagtccccgctccgcataaagttcccggaaaaggcgccccgaaaggatgatcgagatatactggtcggcggtgcagaggttgaagaagatgcccgcgccgacggtcgaagccacggccgagaaggcacggcgcacgaaacgcaggaaaaccgacgtcagcgaccccagcatcccgctgccggtcatcacgccgccaaagcacatggcgcagatgatgagccatacggtattgagcatgcctgccatgccgcgcgtcgcaaccagctcgtccagctgcgggcttccggtagggatcgccgtcgggccgaagcagctcatcagcacacccttgaaccccgacatgaaatccagccctccgactccggccaccttcgccaccagttcgggctgcgccagcagcatggctatgcaggcgaaaaccgcggcgcagaagagcgtcacgatggccgggagtttgcgcacgatcagcacgcccgtcgccacgggcaccgccagcaaccagggcgtgatgcggaacgtcccgcgcaacgactcggcatacatcccggcatgcgtgccgcccgtatggtcgagcgtcagccccgcgatgacgaaaaccgccagcgcgatgacgaacgaagggatggtcgtatacaacatgtaacggatgtgcgtgaaaatcggcaccccgacggtcgaagaggcaagcaccgtggtatcggacaggaacgagagcttgtcgccgaaataagcgccggagatgatcgcccccgcgatccacccctcggggaaacccatggcctgcccgatgcccatcagcgccacgccgatcgtggcgatcgtcgtccacgaactgccggtcatcagcgacacgcccgcgcagatgacgcacgaggcaaccaggaagaacgaggggtgcaggatcttcagcccgtaatagatcatcgtcggcaccacgccgctcaccatccacgacccggctatggcgccgatcagcagcaggatgatgattgccgaagccgaagcccggatgttgtcgatgatcgcctcttccaagaccgcccacttgcagcggtaaatgccgatggccagcatgacgcagaccgacgtggccgacaacagtgcgatctggctgccgccgttgatcgcgtccccgccgaaacagcggatgaccacgtaaagcagcagcgtcagcaccgccagcggcaacaccgacacccacggcgaaggctgtttggccgcatattctttcatttccggattcccattaaccatacggacggcaaaaatacgaaaaacttaccacatatccgcacgcccggcaccgggggtaaccatttccgaccggaagatatgcgcgtgcaacttttccgggcgcattgttttttatttccgaaattttatctatttttggtaaaagatagcgacggatatggcggcacaaacaatcaaaaagatcttccggttctacctcgacgggttccggagcatgaccgtaggcaaaaccctgtgggccatcatcctggtcaagctgttcatcctgttcgcaatcctcaaggtattcttttttcccgatttcctggccgggcagagccccgaagagcgcagccgttcggtcatgaaagaactaacccccgacaaataacttacgcttatgctatcggattatctacaaacagtcgactggtcgcgtgcgcaattcgccatgacggccatttaccactggcttttcgtcccgctcacgctggggctggggttcatcatcgccatcatggagaccctttacgtccgcacgggtgatgagttctggaagcgcacgaccaaattctggatgcgcctgttcggcatcaacttcgccatcggcgtggcaacgggcatcatcctcgaattcgagttcggcaccaactggtcgaactactcgcatttcgtgggcgacatcttcggtgccccgctggccgtcgagggcatcatggccttcttcatggagagcaccttcatcgccatcatgttcttcggctggaacaaggtctcgaaaggcttccacctcacggcgacatggctcacggccatcggcgcaaacctctcggcactgtggatcctggtcgccaacgcctggatgcagcaccccgtgggatgtacgttcaacctcgaaaccgtacgcaacgaaatgacctcgttctgggaggtactcttctcgcccgtggcgatgaacaagttcttccacaccatcacctcgtcgttcgtgctggcggcactgttcgtcgtgggcgtcagcgcctggtacctgctccggcaccgcgaacagaagatggcccgcaagagcatcgccatcgcctcggccttcggcttcgtattcgcgctcgtcacggcgatgacgggcgataagtcgggcgccgtcatcgcccgcgtgcagccgatgaaactcgcggccatggaggcgctctacgacggacagcagggtgcacccctgacggccatcggcatcgtgaggccggaggcggaacgcacctcgaacgaggacgcattctatttcaagatcgacatcccgaagctgctctcgatcatgagtttccgcgacgccgacgcctatgtggcgggcatcaacgacctggtgaacggcaacgagaaatacggcgtgatgtcggccgcggagaagatggagcggggccgcgtcgccgtgggtgaactggcccgttaccgggcggcactcgaggccggcgaccaggcggtgatcgaccaaatcaccgccaagttcgacccctcgaagcccgaaggcgaggagttcctgcgtgaatatttcgcctatttcgggtacggctacctcgacaccccgcagcagatcgtccccaacgtaccgctgctcttctactcgttccgtgtgatggtcggtgccgggtgcttcttcatcctgctgctgggcgtcatctggtggctcaaccgcaaggataaactggcggacaagcgctggctgctgcgggtcgccgtatggtcgatcccgctggcctacctcgcttcgcaggccggctgggtgctggccgaggtcggacgccagccgtgggccatccaggatctgatgcccgtgggcatcgcggcctcgaagatcggccccgggtcggtatcggccaccttcttcatcttcctcgcgctcttcacggcgttgctgatcgccgagctgagcatcatgttccgccagatcaaaatcgggcccgaaaacgaaaaacagtaaacgactatggataccctaacactcttgcaacactattggtggctgattatctccctgctgggggcactgctcgtattcctgctcttcgtacagggtgggcaggggctgctctacgacatcggcaagaccgaagaggaacgtaacatgctggtcaactcgctgggccgcaaatgggaattcaccttcacgacgctcgtaaccttcggcggcgcattcttcgcctcgttcccgctgttctactccacgtcgttcggcggtgcgttctatgtatggatggcgatcctgctggttttcgtcatccaggccgtggcctacgaataccgccgcaaaccgggcaacgtcttcggcgaaaagacattcaacgtattcctgatgatcaacggcatcgccggcccgctgctgctgggcacggccgtcggaacacttttcacgggcgcgaactttacggtcgaccgcctcaacctggccaacggcgccggaagcggcagcgcaacggtgatctcgcagtggacaaccccgtggcacgggttagaagcacttacggatgtctcgaacgtctttttgggcattgccgtgacattcctcgccgcaacgctggcctgccagtatttcatgaataacatcgatgacaagaccatcctcgaacgtacccgccggcggatgatccccgcagccgtctgtttcgtgttcttcttcgtagcatggctctgcatgctgctcttcgccgacggccgggcgatcgatgccgcaggccggatctccatcgagccgtacaagtacctgcataacttcatcgagatgccttacctcgccgtggtgctgctcctcggcgtggtggcggtactgtggagcattggactgggctggcgcggccggcgcaacgccatctggttcggcggtgcgggtacggtactgacggtactggcgctgctgctctgcgccggatggaacgacacggcctattacccgtcgctggccgacatgcagtcgtcgctgacgatttacaactcctcgtcgagcctcttcacgctcaaggtgatgtcgatcgtctcgctactgatccccttcgtcgcagcctacatctggtacgcatggcgggcgatgaaccgcaagccgatcacccgcgaagagatccgcggggacgaccaccaatactaataccgactgcctccgaccgtatgaaatatagtataatattactcccgcttgtattctgcagttgcggttcccgtccgggaaaagcaactgcagaactgcaggccacgccctcggcagcccaaagtccgcaaccggcagacctgccccgtctcggtagaagatacggttcgccgccagctcggcggcaaactgttcttctccgaattttccaacttcaacccggccgactcgataaccgttatcgaaactcattaccgcaaggcggaaggaaaggaactctaccgcgaataccggtttatcacccacaaccggaacagtcccgcccacaggttcttcgagagccgttacctcgattctgtctacatgtcttatttaaacgacccaagctatcgcgatttttatgaccagatgctgcccgactctgtaaaatctgaatacatcgccccggaaatccggaatttcaacggctattaggtcaatctgaaggaatacaagggtgattattacctcgatgacgactggtcatggcccatttcgttccacattgctgacagcgtcaaaacagatctctatatggacgggccctatccccggaaaatcaggacggcaacaatgcttccccagggcggcatattgctccgctaccacaggccgattcgctgcactcctacaagtacgactcgctgcatatcgaggccgtcgacatccaaagaggcgtctaccggctttcgggcgaaagcgactatttcgcggctccggcgcaagccgtacacaaattcgagatcatccagtacgccaacagcacgggagatatattttaaaccggcacgaacaatgatttcccacatattgataaaagggaaagctttttcaggctttcccttttattcaagcatctccgccagctattccgcgttctcgccgaacgggtactggttctggtgcacgtcctcgaaacgcatccccttttcgtaggtcttcatggcgcggcggctcatacccatcgacgcgaaaccgccgtcatggtagaggttctgcatcgtcactttgcgcgtaagatccgagaaaagcgtcagcacatagtccgcgcagtcggtagccgaggcattgcccagcggcgacatgttctcggcgaaattcatcaggtcgcccatccccagcacgccacttccggccgtggtcggcgtcggcgactgcgacacggtgttgatgcgcacgtgcttctcacggccgtagatatacccgaaactgcgggcgatcgactccagcaacgccttggcatcggccatgtcgttataaccgtagagcgtacgctgtgccgcgatatacgagagcgccacgatcgacccccagtcgttgatggcgtccttcttgcgggccacctggatcgccttgtggaacgagatcgccgaaatgtcgagcgtcttggagaggtaatcgtaatccaggtcgtcgtatgtgcgccccttgcggacgttgggcgacatgccgatcgagtggagcatgaagtcgaacttgcccccgaaatgttccatcgtcttgtcgattaggttttccaggtcttcgacgctcgtagcgtcggccgggacgacgatcgtattgcatttttcagccagccggccgattgtacccatgcgaatagatacggcagtattcgtaaggacgatttcggccccttcttcaacggcgcgttccgccactttccatgcgatcgactgctcgttgagtgctccgaaaataaggcccttcttgcctttcaataaattgtatgccatcctatttagattaaaaattcgggcaaatataacaaaaatatttgaaacgggcgaaccgccgtccctgcaaaccgcggcaaacggcatgtccccgaaccaaaacacgggttgtaaatcacggttttttcacgttttacacatttttcggctttttatcgtacctttgtgccgaataaaacatgcacatgaccattacagacgatttcagcgccctggggctttccgagcagatgctcgccgcagtccgcgccaagggattcgagacgcccaccgcaatccagaagctcaccatcccccacctgctcacaaaacccaacgacatcatcgcgcaatcgcagaccggcacgggcaaaaccgcggcctacggactgccgatactccagaccctcgaacccgcccgcgggccgatacaggccatcatcctcgtaccgacacgcgaactcgcactccaggcggccgaagaactgctctcctacaaccgcgaaaaacggctctcgatcacggccatctacggcggtgcggcgatgagcgaacagctgcggcgccttaccaaaggcatcgacatcgtcgtcgggacaccggggcgcgtgctcgaccacatccgccgcggcacgatgaaactggaaaacgtccgttacctcgtgctcgacgaagccgacgagatgctcaacatgggcttcgtcgaggacgtcgaagagatcatgagccacaccagcgacgagcggcgcgtgctgctcttctcggcgacgatgcccgagcgcatcatccggctttcgaaaacctacatgcgcgacacggagatcgtgcgcgtggaacacaagcagatcacggccgacctcacggaacaaatctatttcgaggtacgcgaggccgacaagttcgacgccctgacccgcatcatcgacgtcgaacccgaattctacggcatcatcttcgcccgcaccaagatcggcgccgacgaaaccgcctcgcgcctgacggcgcgcggctacgcagccgaggtgctgcacggcgacgtgtcgcaggcacagcgcgagaagatactccgcaagttccgcgaccgcacgatcaatatcctggtggctaccgacgtggccgcccggggcatcgacgtgggcaacctgacccacgtcatcaactactcgctgccgcaggactcggagagctacgtgcaccgcatcggccgcacgggccgcgccggcaagcagggaacggccatcacgttcgtctcgccctcggagttccgcggcctgaataacctgatgcgcgacatcaaggtcgagatcaaacgcgaaaccctcccctcgccgcaggacatcgtagagatgaaacggctgaagatcaaggaggagatgcaggagatcgtcgaaaacgaaagctacgacggttacaaggaattcgccgaagagctgctcgccgaatatacccccgacgtagcccttggtgcgctgctgcgcctggcgttccgcagcgagctcgaccagaacaactaccccgaaatacgctccttctcggtcgaccgcaaggggacagcacggctgttcctggccgtgggcaaacgcgacggctacacggcacgcaagctggtcgacatgctcaaattcaaatgcggcctgcgcgacaaatatatcaacgacgtccagatttcggacaacttctcgttcgtgagcgtcccgttccgcgatgccgaggaggtcgtccgcaaactcaaccggctgaaccgcggccgccggccgatggccgagatcgcccgcgacggggaaaacggggcgcaggaagccccggttcgcaagccccgccgcacaaaaaccgaggattaccaggccgccgggcagacatacgccccggcaccgaaaaagccgacgcggaacgtgaagccggcaacgcccgtcccggcaaccccgacggcgtacgccccggcgcccgcccacgacgaaacggtacacgcagaaccctcacacgaccaaacggcatatgacccaacgtcatcgccgcgccggaagctgaaaaccaagccccaaccccacccagacatccccgatttcagcaagatgtcgaacgaaggtttcgactggtcggcatttatgaaattcgacgaaggcacggcatggggacgcgacgagaatggcaaaggcaagggcaaagcgaccaaaagcgtacgcaagaccccgaaaaagacagtcacagccgcccagcgggttgccgccaaaggcaagaaacggaaatagtaaacaatagaattgaaataatcgcaataaaaaagacccggttttgggtctttttttattctcaatcatttttaaaccaaataatgcctatcccaccgtacttactgtttttacctttgtaggttggttttcttgtatacttttctgatcaattgcttttttagcaaccttaatatcgaagagctttgtattatatccaataaagatcctatcttgaataagatcacattgatcttttgataaattagtttttttcagaaattcgttcctgatacggttttctcgcctgattctcaaattttctcgattggccggaaaatcactatcacgtgaaaaaatcaacaatcgacaatatgtattatttatcatatactgcccgattgtcctccaccaacatctatcggtatccccaagggaaagaccaaataaacaaatccatgttgcatcctctatggacgcttgacagtccctgtctattaaatgccttaattctttattgaattcgggttttacaagcgatgttacaatatcctgatccgactttaatgtctcattgtttatttgagatacatcattaaccccaagtgccattcgttcagaaatatatccatgtatatgcgatattcttgggattgaaaatttttttccatctaatacacattcaatattacgatacgtatttatcttacctaaaaacttctctaaagattctgtgtaattaaaagaaattattgaaacatttgtataggatgaatctctcaattttgacagtttcgcataatccgctcttggtaaatacctttctggatacattaaacttttaaaaagtttctgccgttcgctttcaggataatcgtatttttgttcctcttgacgcaaatactcagataacgaatccttaatatcatcgtagataacatcgaattcatctactgtttttaggcactcgatatattggcctaatttggtttctaaatcagcccaagtttctatatcattctgtatttttccttttaaagattcgattaaatcgcattttgaaggtaaattcacataatatttataaaaatctttatatctcgttgccatcccaatattgatgtcaaaaccgtttccaattagaaaagtgatagtcatatcaaacttgatagtattcgacttagttattttcgttataacaaaaatacaaagtttttcttatgttataccataacataaaatatttcctatctttgcccctgcgaacataatttatatacaaaccttgtaaactggtttctggacggaacctcatgctaaaagtatgtgcagagccgttggggctaattacccgcgaatggcaccgtcctgaacccacaaggtgatagattgtgttcgcagctgcacacatttttatttatgcgaacacagtctatcgtcagcgtcccgacgcagaccagccgcaaggccagccgcaggcggtttccgccctgcaacctcccgatccggttccatttccatccacccgattagcaaacaactgctaaccaaacctttattctctttgttgtgctccgttgcacgataaggacagccttttttatgcacgtcgtatccgctgccacaggcagcggcaggccgaagcctccccctgcggaggtctgcaaacacgctgcgcatgttttcaaaccccgcaggcttcgtctgcaatcttaaaatcaaacaaaaatggaaacgaatcaaaaccccgcgcaggaacagcctgtgcaacccatagtcccccaaaccacgcaggccgcgcaacagccggacatcgaacaggttatcgctcctgccatggaaccggcacagcccgccgcacaatctgccgcacaacccgccccggcaccacaaccgcaaccgcaacccggacgacccgacgaactgctctacgaccccgatgaaacggcgcagatgctccgccacctgacggacggttatttcgacccggaatacgtcctgcttttcggaaagctggccggcggcacgccccacagcgatgccgtggcctacgacctgctgatggtcgtgcgcgaaacgcccgaatacgactggattcgggcaaaacgcatcctgcggtacaggatgccgtaccgctaccggaaggtcacctacatcaatccctatatcctgcctttgaactatgtcgaatcgcatcggacgccgttcctctactttgcccatgccgagggtgaactattgcattgcagcgaccactatcggtttcgccgcccgaagcacccgattgactttgccaaagcctatgccgacgccaaattccatttcgacacgttccgcacgctcggcaacgacctgctcgaacaggcgcagaatgcgtttgccgggggccgcaacgtgcggctggcggcacagttctcggcgcaggcgatcgtctatttctaccacacgctctactatgtctatcacggtatggaattcgacatccatgatccggtcgtgatgcacgaccggatgcggacgctttcgacaaagctgatgctggtattcgacgacaaccatatcgaaaacattttcacgctgccatggctgaaacaaattttgatgaaaacgccgtatagcgccgaattctacatggctccgcaggaattggaaatgcacatggggcgtgttcaaaaggctgccgaaataatcgaaaactactgcggcctgcggctggaactctataaagaactgggcacgcaataggccaccccgacacctgaataagacaagaggggctgatagcccctcttgctgtcgattcttcatacattcggcggaaagagagggattcgaacccccggagccttgcagctcaacggttttcaagaccgccgcaatcgaccactctgccatctttccggggacaaaagtagcacggtttttccattctgccaaatcttcaccccgattattttccgcccgggcgaagccggacttcaaattaaggacattatttttgacttttaggaaaattccatatctttgtcaacaagttaggtaaggtcgcaacttttcacacattatagaacatgaacaaatcgcagctggtcgaggcggtagccctcgacgctaacatctcgaaagtcgacgcgcgcaaagcggtcgatgccatcatccgagtgaccgtacacagtctccggcagggtgagcgccttaccctcaccgggctcgggacattcagcgtgcagcagaaatccgcacgtatgggccgcaatccgcgcacgggcgccccggtgaaaatccccccgcgcaaggccatcaagttccgccccacggcagaggtcgagtaatttccactgcgttttttaacttttttcacacatgccagaaatctcacaacgcgccgagctgatgccggcttcacccatacgcaagctcgtcccgctggccgaagccgcccgggcacgcggcaccaagatctaccacctgaacatcggccagcccgacctgccgtcgccgcagaccgggctcgacgccctgaaaaagatcgaccgtacggtgctcgaatacagccccagcgacgggtaccgctcgctgcgcgagaaactggtaggttactacgaacagttccagatcaagctctcgcccgacgacatcatcgtcacgacgggcggttccgaggccgtgttgttcgccttcatgtcgtgcctcaaccccggcgacgagatcatcgtccccgagccggcctacgccaattacatggccttcgccatctccgcaggggccgtgatacgccccgtggtatcgtcgatcgagcagggattcgcactgcccgacgtcgcggaattcgaaaagctcatcaacgaccgcacgcgcggtatcctgatctgcaatcccaacaaccccacggggtacctttacacacgcaaggagatgaaccgcatccgcgacctggtcaaaaaatacgacctgttcctcttctccgacgaggtctaccgcgaattcatctacaccgggtcgccctacatatcggcctgccatctcgaaggcatcgagcaaaacgtggtgctgatcgactcggtgtcgaaacgctactcggaatgcggaatccgtatcggggcgctcatcaccaagaaccggacgctgcgtaacgccgtgatgaaattctgccaggcgcgcctctcgcccccgctgatcggacagatcgtcgccgaggcttcgatcgacgcgccgcgatcgtacagcaccgaagtctacgaggagtatatcgaacgacgcaaatgcctgatcgacgggctgaaccgcctaccgggcgtatactcgccgatcccgatgggtgccttctataccgtggcacggctgccggtagaggacagcgacgatttctgcgcatggtgtctctccgacttcgactacgaaggcgaaaccgtaatgctcgcccccgcatcgggcttctactccgatccggcgtgcggccgcaacgaagtccgcatcgcctacgtactcaagaaggaagacctcgaacgggcgttggtcgtactgggcaaggcgctcgaggcatataacaaccggaaatagcccgaccggcaatctcggacacgcagtgcggcacggataatgccgcacttttttttggaagccggagagtccggccccacccggcgtttcggccaatcctataccatataggtcaattttcaggaattttagaccaaaaaatttgggcagcagagatagttttcctacttttgccctcgatttttacacgccgcaacaggcgtatagtacaaaccaaaccaatacgttatgaaaaaacttttccttcttctggccaccgctgccgtcacttcgggagcatacgccgaaggatatcaagtgaacaacctctcttcgaagcagaacggtatgggacacgtgggtacggccatgaagcttaactccgagtcgatctggttcaaccccgccgccgcctcgtttcaggacacccgattcgacatctcggtcggcatcaccggcatcgcttcgaaggccacctatacatcgctccccgactatacgggcaagaccaagccgcagcactacacctcggacaacagcatagcgaccccgctctacgcctatttcaactacaaacccctcgactggatgtcggtcggcctggctttcaatacgccgttcggctcctcgatggactggggcaacaactggccgggggcgcaactcgtccagtcgatcaacctcaaggcctacaatatccagcctaccgtctcgttcaaactctgcgagcacctctccatcggcggcggtctgatgatgacctggggcaagttcgacctttcgcgctcgctgctgcccatcggtgccgacaatccgcagaacaaagcgctcatgggtgcgttgcaaatgctcaacccgcaaatgcccgacctcttcgaaatggccggggacaaaaacctgatatcgctggggctcgaaggcaaagccaaaatggccgtcggagtaaacctcggtgtgatgtgggacatcaacgaacagtggtcactgggctttacctaccgttcgaaactcaaaatgaaggtggattcgggttcgatcgacctgcgtatgatcgacaatacccaaatcgcccaggtcatcggacagctcctgccccagctgggtctcgaccccgccaagctcacgtcggccgtcgtgaagaccgagctgcccctgccggcatcgctgacgtggggtgtcagcttccgtcccgtcccgaagtgggagttcgccgtcgacctgcaatatgtgctctggagtgcctacgacaaactcgacgtcaagattctcgaacccggcagcaacacccccgtactgaacatcccggtcagcgataaaaaatactccaacacgctggcgttccgtttcggcggccagtaccacgcactcgactggctgaccgcccgtatgggtatgtacgtggatgaaagccccgtgcgcagcgactatctcaatcccgagacgccctcgatgaccaagctcgcctatacggccggcgtcaccttccgcccgatcaaatggatgaatatcgacatcgcatacggctatgtcaattcggccgatcccgaacgtacgggctcctatccctacaccaattcggtactgggcatcgtgaacgaaaaactggcggcagcaggcgttcccgaaagccagctcaccaatccggtcaccgatttttcgggtaattacaccgcccgggcccacacattttcgatcggcgtagggttcagtttctaaaaccgggaaaaattattatatttgcggtgcgctttgcagaaaagtgcgccgcaatttttatccggcctcatagttcaagggatagaacgagggtttcctaaaccctaaattcgcgttcgagtcgcggtgaggctacgaaaagggaaaggttccggccttttccttttttcgttccgcccgggcgggagcggtttaaatctcctgccggaaaagggaacatccgacaatttacattatctttgccgcacatataaagccagtttatggagtcactcaaagaattatataagatcggcaacggcccgtcgagcagccacacgatggggccaaaaaaggctgccgaacgttttgccgaacgtagtcgcgacgtcgattcataccgtgtgacactctacggatcgcttgccgccacgggcaagggacacctcaccgacgtggcgatcctttcggtgctggagcccatcgccccgacccagatcgtctgggagccgaaggtcgtgctgcccttccatcccaacggcatgttgttcgaggggctgaaagccggcaaggttgtcgacagttggacgatatacagcatcggcgggggtgccctggcgaacgagagttcgcgcctggagatacccgccagcatctatccgctgacgacgatctcggagatcaaggactggtgctaccgcgaaggaaaaacctattgggaatatgtcaacgactgcgaaggccccgaaatatgggattacctcgaccggatatggacggtgatgtgcgaaacgatccagcgcggcctgaacaacgacggcgtactgccgggagggctcaaggtcgcccgcaaggcgagcacctactgggtcaagtcgaagagctacaccgactcgctgaaatcccgcgcccaaatctacgcctacgccctggcgacctccgaagagaatgcatccggcggcatcgtcgtaaccgcccccacatgcgggtcgtgcggcgtggttccggcagtgctctaccacctggccaattcgcgcgatttcctgcgcatccggatcctgcgcgccctggctacggcgggactgttcggcaacgtggccaaaaccaacgcttcgatctccggcgccgaggtcggctgccagggcgaggtcggcgtggcatgtgccatggccgccgccgcggcatgccagcttttcggcggcaccccttcgcagatcgaatacgccgcggagatggggctcgaacaccacctggggctcacctgcgaccccgtatgcggattggtgcaggtgccctgcatcgaacgcaatgcgattgcggcagcccgggctttcgatgccaacgcctacgccacgctctccgacggctcgcacatggtgagcttcgaccgggtcgtggaggtgatgaacgaaaccgggcataacctcccgagcctctaccgggaaacctccgaagggggtctcgccaggcgctataacggcaagaaataatccggacaggattcttacggcggggaaccgtgtttttttgtgctccgggatttttcgcaattcggaacagggaatcttccaaaactcagaccgataagcatccggatagcgaatgacctccgaccgctcgtgttcatgccctttgaacggctgcacggctgtctttcgcacagtcgccctgcgctccgtccagtcgccgcgtgcgccggaatccgcatattcatagctttagctccgctccgtagcaccatcgtaattgtgagctgtctcccggcgtgccacaagccgtcccccggaatcgtagacacaggcggcttctactccgggttcccgtagaaccgcatcggttcgagccaaccgtccggcggcatcgtctaaaaattcggtcgaccgccccacctgccgcatcaccctcgtattcgagttcctgcgcggcgatccggcctgcggcaccataagtcagcgatgccggcctccctgcctgtgcatcccctccatacagaaacaccgtatccgtccgataaaagtacggttggcaatgccgccgggagtgccgccgggagtgcgaactatttcgactccagctaaccatcgggacagtccggttgaagataatcaggaatccggacaaaataaaaagaagccgttccctggggaacggcttctttcgaatcgtatatgcagcctcggatttactgcgcctgctggagcgattccagctcggctttcgaaccgaccacaaggttgtcgtaatcgcgcaggcccgtaccgccggggatcaggtgaccgcagatgacattttccttgaggttttccagcggatcgaccttggcctggatcgcagcctcgttgagcaccttggtggtctcctggaacgaagccgccgagatgaagctcgaggtctgcaacgcggcgcgggtaataccctgcaacacctgcgtcgaagtagcgggcacaatgtcgcgcacctgcacgggtttctggtcacggcgcttgaggctcgaattctcgtcgcgcagcttacgcagcgaaacgatctgcccgggctggagcgacgtcgaatcgcccgcatcggtgacgaccaccttgtcgtagagttcgtcgttcacatccatgaactcccacttgtcgacgacctggtcttcgaagaaccgggtatcgcccggatcctcgatcttcaccttgttcatcatctggcggacgatgacctcgaagtgcttgtcgttgatcttcacaccctgcatgcggtatacctcctgcacctcgttgacgatgtactcctgcaccttcgtcgggccgaggatattgaggatgtcgctcggggtgatcgcaccgtcggacagcgggctgccggccttcacgtagtcgttctcctgcacgatgatctgacgtgacaggggcacgaggtaacgcttcacgtcaccctgcttcgaggtgatgataatctcgcggttaccgcgcttgatcttgccgaacgatacctcgccgtcgatttccgacacgatcgccgggttcgacggattacgggcttcgaacagctcggtcacacgcggcagaccaccggtgatgtcaccgcccgacttgccgacggcacgcggaatcttgatcaggatatcgccggccttgatcctggcgttgtccttcacgacgacgtgcgccgaaacgggcaggttgtattgcttgacctcctcgccctccttgtttacgatcttgatgacggggttcttggtcttgtccttcgactcgatgaccaccttctccgaaaggccggtctgttcgtcacgctcctcacggtaggtaataccctcgacgacgctgtcgtaaacggccttaccttcgtattcggagatgataacggcattgtacggatcccattcgcagatcaggtcgcccttcttgacctcggcaccgtccgccatgaaaagcgtcgcgccgtagggcaggttgtgcgtatagagtacgatctcggtcttcgggtcaacgatgcggaattccgactggcgcgaaatgacgatgttgatcgcctcgccggcggcattcttgcccttcacggtacgcagctcgtcgatctccagacggccttcgtatttcgaaacgacattggtctcgaccgccgagccaccggccacaccaccgacgtggaacgtacggagggtaagctgcgtacccggctcgccgatcgactgcgccgcgatgacacccacgacttcgcccttctgcaccatgcgtgcggtagccaggttgcgaccgtagcacttcgcgcatacgccccggcgtgcctcgcaggtcagcaccgagcggatctccaccgattcgagcggcgatttctcgatcgcctcggcaatcgcctcggtgatctcctcgcctgccttgcagatgacctcgcccgtcagcggatggatcacgtcgttcagggcgacacggcccagaatacgatcgtagagggtctgcacgacgtcgtcgttgcgcttgatggccgtagcagtcaagccgcggagcgtaccacagtcctcctcgttgatgatcacgtcctgtgcgacgtcaaccagacggcgcgtcagataaccggcgtcggccgtcttcagtgcggtatcggcaagacccttacgggcaccgtgcgtcgagatgaaatactcgagcaccgaaagcccctccttgaagttcgagaggatcgggttctcgatgacctgctggccaccctcgacacccgacttctgcggcttggccataaggccacgcataccgctcagctgacggatctgctccttcgaaccgcgggcgcccgagtcaagcatcatgtataccgggttgaaaccgtcgtcgtccttgatcagcgtgtcgatcactaccttcgtcagcttggtattaatgttcgtccaaacgtcgatgatctggttgtaacgctcgttgttggtgataagacccatgttgtagtcctccatgatggcgtccgaacgctcgtaaccttcctgtacgagtttctccttggcgtcggggataatcacggcgtcgaggttgaacgacaggccgccgcggaatgccatgcggtaacccatgtccttgatatcgtcgaggaacgctgccaccttgtcggcaccggccttcttcatcaccaccgcgatgatgtcgcgcagcgaacgcttcgtgaggatctcgttgatgtaacccacctccttgggtaccacctggttgaagaggattcggccgatggtcgtctccttcagctcgcgtaccgggttgccgtccgcgtcgatgtcgtccaccatacacttcacaatggcgtgcaggtcggcctggccttcgttgtaggcgatgatcgcctcctcggggccatagaatgcgcggccctcgcccttgacacccttgcggggtttggtgatgtagtagaggccgagtaccatgtcctgcgacggcacggtgatgggtgcgccgttggcggggttaaggacgttgtgcgaaccgagcatcagcagctgtgcctccaggatggcggcattgcccaggggcaggtgcacggccatctggtcgccgtcgaagtcggcgttgaacgccgtacatgccagcgggtggagctgcattgccttgccctcgatcagcttgggctggaaggcctggataccgaggcggtgcagcgtcggggcacggttcatcagcacggggtgtccctttatgacattctccagaataccccagatcacggggtctttccggtcgatgatcttctttgcggatttcaccgtcttcacgattccgcgctcgatgagcttgcggatcacgaacggcttgtaaagttcggccgccatgtccttcggaatacccatctcgtgcatcttcagctcggggccgacgacgatgaccgaacgcgccgagtagtcgacacgcttacccagcaggttctggcggaaacgtccctgcttacctttcagcgagtcggagagcgacttgagcggacggttcgactcgttcttcacggcattgctcttgcgcgagttgtcgaacagcgagtccacagcttcctgcaacatacgcttctcgttgcgcaggatcacctccggcgccttgatctcgatcaggcgtttcagacggttgttacggatgatgacacgacggtagaggtcgttcaggtcggacgtggcgaaacgtccgccgtccagcggcaccagcgggcgcaactcgggcgggatcaccggaatgacgttcagcaccatccattcgggcttgttcttgccccccgacgcacggaacgactcgatgacgttcaggcacttgagcgcttcgcttttacgctgctgcgacgtttcggtcgaagccttgtggcgcagtgcataggacatcgtgtcgaggtcgacctgcttcaggagcgtatagaccgcctcggcgcccatctgtgcgacgaacttgttggggtcgctgtcgtcgagcgcctggttgcccttgggcagggcggccagcacgtcgaggtactccttctccgaaagcgttgccagacgttcgatgccctgctcggcagcggcaccggcgttgatcacgacgtaacgctcgtagtagatgatagcctccagtttcttcgacgggatacccagcaggtagccgattttcgacggcagcgaacggaaataccagatatgaaccaccggtacgaccagcgaaatgtggcccatgcgttcgcggcgcaccttcttctcggttacctccacaccgcagcggtcgcagacgatccccttgtagcggatgcgcttgtacttgccgcaatggcattcgtagtccttgacagggccgaagatacgctcgcagaacagaccgtcgcgctcgggcttgtaggtacggtagttaatggtttcgggcttgagcacctcgccgctcgactgtgccaggatctcctcgggggaggccaggcctatcgaaatctggctgtaaccattattcgtcttattgtctttggaaattgacatatttgttcttcgtttttcttatcctaaatacaccttactcgagtttgaccgacagggccaagccgcgcaactcgtgcagcagcacgttcatggcctcgggaatacccggtttgggcaggttctcgcccttgacgatcgcctcgtaagccttggcacgtcccatcacgtcatcggacttgatggtcagaatctcctgcaggatgttcgcggcgccgaagccttcgagcgcccaaacctccatctcaccgaaacgctgtccaccgaactgggccttaccgccgagcggctgctgcgtgatgagcgagtacgggccgatcgaacgggcgtgcatcttgtcgtcgatcatatggcccagtttgagcatgtagatcacgcccaccgtagccggctggtcgaacttctcaccggtgccgccgtcgtagaggtacgtacggccgctgtgcgggatgcccgccttggcggtgtactcgttgatctggtcgagcgaggcaccgtcgaagatcggcgttgcgaacttcaggcccaactcgcggccggcccatccgagcacggtctcgtagatctgtcccaggttcattcgcgaaggcacacccagcgggttcaggcagatgtcgacgatcgtaccgtcctcgaggaacggcatatcctcgtcgcgcacgatacgggcgacgatacccttgttaccgtggcggccggccatcttgtcacccaccttcagcttacgcttcttggcgatgtagaccttggccatctggataacgccggtctgcgggagctcgtcaccgttggtgatgttgtacttctcgcgcttgatgacggcatcggccttcttccactcgatggtataattattaatggtagcctcgatcaacgcatcggtatgggcatcgccagtccacttgcacgaaccgaggttcaggtaacccatcaccacgcccgtcttctcgtcggtcgacttgcgggcgatctcctcgagcagtttctgcgagaacttcgtgcctgcgggatagagttccacgccgaagtagtcggtgatacccgtcgtggccttgccctggagcagcgtccacagcttggcgaccaggcgcttcgtcagctccgaaatctcggctgcgaacttctcgtcgagcttctcgagctgcgccttctcggcactcttgcccttcttgccctctttgttcgcacggctgtaaagcttcgtgtcgatgaccacgccgtgcaacgatggctgcgccttgagcgaagcgtccttcacgtcgccggccttgtcgccgaagatggcgcggagcagcttctcctcaggcgaaggatcgctctcgcccttgggggtgatcttaccgatcaggatgtcgcccggatgcacgttggcaccgatacggatgataccgttcgcatcgaggtctttggtggcgtcctcgcttacgttcggaatatccgaagtcagctcctcgacaccacgcttggtgtcgcgcacctccatgatatactcgtcgacgtgtaccgacgtaaagatatcctcacgctggatacgctccgagatcacgatggcatcctcgaagttgtaccccttccagggcatgaacgccactttcaggttgcggcccagggccagctcgccgtgttgcgtcgagtaaccctcggtcaggatctgccccttcacgaccttgtcgcccgtcagtacggcgggcttgagcgtgatggaggtattctggttcgtacggcggtaacgcggaagttcgtaggtcgtgacttccggttcgaacgaggccaatacctcgtcttccgtacgctcgtatttgatctgtatcttggtagcgtcggcgaaaacgacctcgccgtcgccctcggccacaatctggatgcggctgtcggagatcatatccttctcgatacccgtgccgacgatcggggcttccgatgtcaccaggggcacggcctggcgcatcatgttcgagcccatcaacgcacggttggcgtcgtcgtgctcgaggaacgggatgaggctggccgcaatcgaagcgatctggttcggagccacgtccatcaggttcacctcgtccgccgtaaccacggggaaatcggctccctgacgcgccttgatacgctcgggttgcaggaaattgccctcgtcgtcgatcggcatgttcgactgcgccacaatcttgccctcttcctcctcggccgagtagtagtggatgtgcgagttgtccaggtcgatccggccgttctccaccgtgcggtaaggcgtctcgatgaatcccatcggtgaaatcttcgcataaacgcacagcgacgagatcagaccgatgttggggccttccggcgattcgatcgggcagaggcggccgtagtgcgtgtagtgtacgtctcgcacctcgaaaccggcacggtcgcgcgaaaggccgccggggccgagggccgacagacggcgtttgtgcgtaatttcggccagcgggttgatctgatccatgaactgcgagagctgcgacgtcccgaagaacgagttgatcaccgacgacagcgtcttggcattgatcagatcgaccggagtgaacacctcgttgtcacgtacgttcatgcgctcgcggatcgtacgcgccatgcgcacgaagcccaccgagaactggttcgacaactgttcgcccacggtgcggacacggcggttcgacaggtggtcgatatcgtcgacgtcggccttcgagttgatcagctggatcaggtatttgatgatggcgatgatgtcctctcgcgtcagcgtgcggatagcggggtcgatatccagatccagcttcttgttgatacggtaacggcccacgtcgcccaggtcgtaacgcttgtccgagaagaacagcttctcgatgacgtcgcgtgccgtagcctcatcgggcggctccgaagcgcgcagctgcctgtaaatatatacgacagcctccttctcagaattgcaggggtctttctgcagggtattgtatatgatcgaaaaatcaatgcccgagaggttctccttatgcaggaggatcgtcttggcaccgctttcgaggatctgctccacatgctcttcctggagaacggtctcgcggtctacgatcacgttgttacgctcgatggaaaccacctcgcccgtatcctcgtccacgaagtcctcgacccaggtcgaaaggacgcgtgcggcgagtttgcggccaacggccttcttgagattggccttcgtgaccttcacttcgtctgccaggtcgaaaatctcgaggatctgctggtcggcctcataaccgatggcacgcagcagcgtagtgacgggcaacttctttttacggtcgatgtaggcatacatcacgttgttgatgtccgtagcgaactctatccacgaacccttgaaggggatgatacgcgccgaatagagtttcgtgccgttggtgtgcatgctctggccgaagaacacacccggcgaacgatgcaactgggatacgatgacacgctccgcaccattgatgacgaacgtaccgcgttctgtcatatagggaatcgtaccgaagtacacgtcctgaacgacgacgccgaaatcttcgtgctcgtcgtccgtgcagtaaagcttgagcttcgccttcagagggacgctgtacgtaaggccgcgctcgaggcactcctcgatcgaataacgcggcgggtcgatatagtagtcgatgaactccagaacgaaattgttccgggtatccgtaatggggaaattctcctgaaacaccttgtacagcccctcgctcttgcggttttcggccgtggtgtccatttggaaaaagtcccggaatgatttaagctgtacctccagcagatccggatagggcacccggttcttgactgtcgaaaagctaattctttgttgtgtttttgctgtggacatcgtaaaatccaaattatgttgaagtgtaattctggtgggttacgctccccgagttgctgggcatccgattatcccgccaatgcccccgtttgcaggcgcaattcgcctcgggagcatccatttccaaagagtggacacagctcctgttcggcacttccagtctttagaccaagaaaaggcatagagcttacacgccggtaagccctatacctgattcgtctgagcagacttaagcagcaatgctacttaagctcaacttcagcaccagcctcctcgagctgagccttgatcgactcggcctcttccttggagacaccctccttaacggccttgggagcaccgtcgacgagagccttcgcatcacccagcgacaggccagcgatatccttaacgaccttgataacctggagcttggcctggccggcggtcttcaggatcacgtcgaaagtcgatttctcggcaacagcagcctcgcctgcgccggcagcaggagctgcaacggcaacagcggcagcagccggttcaatgccatactcctccttgaggatggtagccaattcgtttacctcggtaaccttgaggtttaccagttcttcagcaagtttctttacgtctgccatagttgtaagcttattaaatttcgtttttaattcttgattgtgattagttgtttctcgattcgagcgtcttcacgatgcccgcgatcttttggcctgcattagcctgcaatgcagaaataacattcttcgccggggactggagcagggcaatgatatcgccgataagctcttccttcgacttgatgttgcacagagcgtccaactgattgtcgcccacgtaaacgcacccttcggcgaaagctgccttcaggacgggtttctcggacttcttgcggaattccttgatcagaaccgcaggagcctttgctacgttcgcgaacataatcgaggtgggaccctccaatacttttaccagttcagcgtcagccttctcaaccttctcgagcgccttggccagcagtgtgttcttcactacgaccagtttgatgtcgctctcgtagcacttgcggcgcagggcagcggtctgctcggcgttcagtgcctcgatatcggcgatgtagaagtgaggataagcctggagctgctcggcgatggcgttaataacgaccagtttttcttcctttgtcatctcttctctcctccttctatttggtttctactgatttggaatcaatctgcaagccgggactcatcgtggtcgagagatagatactcttcacataagaacctttagcagcagccggtttcaacttcaggatcatacccagcacctctttcgcattgtctacgatctggtctgccgagaatgaaaccttacctaccgaagtgtggatgataccgaatttgtcgaccttgaagtcgatcttacccgatttcacctcctggacagccttgccgacttccatcgtaaccgtaccggtcttggggttcggcatcaggccgcgggggcccaggatacgacccagtgcaccgaccttacccattacgttcggcgtacagatgatgacgtcgacgtcagtccagccggacttgatcttgtcgacatactcgtccaggcctacgtaatcagcgccggcagcctgtgcttcggcctccttttcgggagtacacagcacgagcacacgcacctgcttacccgtaccgtggggcagcgtcacgacgccacgcaccatctggttggccttgcgggggtcaacgcccaggcggacgtcgatatcaacggacgcgtcgaatttcgtgaacgtaatttccttcagaagagcggcggcctccgagagcttgtaagccttagcggcttccaccttagcgtaggcgatcttttgattttttgtcaacttactcatcttcgattacatattaggaaattcaccgacgacgttgatacccatgctacgagcggtaccagcaatcatacgcatagcagcttccagggtaaagcagttcatgtcaggcattttgtcctgagcaatctcgcgcacctgatcccacgtcacctgaccgaccttgtcgcggttaggctgtgcggaacccttctgcaccttggctgcttccttgagctgaatagctacaggcggctgttttacaacgaaatcaaacgacttgtcgctgtaaaccgtgatgatgaccggaagaacttttcctgccttgtcctgggtacgcgcattgaactgcttgcagaagtccatgatgttgactcccttagaacccaatgcgggaccaaccgggggcgaaggattggcggcaccacctttgatctgcaatttaataaatgcagcaacctcttttgccatagttttccttggttaattattctttttctacttgtgtgaaacccaactccataggagttttgcgcccgaatatcttcaccgataccgtgagtttcttgcgctcgttgtcgacggcctcgatggtaccctggaagcttgagaaagggccatcagtgaccttaacggtctcgccaacaaagaatggaacttcgttttcctcctccatggcattcatctcgtcgacgcggccgaggattcgcgccacctcctgcggacgcaggggcgtggcattcatcttgcggctatcctccttggtatcgccgaggaaacccagcacattgggagtattacgaattataatcggaatctgacctacgaacgcggcctccaccaacacatagcccggataagaaaccttctccttggagactttctttccgttgcggatggtatagaccttttcggtgggaatcagtacctgagatatgtaatcctccaggtggttgtggcgaatctcggcttcgatatactctttgaccttgttctccttaccgccgatggcacggacgacataccactgtttttttatctcgctcatcgtttcagcaacaattaacggccaaaaccacccagtaccttgtaaatcagagccatcaggttctcgaacgacaagtccatcgccaatacgacgatagcgaagatgaccgaagccaccatcacgacgatcgtagagctctggagctgcgggaacgtaggccacgtcaccttgtttacaagctcgttgtaggattctttaacgtaattaaacatatcttcttcttttacttttggcaggagcagagagattcgaactcccatcaacggttttggagaccgctattctacccttgaactatgctcctaaaagcgggaagcggtgcggaacaccgcttccctatggttgtgaaaattatttcacgatcttcaggatctgaccggcacctaccgtacggccaccctcgcggattgcgaaacgcagaccttcgttgatagctacggggtagatcagcttcacggtgatggttacgtggtcacccggcataaccatgtcaacgcctgcgggcagatgaacctcgcccgttacgtccatcgtacgcagatagaactggggacgatagttgttgtggaacggcgtgtgacggccaccctcctctttcttcagaatgtagacctcagcctcgaactcggtgtgcggagtgatcgaacccggtttggcaacgaccataccgcgcttaacctccttcttgtcgataccgcggagcagcagacctacgttgtcgccggcctcaccctcgtcgagcagcttgcggaacatctcgacaccggtgcaggtcgaagtcagggtcttctcctcgagacctacgatctcgacgggatcacctacgtggatgataccggtctcgatacggcccgttacgacggtaccacggccggtgatcgagaatacgtcctcgacaggcatcaggaacggcttctcgttctcacgctgcgggatgggaatatagttgtcgacagcatccatgagctccatgatcttgtcctcccactgcggctcgccgttcaggccaccaagtgcggaaccacggataacgggcgcgttgtcaccgtcgtactcgtatttcgaaagcaggtcgcgaacctccatctcgaccaggtcgagcatttcagggtcgtcaaccatgtcgcacttgttcaggaaaactacaatacgcggcacgttcacctgacgggcgagcagcacgtgctcgttggtctggggcatcggaccgtccgttgcagcgactaccaggatggcaccgtccatctgggcggcacccgtaaccatgttcttcacatagtcggcgtgacccgggcagtccacgtgagcatagtggcggttagccgtctggtactcaacgtgcgaagtgttgatcgtgataccacgctctttctcctcgggagcgttgtcgatggagtcgaacgagcggagctccgacagacctttctttgccagaacggtcgtgattgcagcggtaagggtggtcttaccgtggtcaacgtgtccgatggtaccgatgttcacatgcggtttcgaacggtcgaatttttcttttgccatagtattaagtatttaaagtattgttaaaaattgctttaaagttttaaaattcatttcgcagaacaagcgggcgacacaaacgtccccgccacgccggctggggtcatccgtatcacacgcgtctgcgtctggagcggaagacgaggctcaaactcgcgaccctcagcttggaaggctgatgctctatcaactgagctacttccgcaaaaatataccgtatcagagtcagccctctccctccgcgatgcccgcaagcggacaccactggaaatcttgcaactccaaccggcacttttttagtgggaagtgatggattcgaaccaccgaaggcgtacgccagcagatttacagtctgccccatttggccactctggtaacttcccaaattatctgccccgaacggacggatcccgcattgcaccgaatcccctctgaggctttcgtcctgccgctgcccgggctgtgcggagatctctccccttcctcgcgtcggctttccgagccgatggagggattcgaacccccgaccagctgattacaaatcagctgctctggccaactgagctacatcggcaaaatcaaccgttttggattgcaaaagtaggcataaaaaatttaccagccaaataaatcccgataaattttctacttttttactcttctcaaagaacgtcattcagccgccgttatttcagggatgaaatcgggtgcaaagataggaaaagttttatattttacaacagcttatccgaaaaatatcaccccggcggccgaaggttaccaccttcccgcccggaacggctccgcaccatacagcgagccagagctaaaagccaccacacctattatatattaacaataatataaatcacgggaaattcgttatctttggccggacaaacacaatacgccatgaacgcgatccccctgcccgatgacttcgggttacgcccgctccgtgcggacgacgccccggacatctttacggccatagacacgcagcgcgaacacctcgggcgctggctcccgttcgtggccgcgacgcaccgcgtggaacagacccgcgaagtggtcgccgccatgctggccgacccggccaacccggtcttcacgctgcgcgtcggggatgccttcgcggggcttatcgggttcaaatcggcggacagcaccaccctcaccatcgagatcggctactggctccgctccgaatatcagggaaggggacttatgacctcagccgtggaagcactctgccgcacggccttcgggcaaatgggcatggagaatgtcgaaatcaaatgcgccgcaggcaacctgcggagcaaccggatcccgctgcgcctcggcttcaggctcgaccgcatcgaagtacgcggcgagcagctcgccgacggggagttcaccgacctcaacgtataccggctgccacgcccctgaaacaaaaaaaccgggaaggcggttcctcccggttccaactcccgacaacacccccgcgctgccggcacagcctcgtcccagtccaggccaggggcgacatacagggactacccttccttgatcgaagcgatcagctgggcaggcgtcgcctgcaggtaattcttgcagaaacggctgaactgcgtatagtggcggaacccatacttgttcatcagcgccttcgtgctgtcttcgccgtcgcgtatgtccgagaaaatcttgagtgccttctggcgcatcatccaatggtaaacgctgtcgttgaaatgctcggcaaaacgacgcttgaacaccgaaaggctcatgcccgcaagggcagccagctcggctacgccctgtgccttgtcgtagttgttgcacacgaagacacggaaattgtcctgcggctgaatcatcgactggaagaaataggcatgctcggtcggcgtataaagcaccttgatcatcatgaaaagctccgtagccttcatcttgtggtagcgggaacaaccgctcatctccgggatcatgaaaagcccttcgagcaaccgctcgatcgacggatgcatcgccagtttgggcacgtcctcattgggaatgaccgtatcatagggcatcaccttgtcgaaaatgtcctgttcgcagaattcgatcctgtggatcagcgacagcacgacaatattggcctcgtcctgggccgtcgcaacgaatctttctccgcgtgccaggcacacatactgcctcgaggtcaccaggcacatcgtctcgccatgctctatcataagcgcccccgacatgacgaaaaggatacgcaccatacggtcggcagagaaagtcacgccctcgccgggtgtgagggtcatctgtgcaaaacggcaataattcgaatcgccgatgcggcggaacggcgcaggaaacgtaggacaactactacaatccgcaggacaattctcctttaatgccagctccacaaactgcggtttgatctgatccatatattcgattgattgtttaactgttcaaagttacacaaaaaaatcataaccaacaaaaaacaaacactttcgtccaccctttttgcatacaaaagcaccttgctgccgtaaatttccacttctacacagaaggccgcaaaatttccaacatgcaaaaaaaagtgcgtaaaccttgccggcaaggcatatcggcccgaaatcccagtcccatgtcacagtagcctcaaacggccaaatactgcctttccacacaaaacagtccatccctcgaaaagcacccgcacacccggacgggaaacgatccgcaacacagccggacgtataaaaaacggggtgccgcgataattgcggcaccccacaggtactgcacagcaaacgaatgccggcagcgacgatattatttataactgataatcaaaatcttcgacgactcccaaaaacgcacgggatcagtaataagcaatttcgtaactattttatccttctcgccccccgtcaccagttgataggaatcctcgggctgcgccgtgacgacggtcacctttttccggccgacggggatctcggacagcagccgggaatcggccttcgtaaaactctccaggttattggtgttgttcaccgtcagcgtacgcccgataaagccctgcttgtcgatgatctgcgcgtcgcggagttctttttccacaccgacgatatagtagaccgtgtggagctggttctccagttcgaccttttcgctactcaggttttccgcccgggcattctgctcggcgacttgttctgtcagaacctccacctcgacacccatcttgtccaggctctcccgcaggcgggcgatttcgtccttcttcccggcaagctgtttattcaggtctgcgatcatcttctccagcccgtcgatacgcaggttcgccttgcgcagctgggctgcagcacgctgcaacgaggcgatcttgtccttgttctcctgcaacaggcggtcgatcgccgcgatatcgttgttgatctcctcgacgggacggcggccgccctcgctaccacccgccaccgaaatcaggttttcacgggtctttatcagcaccaagttttcggagatggcgttgatgtcctcgaaaacggcatttataagcgaatccttggcactgacgaccgaaacgagcgaatcccgctggtcttccaccctgacgaccgtccctttgctcacgcaggatgcgagggcgaacgccgcgcccagcgccatggctgtaacgtacttcataactttctaagatttaagttattgtttgcttctcgggaggcaaatataaatataaaaacgataccctgttcaaaaatcttcacgacacgcgggaaatctgcattatcggcaacgtgacactccggcatgaaaggctcgaagacggtaaaaacaaaggccgcaccttccggtacggcctttatcttgcagggagggaagtcttacttcgcgcccttcttatcgtagcgttttgcgtaacggctcataaacttatcgacgcgaccagcggtgtcaaccaacttcatcttaccagtgtagaacgggtgcgaggtgttggaaatttccatcttatacacgggataggtttcgccgttcacttcgatggtttcttttgtcgaaacggcggaccgacacaaaaacacgtggtcgttggacatgtccttgaacgccactaaacgataattctccggatgaataccctttttcatttcgctgtttttgttttttaattgatgcttaagcgggacaaaggtactaaatttatttccaacaaacaacatcccgtccatatttttttacggggatcgaccgcccggacaccgccgcccggccggaatcggacacaaggcacaccattttttttcgcacacagcgccccgaatggttgcgcaatctgaattgtttttttatctttgcaacgcaaaaagcgctcatgcgccgtgcgggacccatagctcagtcggttagagcagcggactcataatccgaaggtcgtgggatcatgcccctctgggtccacgacgaaggcgggaggttgcgatgtttcgcaacctcccgccttcatttagtcatccggtcgcatcaccctccgccggcgccgtatcgtccctccccggcaaaaatgccccgcacagggcggtatccggagcagggagatagctaccgcccgggcggcatcgggctatcggttctcgtcgtcggcacggattgccttgcggcggatcttaccgctgatggtcttcggaagttcgtccacgaattcgatgatgcgcgggtacttgtagggcgcagtgatctgcttcacatgatcctgcagttcccggatcaacacctccccggcccgcggcctgtatttatccccgaggatgatcgtcgctttgaccacctgcccccggatctcgtcgggaacccccgtgatggcacattcgacgacggccggatgggtcatcagggcgctctccacctcgaaggggccgatccggtagcccgaactcttgatcacgtcgtcggcacgccccacgaaccagaaatatccgtcctcgtcgcgccatgccacgtcgcccgtatagtacacgccgtcgtgccagacctcgtgcgtcatcccgtcgttcaggtaatactccttgaaaagccccagcggcttcccccggtcggtacggatcacgatctgcccctgttcgccgtcctcggccgaacggccgtcgggcgtcaagagatcgatatcgtactgggggttgggcacgcccatgctgccgggcttgggctccatccacggaaaggtggcgagggtcagcgtcgtttcggtctgcccgaaaccctccatcagacggacgccggtcaggcgtttgaacgtgtcgtaaacggcaccgttgagcgcctcgcccgcggtcgtacagtactccagcgacgaaaggtcgtatttcgaaaggtcttcgcgaatcaggaaacggtagatcgtaggcggcgcacacagagaggttatccggtactgcccgatcttgcgcaggatgtcggcaggcgtaaatttctcgtggtcgtaaacgaaaatgttggccccggccagccattgcccgtacaacttgccccaggcggccttcgcccatccggtgtcggcaatggtgaggtgcaggctgccctcgtggaggttgtgccagaagcaccccgtgctgatatgccccagcggataggtgaaatcgtgggcgaccatcttcggttcgcccgtcgtgccggaggtgaaatacatcagcatgatgtcgtcgttggtgttcacatgctgcggccgcacgaaaggcgctgcatggcggatgccctcgtggaaatcgaggaacccttcgggaacctcggggccgacgcttatcagcagcttcgtggtagggctttccggcatggccgcggcgatatggccggttatcaccggctcgcccgcggcgacgatcgccttgattccggccatgttgcaacgataaacgacatccttcctggtcagcaggtgggtcgccgggatggccacggctcccagtttgtgcaaggcaaggatcgaaaaccaaaattcatagcggcgcttgaggatcagcatcaccatgtccctccggccgatgccgaggctctggaaataggaggccgtgcggtcggtttcacgcttcatgtcggcaaaggtgaactggatctcgccgccccggtcatccgtccacagcagcgccttcttgtcgggttcctccgccgcataggcatccaccacgtcataggcaaaattgaaatccgcggggacgcggatgcggaaattccttatgtagtcttcctgggaagtaaataccgtccgggataaaaatttctccaccatacgcctacattattatcgccaggaaacgtaccggcttgccgtcgagcgccttcatgccgtgcggcaggccggaatcgaaataaaggctgtcgcccacgccgagcaccagctccttgccgctgaccgagatcagcaggcgcccttccagcacgtagttcatctcctgccccgtgtggcagttcaggtgcatcggggcatcggcagccgaaggctccaccgtcacgatgaaggggtcggccctgcggtcgcggaaacccgaggccagcgcctcgtacttataggccgcacgccgttcgaccgatacacccgtgccggcacgggtgatgaaataggagttcatcttgggctcctcgccgaacatcagcacatccaggctgatcccgtagcggcgggctatggtttgcagcacattgaccgaaatatcggcatcaccgctctccatatccctgtactcgtcgaccgacagacggcaactgtccgccacttcctgctccgaaagttcgagcacctcgcgcaatccgcgcaaacgggttgcgatcgatttaatcggatcacacatcattctataatttaaattatcggataggttcggcatttgcgaaattccaccgcgtaaagttacgatccgtaaccgaatcgccccacagccagcttcccatgccggaaattatcacctaacaacctgggcgtaaagatagtaaatattattaaaaactacaaccatcccccttttctttcattgtccgccggaaaaacgccccgtcccggcgaaatccgcaggcggcggtgatatagcgcaggcacggcagcaccggaagcaccagcggtacgggaagcaccagcggtacggaaacatcggtgacacgggaagcaccggcggcacaacggcttgcggggaatacgggcatcttgcgggaagtctgcgggacgtctgcaggaataatgcaggaataatgcaggaataatgcaggaaccttgcggagactctgcggagacaccctgatggcatcgcggcggcaaaacaaaaggagggccgtacttgcgcagtacggcccccttttccaaaccggatcgcctatcgcacgctgaagcggtagatacccgacccgacgccgaatacgcggtacccgtcctcggtaccgaggctttcgacatccttgcactgcgcgacttcgagcccgctttcgcaaacccggctgccggcagaggcggggacgtaaatccgggccgtggtgttggccggcacctcgaccaacaggtcgaaaccgccctgttcggtcgtccactcgctgcggatcagcccatagggcgagcggaacgaggcctcggcgctgcgcaggtcgcccacgatctcgggcctgacgatgaatttcttataggcctgcaccgaatcgtcgcggcggatgccgcccacataggtatagaaccattcgagcaggtgccccagcatcagatggttgtgcgacttgcggggcagtgcctgccatgattcgggcagcgccgtagcgccctgggcgagcatataaccgtagccgtatacgtcgtaccgcgagttcatgtcgaagatcacctgcgaattcccgctctgctccagcgcccgcagcacgtagttgtatcccacgtcgcccgccgtcagcgcattgccgcggctgcggatgtcctgcaccaggttcgccagcacggcgtcgcggttctgcggctcgcagatgcccgagtagagcgccagcgcattgccggcctggctgttcttgtcataactcccggtctggggatgatagtatttttcgttgtaagccttgcggatatcctgcgccagcttcccgtatttcgcggcatcctccttgcgccccattttctcggccgccttgcggatcgtctcggcatccatataacagatcggtgtcgccgttccggccagggaggtgagctgcgctcggccggggtatttgggccctaggtcgcaccagtcgccgagcccgtgggaaaggatatgcccgtcggccttcgtgccgaggtaatccacatagcgcttcatcgcctcgtaatgccgctcgaccaaccggaaatcaccgtagtactcgtagaccagccacggcgccagcacgaacgcactgccccactcgggcgaatcgcggaatccgtcgaggaaagtgacatattcggggcagatatcgggaataagcccctcgggagtctgcgcgagctccatgtcggtcagcatcttgtcgtagagggtatacacgtcgaacttcgattgcagcgacccgaacatcaggtgcaactgctcgatccacggcagcttctcgcggtgggggcagtcggtgaaatagctcaccatattgcccttgataccccacgcgataagctcctcggtcttgttgagcaggtcgttcgaacagtggaacgtcccggccatccgggtggcgttgcgcgtatgcaggccgcggagggtaacgatctcgggcagcccttcgggattctcctccccggccgggacggcattgctcaccagcacgtaacgctgtccgaaataggtgaactggggacgccacgtctccacctcgtcgccgcgcagagtgtaggtcaacctgtactcaccgcggtagccgccgcattcggtaatcgagtcgcactcgaaattgaacagctcggtggtgttgagctgcacgctctgcccgcgtttgccgcggacttccagctgcaccgtccccgagaagttctggcccatgtcgtagagccatttgccgtggcgggtcttgcggatcgagaccacggggaactcctccatcacccgcacgggttcggcgacgggggaaaccaacttcccgcgctgggtcgtcaccagcggctcggcccaggccgaagcgtcgtaaccgggcagcatccatcctgtccgctcgcgcgtcgcatcgtaatcctcgccgccgaagatgctgctgtacgtcacggggctttcggtcacacgccaagcgcggtcgctgacaatcgtttcgtgcgtcccgtcggcatactcgatctcggccttgaagatcatcttgggataaccgaagctgatgagcgccttgaaatagcgttcgcgcggcacattgtagaggccgttgccgagcatcaccccgaacacgttgcctcccggctgcaattcttcgctgatgtcgaacgtctggtagcacacctgcctgtcgtagtcgctccacgccgggtcgaggaaattgtcgcccaccttcgccccgttcagaaacagctcgaactgtcccaggccgcagacatagaccgtcgcccgctcgacgggcttggtaaccttcacttcacggcggaactgcggcagccggttgagcgccgttttcctgtcgccgatctttattttgttgaactcctgtccgggcaccacgcgcaggctgtcgggcagctcctcgaaggcgatccaccgggctccgtcccaatcgctgccgccgagcaggccgaccgcgaacgaccggatttcgctccacggcgaataattccccgcagcatcgctcacccgcacgcgccagtaatagcgctgccccggcttcagcgtccgcccggcatagcgcacatgcagtgaaacatcggatttgcgttgttcatcccacaacagcttccggcccctggccaggtcggcggggtcggacgccacctgaatctgatacccagcctgcaggaatccacggccgacggaaagcgtctgccaactgaattgcggcgtcagcgtattgatcgccaacgggttgtcccggtattcacacctcagttccgccacacgaaactcatctgcggcaatgccccacaggcaacttagcagcaatggaaacaatagtaatagttttttcataatcattaagatttggtttcgtttcagattgtttttaatttcctttaaagccaaaaataatgtttttattttactttcacacactcttgcaaaaaatacgaatccaaaaagtcatttttcgaatataataaatcatatttcgaacttttccggcaaaggtactattcccgcacgggctgccggcctaccgccaaaacccgtcaaacaaccgaatatcaggcaggcagcgcacaatacccaagctaccggacagccgggcatgcagcgtgcaaaaatgaaaaacccgcccttcgggcaggccggaaatcgcacaaaatcatcttacccggctgtactggccgaccggacaggcaaccgaaacactgtgcatcctggcattggccgcactaaagacaatggaaatatgcaggatgcgggtgttgcggcatcaaattgaggtttttggactgcgaatcgggggagattcggccgttacgccccgcccggcaaaaaattcttacggctttttcaaccgctcccgctccgaatgtcccgatttttttcctacctttgtcacaaacaaatctatcaacacattttacatcgataccatggaattcgaaggaaccgtttacaaaataatgcccgtgacgaaaggcacctccgcacgcggcgactggcagcgccaggacgtagtgttcgagatgaacgaaggctcgttcgcacgcaaaatctgcgtgacgttcttcaacaagcccgaagacgtcgcccggctgaaagagggtgccgcctacaccgtctcggtcaacatcgagtcgcgcgaatacaacggccgctggtacaccgacatccgcgcatggcgcatccaacccaagcaggccgaatccgccgccccgatgcccgacatgccgcccattcccgaagagccctcatacgcctcttccccggcagaagtggacgacctgccgttctaaaacgggcagacaccatacacaccggcggccggagcgatttccggccgccgttgctttatacgcataaacatggaaaaacctaccgacaccgccatacgccccctgcacgaaacggaactgccggcagcatccgccctcgctgggcgcgtcttcgccgagttcgaagccccggaatacagccccgaaggcatcggcgcattcctccgctttgtcgcaccggaagccctcgcggcacagcaccgcaacgggtcgatgcaatcgtggggcgctttccggcggggaaggctcgtcgggatcatcgccctgacgcgacgcagccacctgtgcctgcttttcgtggagaaagcctgccatcggcagggcatcgcccgggccctgttctcaacactgcgcgaccactgccgcacggcaccggacacaccccggatcatggtaaactcctcgccctatgccgtcggagcctaccgcaggctgggattccgcacgaccggcgacgaacgcaccgtcgacggcatccggttcacaccgatggaatacctattcatataaaaaagaagcgggctccgctcggagcccgcttccaaatatcttccggaaatgcatcccgcttattttgcaggtgccggtgcaggagccgtcgcggtcgaatcggccggtgcgggctcctcgtaagggattacttcgattacttccacatcgaactggagcgcctcgttgggaccgatgtcacggcctgcaccacgcgtaccgtaagccaggtcgctcggaatccaaagcgtgatcttaccgccctcgcccacgagctggagaccttccgtccaacccttgatgacacggttcagcgggaacttggcgggttcgtcagcctccttgggagcacccttttcatcgaacgaatcggggctctgcttgcgcatcatctcctgctgctctttcgagcgattcttgaaaatcgaggtgtcgaacaccttgccttcacgcgtatatccggtatagtgtacccgaaccacatcgcggggatccttcgccatcttggcagcgtcgccctccttggtaaccttgtagagcagtcccgactcggtcttcttgacgcccgacttcttctcggtcttctccagccatgccttcgatgcggcggcattctcggcagggcgcttcaccatgaaataatattgcaggtactggtttacctcgtcctcggtcatcttggccttgccgtcacgtacgtcctgcatggcctgaccgatccaaaccagctgtacgggcataccgctctggctgatgttgtaaccgatgtcgttaccgaaagcatacgaaatctcggcgcgctcctcctcgctctcgaacatggcagggtcggccgtgggatattcgaccttcgtgctgtcgcctccggccagacggatgctgtcctgctcggcacgtttggcggcgattgcctgggcgcgctcgccgcgcttggtcatgaagtactcgcgcagcatttcgagcgatttgtcgtgctcctgcgtagccttacccatcgcactttccttgatacccttgtcgatggccttgaaatcgaaggggatgtccctcatttcaaaatttataccgttaccaatgttcgcacccagtacatacgacagcgagtcgaattcggaaaggctgcccatacggacaccgccgcccttgtctccgcaggcggtcaggattgcggcacccgcaagcgccgcggcaaaaagaatctttttcatcgttttttgaatatgtttaatctaatcgtttgagcctgttcagggttcacccgcgcaaagttataaaataattacaatatcgccccaaattaccggcgtaaattattgcgccgcgaccaattcgtatatttgtcgagatcgacaagctcgatttcgtaataaagcgtggcattgggccggatcccgagctctttgtcccccgcagagccataggcaaccgcagaaggcatccatgcattgatcttcccgcccttgccgatcagcttcacgctctccttcatccctttgttcaggctgccgagcgacgtgcgcagcgtgtcgcggcgctcgtaggaggagtagacgtcggccccgtcggccgtgcggatgatgtagcgcagcgcaacgctgtcccggtcggaaaccggaatctgctcctgatcgcccagcacctccacggcgtaggtcacgcccgacggcgtgcgggcatagctgcggttcgatttggcgaagtccgcgaggaactgctcctcgtaggcacgcgccttttcgggcagcacatagttcatgtaacgcaggtaatagacctcggcatcgtccgccgagagtttcgccccggcacggaacacgtcgcggataccctcgcatacggcattgacgttgagcgtcgaatccattttgagcaggttcatgcccacgttcataccgatgatataagctaccgaatcggtgtcggccttgagtttcacgcccccgcccgacttcctggagcaggctccggccagcaacgccatggctgtcagggcaaaaaatgttttacgcatattatttatttccgtttcttcgaaaaaaccaaaatcagcaggcttcccagcacggccgcggccgtcgagcccatcaggatcgctatcttgccccggtcgatcaggtcgggttcggtgtaggccagcgcgtcgacgaacaacgacatcgtgaagccgataccgcccaggcaggccacggccagcaacaggcgccatgtagccccctcaggcatcacggcaaggccggatttcacggcaccccagctcgcaagaaatatgcccaaaggcttaccgaccacgagcccgaagaaaatacccatcccgatcgacccgatctcggacgaatagtgaaaaatattcaggtactcgggcgaggtgatctcgacaccggcgttcgccagtgcgaaaatcggcatcaccaggaacgtgacatagggcgccagcgaatgctccaggcggtagctcatacccaccgagtcggccgccagcaaacgcatgcggcgcatgtagaaccggtggtgctcgttgggaaaatcatcgcccgacgttctcgcagccagcatcaactccttcaggtggcgcatcttatgggcgaaatactccttgctgtaacggggcgtcatcgggatcagcatggccatcgccacgcccgaaatggccgaatgcacgcccgaatagtagaacaacccccagatcaccacggcgggcaccaggtagaagaacatgcgtttttcgcccatctccttcatgaagtagaccgcgagcatgatgaccaatgccgccagcaggcagcttatctgcacctgccccccgtaaaagagcgcgatgaccaggattgcccccaggtcgtcggcgatggccagtgccgtgaggaatattttgagcgaaaccggcacgcggtcgcccagcatcgaaaggatgccgatggcaaaggcgatgtccgtggccgtgggtataccccatccgttggccgctatggtgccgtggttgaagaacaggaaaatgatcgcaggggcgagcatgccgcctgcggccgccaatacaggcaggatggcctggcgtgccgacgaaagctgcccgcaaacgatctcccgctttatttcgagtccgacggcgaaaaagaaaatcaccatcaggccgtcgttaatcagcttctcgacggtcattccgcgcgggaaaacccagtcgatcagcccatcggggctgtgcaccatcagcgaaagatccgtttcgagcagatggcggtaatagagcgaagtcccgggcaggttggccagcagcatggctacgatcacacaaccgagcagtacgacgcctcccgcccagggggcttccagaaaattgcggccgcgtataccgatcatatgacgctcacgtacccagcggtacattgaaaatagtcgcatttaccgtccgtttgattttaatgtcaaattacacaatttccagagcatgcgcgccccggtgatggcatccaccttcgcttcgggcgccggagcgacctccacgacgtcgaacccgatgatgcggcgccccgaacgcacgagcgtatcgagcagccacacggcctgattgaacgtaagccccccgcagacgggcgtacccgtatggggacagttctcaaaagtgaggccgtcgatgtcgaagctcacgtaaacctcctgcggcagcgcatccacgattcgccggcacagcgcgtcccaggtctcgccgcggaacatcgcggcggcaagcgacaggtcgtcgaaggtggcaacacgggcggaagaagcggccagggcggcttccgtcccgctgaaatcgcgcactgcaacctgggcgatcttcttcaccgaaggcacgtcgcgcaggacgttgaacatgatcgaagcatgcgagaactcgaagccttcgtaagcatcgcgcaggtcgcagtgggcgtcgatatgcaggatgccgaactccccgtggcggtcacccagggcacggatcagtccgtagggcgtcgaatggtcgcccccgaccagtcccacggtcttccctgcgtcgagccaccgcgccgcctgcgccccgatgttggcgttcatggcgcggcagccttcgttgatgcggcgcaccttgcgtaccgcatagtcgtcctcgggacttcccccgccttcgagatgggcaatcaccttctccgcatcgctgcgcaagcgttgcgactcctccagcaacgcatagtccacatcggccgtggcgataccgcggcgccacacgccgggagccagcggctcatggaagtcgagctgcgtcgaggcttctatcacggcatcgggcgcatgggccgtcccggcgccgtacgacaccgtcacgtcccacggagctgaaaccagcaccagttcggccgttcccggctcgaaaggaagcccgaaataggttccgttatccacaccgaccccgtcgggatcgaaggcgtttagttccatacggttgaatttcattctccattttccgcgcccggcacagatagtctgcttgcaacctccgcccccgcttaatgaaaatgttcattttaaatgacaaaggtacaaaaattttaatttttccctatatttgtttcccggaaagaaaagaaatcaggaaaaagcaactatccatgaaaatcgtcgcagacagtgccatcccctttttgcagggagtcctcgagccgtgggccgaggtacgctacctgcccggcagccggatcgccgcggaggacgtgcgcgatgccgacgccctcatcatccgcacccgcacccgttgcgacgggcgcctgctcgccggttcgcgcgtccgtctgatcgccacggccaccatcgggtttgaccacatcgacacggcatggtgcgcggcgcacggcatacgggtcgccacggcagcaggctgcaacgcccgcggcgtactgcaatgggcgggcgccgtactggcccacctcgcgcgtacacaggggtgggagcccgcacagcggacgctgggcatcgtgggcgtcgggcatgtgggttccctcatccgggaatacgccagcctgtgggggttccgcgtcgtctgctgcgacccgccgcgcgaagagcgcgagcattgcggattcctgccgttggcagaagtcgcacgcgaagccgacctgctcaccttccacacgccgctcgacgccacgacgcggcacatggccggcgaggagctgctcgcccggcttaaaccgggcgccgtggtgatgaactcctcgcgcggcgaagtggtcgacggcgacgcgttgttgcggagcggccatccctgcgtgctcgacgtctgggaacacgaaccgcacctcgacccgcagttgctcgaccgcgcgctgctcgccacgccccacgtcgccggctactccgagcagggcaaagccaccgctacggccatgtccgtcgccacgctggccggcttcttcggcctcccgctccggggttggtacccctccgaagccgccccctccgtcccgcggccgatcccgtggcaggagctttgcacgaccatccgcgacgcctatgacatcgaagccgaaagctgccgcctcaaggcgcggcccgccgatttcgaggccatgcgcgaccactaccgctaccgcagggaatacttttagcgaaatcaattcttttttagtacctttgcggccacggacaatgcccttaagaaaatgtaccggagaatcataaagcccatccttttctcgcttaccatcgagcgggcacaccatgtggcgcttctgttgttgcgcatcatcgggctcatacccggcgggcgctggttcctgcgcaaatgttacaccgtacggcacccggcgctcgaacgcgaggtcttcggcgtaaaattcgccaatcccgtcggcctggccgcaggtttcgaccacaacggcgaagcctaccgcgaactggcggcactcggcttcgggttcatcgaaataggtaccgtcaccccgcgcccgcaggctggcaacccgcgcccgcgcgtgttccggctgcccaaagaccgggctatcatcaatcgcatcgggctctccaaccgcgggctggacaagacaatctgccacctgcgccgcccgcacgaagggctcatcgtgggctgcaacatcggcaagaataccgtgacgccccccgaaaatgcggcggcggattacctccgactcttccgcaacctctaccagtatgcggactatttcacggtgaatatcagttgcgacaactcctgccgcgaaggcaccacctacacacgcacgcacatactccagatacttgatccgctgttcgacttccgccgcgggcagaaccagtaccggccgatcatgctcaaggtgtcgcccgacatgtcggacgaagtcatcgacgaaatcagcgacatcctgctcgaaacaccgctcgacggcatcgtggccaccaacggcacccaccgccgcgaagggctgcatacgagccacatggcgctcgacaagatcggcaacggccgcctgagcggcgcaccgctcacccaacgggccgtagaggtcgtgcggcgcatccacacccgctcgggcggcaactttccgatcatcggcgtgggcggcatcatgagccccgccgatgccaaggcgatgctcgacgcaggcgcagacctcctgcaactctacaccggttacatctacgaagggccggggctggtcggcgaaatctgccgttcactgatcgccgatgccgaagcggccgcagccgccaaggcagccgaagaagcgagagccgaagaagaggcccgggctgctgctcaggccgctgaggcaaaagccgcagcagcgacggcttcaggcgcacaggcaccggaagccgggaaggccgcacccggaacggaaaccgccgcgacagcccaaacgcaggccgccgcacctgcagaatcggtgccgaacccgtcaccggaaacacagaacagcccggcacgacctgcggataacgaaccggacacccgcaagaaacagcccgcatcctgagcctcaaatattgccatgaaagcaacgatcatcaccatcggcgatgaaatcctcatcggccagatcgtggatacgaactccgtatccatcgccaagcacctcaacgccgccggcatcgtcgtacacgaaaaggtttcgatcggcgacgacagcacacagatcgtccggagcgtggaacgcgccctgggagattccaacgtcgtcgtcatcaccggggggctcggccccaccaaggacgacatcaccaaaaagaccctggccggaatgttcggctgcgaactggtgcccgaccaacgggtcgccgaccatgtgaaacgcatgctcgaagggcgcggcatcgagttcaacgaactcaaccgcgggcaggcgatggttccggcctgctgcacggtgctgttcaacgcccacggcacggctccgggcatgtggttcgaacgcgacggcaaggtggtagtctcgctgcccggtgtcccctacgagatggaacacctgatgcaggacgaagtgatgccgcgcctgaaagcgcatttcgaactacgccagatcatacaccgcacgatgatcacggccgggctgcccgagtcgatgctcgccgcaaagatcgaagcatgggaaaacgccctgccatcctacctgaaactggcttacctgcccaatccgggcgccgtacggctgcgcctgtcggcctatgaggtcgagggcgaaagcgtctcgaaggagatcgaacggcaattcgaggcactgcggaaaatcatcccccacaacatcatcgggtacgaaacggccaccatgcaggaactggtgcacaagctgctcaccgagcgcgggctgaccctcgccacggccgaaagctgtaccggaggcagcatcgcggcgcgtttcacggccatgccgggcgcttccgcctatttcctctgcggcgtagtttcgtacagcaacgcctcgaaacacgacatcctgggcgttgccccggaggtcatcgcccgccacggcgccgtcagcgaagaggtcgcacgccggatggccgaaggggcacggcggatctcgggcgccgactgcgccatagcgaccaccggcatcgcaggccccgcaggcagctccgccgaaaagcctgtcggcacggtatggatcgccgtggcgaccccacaccggacgaccgtcatcctcaaacagtgcggttccgaccgcggacagatcatcgaccgggccagcgccttcgccatcagcctgctgcgcgatgaactcaatgggaaataatacattcgccccatgtatagaatacttgcctcaaccatcggtgcactcctcgtcctcacctcctgtatgcgtcagcagcccgaggagcgggtgcacagactcctgaccgaccgcatccagaccctcgccacggcagaaagctgcacgggcggtaccatcgccgcacgcttcacggccatgccgggcgcctcggcctatttcaaatgcggcgtagtgacttacagcctcgatgccaagcagaacttcgtaaacatctgctgcgatacgatagcccgctacggcgccgtcagcgaacaggtcgtacgccagatggccgaaggcgtccgccatttggcaaatgcgcactatgccatcgccacgactgggatcgcaggccccacgggcggcacccccgaatacccggtcggttcggtatggatcgccgtcagttcgccgctgcgcaccacggcccggctgatccacgccaaaggcgaccgcacgcagatcatccgcaaagcgggaacggccgccatcgaactgctcgaagaggagttgctcgccgcacaaccggacaaatagtttcaattcatcggctattcccttgtttttctaaacaatttagcttatttttgcatcaattcagcccgatgcaaaatgaaaagaaccttattcctgtcggtgttgttcggtatgctcctcgttacggcccatgctgaaaacaaaagccaccaacaagttgacagtacgctttacgcctattaccgctggtgtaacaacaacatacgcgacacggccgtcctcagcaaggcggacacgttgttccggctctcgggcgagaagcacgacatccggatgcaggccgttgcgctgagcatgaaagccgaccattactattttaacaacgacctcgactcgctcaaggcatggattccccgcgtgcaggatttcgcccgcaagcacaaccagctcaaatattattacttcacatggtcgcggctgatcctctattataccaagcaggcgcaatacacgctcgcccaatacgagctggagcagtatatgtcgcaggccgaaaaggacaactacaagcccgcaaccgccgatgcatacaaacaactcgggcacatctaccgcacacgggggctgaaagaggcatcggtggaatactaccgcaaggcaatcgacttcatgatccagaacgggttcgacaaattccagctctcgaacctctattcggaactcgcgaccatgctgatggatctgcgacgctatcccgaagccgcagaggcgatcgaaaaggggaaggcctgcatccccctgcctgagtatatctggtcgctgaaaataaaggaagtgctcctgcttctccagaccgaccaaatcgccaaggccaaagccctgttcgaagagatcaaggccggacacggcggttacctcaccgatatcaacctgaccgaaatgcagctggcgatctacaaatcctcgcacgaatacaccaaggcgctcgcaacaatcgagagactgatcggactgttcgggaacgaaggctacgcggaatcgtatttctactatatttacaaaacccgcgcggacgcctacgcagcactcggcaacttcgggcccgcctatgaggacttgcagcacttcatcgacctgtatcacaagcgggtcaacgacgacaacgaaaagacgctcggggaattcgccacgctgctcgacgtcaacaggctgaacgtggaaaaggccgaactgcaccagcaggcgcaggaagagcgcctgcaccgcacccaattgagcaccatcggcctggcgtgcatcctcttgctggccgccgtcttcatcgcggtgatgctccgcatgaaccgccacctcgcccgcgcgaagcgggccgccgaagagagcaaccggatgaagggcatcttcatccgcaacatcacacacgaaatcaatacgccgctcaactccatcgtcgggtttgcggagctggccgcagcctcggacgatgccgatgccgccgaacggcaatcctatatcggcatcatccaggaaaacagcggctacctgcaaaaactcgtggacgacgtactctacgtcgccggactcgaatcgtcggaaaccccgccggccatgagcccgaccgacatcaacgaatgctgccaggagtgtattcagaaggtctcacagtccagttcccgggcggtgagtatccgtttcgtcccggcatgcgagaaattccacctgcacacttcgtgcatgctaatatccaaagccatcaccgaaatgctgcgcaatgccgtacatttcgcggccgacggagaaatcacgctcgcatatacgctggacggcggcaaccgccgcatcacattcacggtaaccgactcggggcccggcatcccggcttgcgaggccgagcatattttcggacgcttcgtcaagctcgacaccttctcgcaagggctcgggctcgggctgaccgtgtgccggctgatcgcctcggccctgggcggcacgataaaactcgacacaaattacagcggaggggcacgtttcgcactttcgataccgttacgttaaacgctaaaaaccaatacaatagaccacgcaccggaaaattaatgtggattattaatctttaattctcattttttccttatatttgcactcccttacgggaataacgaacaaatttagcgaaaacaacaatgaaagtttgcgaaatcacaggcaaggtagcgatcgtgggcaacaacgtctcgcactcgcaccacaagaccaaacgcaaattcagccccaatctgaaaaccaagcgtttctggtccgagcaggaaggccgctggatcaccctgaaggtgtcggcagctggaatgaaaacaatcaacaagaagggtcttgcagtagcactgcgcgaggctgccgcacccaagtccgtttactaaaacaccaaagtaacaaatggcaaagaaaggcaacagggttcaggtcattctcgaatgcaccgaacagaaacagagcggagttccgggaatgtcccgttacatcacgacgaaaaacaaaaagaacacccccgaccgtctggagcgtaaaaagtacaatccgttcttgaagaaggtcaccgttcaccgtgaaattaaatagttttgaagctctatggcaaagaaagtagtcgcaacactgaaaaccggcacgggtaagaactttacgaagtgcatcaagatggtcaagtcggacaagaccggtgcttacatgttcaaggaaggcatcattcccaacgaccaggtcaaggaattcttcgaagagaagaaataagtattttaagagctaatcttaaatacaaagggcatccgatcggatgccctttgtgtttctccggctctctcccggcggttcagaacttgtgcacggcgcgcaccaggaaattgttatacttgggaatttcgacgacatagggaggttcgatccccatatgcgacgtaaaagccgacttctcgtccttctcggtcgaggagaaatagtaaaccagccgatccatacgcttgccgccgttattcttgagggcgttgttgaaccggttacgggcctggcggctggactgcacacgcgtcccgccgctgtaattatggccgatgttcagcagttcgtcgatcgacggaaggtaccagccctcacccttctcgcggcaccacttgaatgccgggaaatcgtcccacgaaaggttgttctcggcgatgtaggccgcaactttctccatgttcacactgccgtcggaacggttgtccgtaccaatgacgcgcaggtcgggcttgcggaactcgctccagtgcaggtaaatctcatcgagcgagattaccagcccgtgctggcggtcgtcggagagcatacacacgacgcccttgatcccgtcctggttatagaattcgccgatctcgtactccttgaccacatacttcaccccatcggcagggctggcggcaggcgcctcggccgcagcgggagcggcggaaaccttagcgggctcctcggccgggatggccggggtcaacggtgttgcaggaatgctcgcggcagccttgaaatactccttctcgccgtttgcatattggatatagctgatttccgacacgggcaggacgtaagtcgggccgtcgggattggagaaacgcttgtaacgaacggactcgggggttatctccgtcactttcgcttcgaccttcgaggcgtcagccttgattatcaggtcttgggctgcgacagtcagtacgccgcaaaacgctgccaacagcagcaggatcgtttttttcatcattgcaggaaatgtatatagcgcaaatataacgtttttttccaaactttcttattatctttgtcaggatatataaatataagtatgggatttttcgatattttcaaaaagaaacaggatagcgccgcagcggacattccggagagccggcaacagcagcaggaagagcttaacgcggggctcgaaaagaccaagaccggaatcttctcgaaactcgcccgtgccgtagcaggccgctcgacggtcgatgccgacctgctggacgacgtggaggaggtgctgattacgtcggacgtgggcgtggaaaccacggtgaagattatccggcgcatcgaagagcgtgtggcgcgcgacaaatacatgaatacgtccgagctccagtccatcctgcgcgaggaggtcatgtcgctgatggaggagtcgcacggctcggagaagcatttcgggctcgacgccaggcagggcgaaccctacgtggtgatggtcgtcggcgtcaacggcgcgggcaagaccaccaccatcggcaagctcgcggcacagctgaccaaggccgggctgaaagtctggatcggtgccgccgatacgttccgcgccgccgccatcgaccagctcaaggtctgggccgaccgcgccggggcgacgatgatccgtcaggagatgggatccgacccggcatcggtggcgttcgacacgctgacgtcggccaaggccaacggcgccgacgtggtgctgatcgacacggcaggccgcctgcacaacaaagtcaacctgatgaacgaactgaccaaaatccgcaatgtcatgggcaaggtcatccccggagccccgcacgaggtaatgctggtgctcgacggctccacgggacaaaacgccttcgaacaggcacggcagttcacgcaggcgacgcaggtcacttcgctcaccatcaccaagctcgacggcacggccaagggcggcgtggtgatcggcatcagcgaccagttccacatcccggtgcgctatatcgggatcggggaaggcatcgaccagctccgcattttcgaccgcagggagttcgtgaacgccctgttcggccacgaaacgaaataaagcgccccacgcctgtgaaaccaatcctctggggcttattgctcgctctgggatgcagccttccgggaaaagcccagcaacccgccgcgggtgagtagccgggacagggacaccagaccaccccggtttgcgccggaacaacggacgacacacagtaacaatataagtatcaggcgacaggctccgaaatcggagcctgtcgccttttttatgtccggttcaaccgaacggcccgtgtagggaagtcaattatacgcaatctgaggattcaaatacgcaaaccacgcccagcaagaatttcgatatacataattttgaatatcgaatttccacatattacaaatcgacgacaaacgtccgtgattatttaaattattttaataaatcaagccaacctattcggtgcaaaccgagcctctataccaataatactaatattaaccttaactctatgaaaatgaatttgactacttcggagaagaacaggggcatcgtccgctttcttctgatgagtatgctgctgtgcctactcattcatccggcccaagcgcaagaccgcgtcacggttacagggcgtctgaccgacaccagccacgcaccgctcatcggcgcttcggtcatagaacaagggacgaccaacggcgttacgaccgatacggaaggtaactaccagatctccgtaagcggcaacgcgaccctcggcttctcgttcatcggctacaaaccccagagcatcgcagtcctgaaccgcaccgtgatcgacgtcacgctggaggaggatgccacgatgatcggcgaagtcgtagccatcggttacggttcgcaacgcaaggaagacctctcgatggccgtgacgaccgtcaagctcgacgaagcggccaaaagccgcgcctcgaacctggcgaccatcctccagggccgtatgccgggcgtcaccgtacagcagaccggcgacccgatgaaacccgcctcgttcaccatccgcggccgcggatcgaaaggcaacgacgacgacccgacctcgggcgacggcgtacttgtcgtcgtggacggcgtgcccaacgccccctacatgatggaggacgtcgagacgatcaccgtgctcaaggatgccgcctcggctgcaatctacggcgcatcggtaggttcgagcggcgtcatcctcatcacgacgaagaaggcccagagcggcaaactccgcgtagacgtgaatgtctcgctcggcttcgagaaggtgaccaacctgccgaagatgctcacggcggaacagtacaacgaagtgtgggcaaaaaccgtggagaagaaccccggcagccagcttcccagcgcctccaacccggaggtatacccctggggcaacgtaacccgcaccgactggctggatgagatttttcagaccggtttcacgcagcactacgccgcaacgatctcgggcggcagcgagaaggtacagtccatcttctcggtatcctacgacaagaaggacggcgtgctgctcaacacctacagcgagagtttcaacggcaaattgcagaccgacttcaaactcaccaactggctcaagatttcggagcgtgcgtcgttcgtggtatccaacgggcagggcaacgtggacaccagccaccagggcccgatcatgggtgccatatggtacccgcgcgcggcttcggtctacgagatgaacgaggacgggacatacgcccgcgacgagaagggcaaccgctattacggcggtacgagccccgagtgggcggacgtgaacggcacgccgatgctctacaacccggtagcatacctcgaaaggatgcaccgcaaataccccgagcataagatcttctcgacgacctcgatcgaaatcaagccgatctcgtcgctgacgatcaagtccgacttcaccatcgacctgcgcaacaaagagtccgacgagttctaccccaccatgacggagaaaggcctgcggcgcgacatcaactaccgcgaacagttcttcgaccgggacaaccactggctctcggagacgatcgcgacctatgcacaggtattcggccggcaccacatcagcgcgatggcgggcttcacggccgatttcaagaggctgcacagccgggaagtctattcgagagggtatcccgacaacgatatcaacagttcgatttgggatcaggccaatgactggacttcgaacacgcccaaggagagcaaatacgaacaaaccatggtgtcgttcctggcccgcctgggttattcgttcgacgaccgttatttcctggtgggcagcgtgcgccgcgacgcctcttcaaagctgcctgcgagcaagaactacgactggttcccctcggtatcgggatcgtggaaactctcgtccgaaaaattcttccggaatgcaggcctcgacaaggttttcgacctggtcaagttccgcgcaggctggggccgcatcggtaatgtcgacctctatccgaacaacgtcgccaccgtcgagctcctgaactaccaatacccgatcatcttcggccagaacctcgaccagttgctccagggaacctacctcaacacgattcccaattattccgcccgctgggaaaccaccgagcagaccagcgcgggcctcgacctgacgatgttcaagaacaaactgaacatcagcgtggactactaccacaaggtaaccaaagacctgatcgactacattcccacgcccgaacagatcggtgtggcggatcctcccatgggcaatatgggcaacgtactgaacaaaggctgggagttctcggtgaactacaacggcagtgcggcacagggcaagctgacctacaacgtctggggtaatttctcgacgaacaagggttacgtacgcgaatacggagtccgccagggcgccgtgatgcacacctcgcccaacctgaacagcaacccgatcctctactccgacgcagggcaaccctggtattcgttcatggtctaccgcacggcaggcatcttccgttcgcaggacgaaatcaacaagtacatctacaagaaccccgaaaccggcgaggcgaaactgctgatgcccgacgcgaaggtcggcgacctgatcttcatcgacaccaacaacgacggcgtgatcaacgacgacgacaagaccttcgcaggttcctacacccccaagaacaccttctcgttcggaggctcgctcaactggaaaggcttcgacttcagcttcttcttccagggcgtgaccggcaacaaggtctacaacggcctcaagcagatggccatgaacggccgcaacgactacggcaacctcatttccgacgtatacaacagctgggacttcaacccccaggggagcaaatacccccgcctgggcctggtaacgggcagcgatacgaacggtaactacagcaaattctccgacatattcctcgaggacggcgactacctgcgcctgaaaaacatcacgctgggttacacgctgcccaagagcgtcagccgcttcgtcggaatggagaacggttcgctgcgcgtctacatgagcatcgacaacgtatgcacgatcaccggttattcgggcgtcgatcccgaggtcggcaactacggtatcgaccgcggtgtttaccccgtatcgcgtttcttcaatttcggtgtgaacattaatttctaaccaacacaaactacaatagcgatgaaaaagatattgataatagccagcctcgccctttgctgttcccttttggcgagctgcgaagacttcctcgacaccaagaaatacggagccaagaccgactgggagacccaggaagacgtagagaaagcgctcgtcgccctcttctccttcaacacgaacgactccgagggcgtcaccggccgcggcatcacgtggttcgaatgctgcagcgacgacatgaccgtaggccgcccccagggcgaagccgaagacatccgcaacttccgcatgtcgcccagcaacggccgcgacgtgaagaacaactggaagatcatgtacgaggtcaacgccaaggccaacaacatcatcaaggtcgtcccgacgatgaacctcgacaacgcgttcaagaccaaagccaccggcaccgcctatttcttccgcgggttcgccatgctgtggctctcgccctactacggtgacaacggccccaacggcggcattccgatcatcctcgacacgacggagcccgcagccatggacagcccgcgcccggcctccgtattgcagaactacgaccagatcatcagcgacctgcgcgaagccggcgaacgcctgcccctcttctcgcagctcgcaccccaagagtacggcatgccccacaaggccgcagcctgggccttcgccgcacgcgcagccctctatgcagcccagttcgacgccaaatactacgacacggtcatcgaaatgtgcgacaaggtgatgggacttaccggcgccgacaagcgcgagctgttcgacgacggcacggacaaggccttcgcaaacctctggcgcaagcagcagaatttcggcagcgaatatatcttctcgctgctgggcagcgcggtcgacggcccgaaattccacggcatgtccttccagaacggcggctggggtctgtataaccactggggttatttccagcccaccctttccctgtggaacgcattcgaatcgggcgacacccgccgcgacgcgacgatcatctaccccgggcagacgatccgcttcatgggccgggacatcgtattcggcagcagctcctattcgatctcctcggatacgggcatgtcgttccgcaaattcctctccccgtgggaagaggccgactgcaaaggcaaggaggtgaattccaacggcgacaacgccagcaacacgctcggcacctgcctcatccgcttcgctgacgtcctgctaatgaaagccgaggcgctgatctggaagaacggcgaaggcgacgccgaagccaaacagctgctcaaccgcatccgcaaacgcgcccgtctcccggagaacagcccggcgaccaaagccgagctcaagaaccagcgccgctgcgaactggcgttcgagttcatgccgagccgccacctggacatggttcgctggggcgacgccaaggaggcctatgccaaacccacgcagcgcgtgaactcgcactgggattacgacctgcagcaggtggtcatcgacgcgccgagcaactacgacaacgggcgtacgttcgaccccgtcatcaaccaggtgttcccgatccccgtaacggcattcaacggcacggtgaacctgacccagaaccaaggttattagtaaacaaccaagatcattaccgaatatgaaactgttgaaacatatcatccgtgcaggtgccttatgcggcctgctccttacgacggctgcggccgaggcgcaaaccgtgcaactgaaagtgatggaatggaacgtgttgtcgttcgaaatgacggacaagtccaaccagatcgacttcatcgtcgacgagtacgtcgacctgatcaaggcccagaaccccgacatcgtctgcatcaacgagctcgagaccggcaccagccgcatgggcaaggagaagctgaccgaactggcgtcccgcctgggcatgtacccctatttcatcatgtcctatcccaaggacgtgggattctacggcaacggcatcctctcgaaatacccgatcgtaagttccttctctgcattgcatccctacaaacatgccaacggcgagggcaactaccagtggaatacaggctatgaatattatctgtatggttatgaccaacgaagtatgggctacatcgacattctggtaccgacctccgattcggacggacagatcgtgcgcattatctgtacgcatttcgaccattgcggaatagatcaggtcatccaacagcaggaacaaaatgttgtaacacaagccgggctgaacaatcccgaatacccgacaatcctgatgggagacttgaacgtcggatggggaacaaacgtgtttcctgaattcagtaatttaggcgaccacatcggggtgtattgggtagaccacatctttgctttccccaaaggtcgatggacgggccacgatttcaaatcccattcctgccctgccgccaatggcaaggcatcgctctccgaccatgacccgatcacagccaccttggtacttaaatagcagttcgtcgaattcacaaaagtcgaaaatatgaaaaacatacaaaaatatctcgcagcattgctcgcgctcgccatggcagccccggtatttaccggttgttcggacgattacgagtattcgctcagttcggtggtcgcaaagccgtccgacaagttcaacgccaggatccagttcgtcagccgcctgagcgacggggcgctgattacgggcgatgccgactacacggcactcaacaactacatggtcaacacgctcaaaagccgcgaagaggcatggctcacggtcttcgaccgttcggacaatgccaatttggacaaggtgatgcagatctcgatcaacacctaccgctggacggccttcgccttcaacgggctgaccgacaggacgacctacaagggcagtacgcttttcttcaaccagccgacccgctcggtcagggccacggcctgcggcaaaggctgctacgtcacgggcttctccccgctgatggaaggtacgcgcaccgacaaggatgaaaatggcaccgtgaccggcaccgtagacatcgcctacgacatcaatttccgcacggtacgcttcgaaacgaacgagcagatcaacgccttcggcggtgaaaacggcgtcatgaacacgctcaagcgcgaaaatatgaacatgctgatgatcggcacggtcaagaacgacctgctcggggcgctcgaatcggcggtacagaacacggacggttcgttcaaggtctacaacgtcgcgtccggaagcgcatatacgatcttcatgctcgccgaagaacgcttctggggctttacggacgtttcctcggtttctgtcgggaacggcatcgaggcctacacgataaacgtcatgtggtaagggttggtttaatttagttggaaggaggatgcggcttcggggccgcatcctctttttatgcacggggaaccgccgcggcaggcggcgattccgggattatttcgtacttttgcagcggaaaccagatacggaatgaaaaagatcaacgtcataacgctcggctgttcgaagaacacggtcgacagcgagcacctgatggcacggctcgcggcggcaggctacgaagtccttttcgacagcgaccgcacggacgccaaggtcgtggtcatcaacacctgcggattcatcggcgacgccaaacaggagtctgtcgacatgatcctgcgcgcggcggccgcgaaaaacgccggcaagatcgagcggctgttcgtcatcggctgcctctcggaacgctatgccgactccctgcgcgccgaactccccgaagtggacgggttcttcggcgcccgcacatgggacggcatcgcccgggcgctgggcgccgccgaagacccggccctggccactgagcggcacctctcgacgcccaggcactatgcctacctgaaaatctcggagggttgcaactggaaatgcggctactgcgccatcccgctcatccgcggcgggcacgtttccgtgccgatggaggaactggaagaggaggcgcgcaaactcgcggcccgaggcgtgaaggaactgatcgtcatcgcgcaggacacgacctactacgggctcgacctctacgggaagcgccgcctggccgaactgctgcgccgcctgtgccgcatcgacggcatcgagtggatacgcctccactacgcctatcccacggcattccccgacgaggtgatcgaagccatggcatccgagcccaagatctgcaaatacctcgacatcccgttccagcacatctccgacgcacagctctcggccatgcaccgccgccacaccaaggccgaagcctatgcgctggtcgaaaaattgcggggggcgatccccgacctggcgctgcgcacgacgctgctggtcggctatcccggtgaaacggaagcggattttgcggagctggaacagttcgtacgcgacgtacagttcgaacgcctcggggtcttcgcctattccgaggaggagggcacctactcggcacgcgaactggcggacgacgtcccggaggaggtcaaacagcagcgcgtggaacgcatcatgacgctccagaacgacatcgcccgcgaaaacaacctgcgccgcgtaggccgcacggaacgggttttgatcgattcgcggcagggcgactactatgtcggacggacgcaatacgactcgcccgaggtcgaccaagagatactgatcccggctgcggaacggcgtcttctgcgggggcatttctacgaaatacggatcgacggcgccgccgattacgacctttacggaaaggccgtcgggaaataaaatttgttttttagcgttccttttcatacctttgaaatgtaaatcggactttacccgagacccaatggccgaaaaaagcgtgataacgaatatcgaagcccgtatccggcagctcatcgacgaccacaaaaggttgtcggaatcgtgtgcggaactgacggcgcagcgcgacaacctgaaagccgaaaacaggactttgcaggagcgcatccgcgaactcgacggcgaattgtcacgtatgcaactgacggagggactggcgggtgaaagccgcaaccgggagaaagcgcgggcgcgcgtcaaccgtcttatgcgggaggttgacaaatgcatcgcactgctcggaaggcccgaataacgggaagggacggcgaaccggcagtaacgccgcaaccagcacccgggccgcagatgaataagaggcagcaagataaacgaaacaaaaacgacatggcacaacaggcgataaccctcaagatagccgggaaaagctattcgctcaacatcgaaagcgaaaaggaggaggtataccgtcttgccgaacgggaggtgaacaactacctcgcggcgataaaacagaacaacttcaagaactggacggatcaggactacctgtcgatggccgcactgaaattcgccattgcaaacgtcgacatgcggcaaagccgcgaactgggcgacgaagacctgaaacatctggggcgactcggcgaagagctcgacgcctacctcaacaccctgcaacggtaacggagggtaaaggccaggcacgggatttgcccgggcaaaccgtaaaaaacgaggttctttaacatacgaaggaaaaatctacccgcatagattccttacagctttgcgaaactgaacactttttaaattggggcaactcaaggcgcttcaaaatcaggccttgacccttcggggtgtatgctacggcgtaccgttggaagattgcgattgtcggagcccccacacatgacttatctgcagattcgtcaaacaagactaaggaatcctatgcggtttttttatgcactacaacaaaccctataataacaaattcaaaacagcaacaaaaacatgtataccaccattttggttgcctgcatctctgccgtggccgccgtcggaatctacgcggtcgtcacgaacctcgtagccaagacctcgatccgcaagcggcgcgaagccgccctgaaagaggccgaggccgaaggggagatgattaaaaaggagaaaatcctccaggcaaaagagaagttcatacagctgaaaagcgaatacgaccgccaggtcaacgagcgcaaccagaagatcgcccagagcgaacagcgcgccaaacagatcgagggcaacctgcagaaccagcagcgcgagctggagaacaaactccgcgagaacgagcgcctgaaggagcagatgcagaaccagctgcaaatcctcgagcacaagaaggaggaagtcgatcagatgatgcgcgagcagaacatgcggctggaacaaatctcgggcatgagctcggaggatgccaagaacatcctcatcgagaacatgaaggccgaggccaagaccgaggctgcttcctatgtgaacgaaaccatcgaggaagcgaagatgaccgccacgaaggaggccaagcggattatcgtggcttcgatccagcgcgtggccacggagacggccatcgagaacgccgtgacggtcttcaacatcgaaagcgatgaggtcaaaggccgcatcatcggccgcgagggccgcaacatccgggcactggaggcagcgaccggcatcgagatcatcgtcgacgacacccccgaagccatcatcctcagcgggttcgaccctgtccgccgcgagatcgcccgcctggcgctccaccagttggtaaccgacggccgcatccacccggcacgcatcgaggaggtcgtagccaaagtacagaaacagatcgaagaggagatcgtcgaagtcgggaaacgcaccacgatcgacctcggcatccacgggctgcaccccgagctgatccgcatgatcggcaaaatgaaataccgttcgtcctacggccagaacctcctgcagcacgcccgtgaaacggccaacctcgcgggtatcatggccgccgagctggggctgaaccccaagacggcacgccgcgcaggcctgctccacgacatcggcaaggtacccgacgacgaaccggaactgccgcacgcaatcatcggcatgaaactcgcggagaaatacaaggagaaacccgaggtatgcaacgccatcggcgcccaccacgacgaagtggagatgacttcgctgatcgcaccgatcatccaggtctgcgacgccatatcgggtgcgcgccccggcgcccgccgcgaggtggtcgaaagctacatcaagcgcctgaaggagatggaggacatcgccctctcgtaccccggcgtcgtaaagacctatgcgatccaggccggccgcgaactgcgcgtgatcgtcggtgcagacaaactcaccgatcaggagtcggaagggctgtcgcacgatatcgccaagaaaatccagggcgagatgacctatcccggccaggtgaagatcaccgtcatccgcgaaacccgcgccgtatcgtacgcgaaataagaaccccgcccgtaggacaggctgcacacggcctgcctgccgcaaatttatcacaggtaaaaatccctccgcaaaacggagggatttttttatctacggctctcttaccggtaagctccggcacacaacgacagcttatccgcgacagaatccatacacaatcgcccgattcccgccacgggaagggccataagcctctcacccgccggagggggggggctgccagcgggattatttccagctgttacgcttcctgaaatcggacggagtgacgccctccttatgcttaaaaaaagtagaaaactgcccggtattcacgaacttcaaggcataggcgatatccgatatatttatatccgtccccgtcagcatctctttggccttcaggagccgctgctgcaactggtactgcgcgggggatatcccggtgtactccttgaatgtcttgcggaaccacgaatagctgacccccagttcccgggcgatcgcctcgacatcgcgggggttatctacatccttcatcagctcccgcgcggcattgactttctcgaggatgaacgtattggcataggagttattccgctccttgtaatagatggagcccaggatgtgcagcacgatactcgacatcatctgctggcaccccgccttttcggccgacgccaactgcaggatctcctcatagagactcacgatccccgaacttatcccgatattatgcaacggctgctcgcgcactaaaaagcggttcgctaccctgtcgtcgatataggatcccttgaacccgacccagtattcgtcccagccggtctcatcgtcgggatggtagctatgccactccccgggaaacaacgagatcaccgtcccggccttcacaggcgcctcgggacaggactgcgaagcgaaatacccggaacccttggtgatatagaccaactggtattcgttcagtatccgtccgccgcggggcatgaaagagtagttgtccggatgggccgagagcgggtacttcgtccccggcggaataaactggtatccgatcgtcgtgacgacaacgccccatttctcgtccttatccccgatcgtcaggtaacataacttgtcacgctcctgcttcatgtcagatttgataggttggaaatcatttttcataagcaaatataacttttttccgcgtaatatgcagattttaacacaataagattttccggaagcgattatttcattccggaagcgtcttcacccaccgaggccgggctcccaatccccacatccgcaacaacagtccctgtcgcgccgcaatccgccccgccaccagcctccaaagcctcttcacatcgttccggttatcccgcacggcataaatctgtattgctgcaaccagcctccggcagggcggcacataccgatccggaaacatcgggagatacctatacatgcttcaaaaaaagcccctctgctgccatatggaaccgcttgcgagggggtaattatgaaatctgataccgaaatattaaaaaatgagaagaatcggacttcccccgcggaggattcttaaaaatgccccgggttttatatacgggacacaataacgtactacaaatgctcaaattcgtacctaacgggggggggaaatcctctatatttgaattgcaattttaacgtgttgaaagatagttttaacaaatcataaacctaaaaacaacctaaaatcgtataagcctatgccaaaatgactcctttcccctgaggtttctattatatatatgtacgaatcgtgcatatgggggaatttcattttcaatcatcatttatctactatggacaaaaccaaccaatctttatgaagaaaaatttatccatttttatgacagccggaagctggttgcagcgggcgcttgcgttgtttttgtgcgttgctgccctcgaagctgtccaggcggcaccccaagacaccaaaagaacgatcacgggtacggtcgtcgaccagaacaacctgcccgtcgtgggagccacagtcatgatttcgaactcggctaacggtaccgcgaccgattccaacggccagttcaccctttcgggcgtaaccgacaacgacgaactgcagatttcgttcctcggctacaagaccgtaacgatgcagataggcacgcgcaccgccatcgcggcaacgctcgaagaagattcgggttatctggatgaagtcgtagtcgtaggttacggcacgacgacgcggcgccacatcatctcggccgtttcgaccgtgaagtcggaggcaatcgagaaccgcccggtggccaacatccagcaggcactgcagggtgcggcagccaacctgatcatccagaccaagaatttcaacccgacggacaaccagatgaacatctcgatccgcggtgtgaacaccatgggtaacaacaccccgctggtagtcatcgacggtgttccccagccggacgcaggccgtatgaacgacctcaacccgaacgacatcgagtcgatcaacatcctgaaggacgccggttcggccgccatttacggtgcacgttcctcgaatggtgtcatcctgatcacgaccaagaacggccgcaaggagatggctccgcagatccgtttcagcgccaaagtcggtgtcgagaaccccgacatcctctacaaggccgttccgacctaccgcaacgcgatcctgcgtaacgaggccctgagcaacgtcggccgcgaaccgctcttcacggctgccgaaatccaggatttctacaaccacggggactgcgaggctgccgtagagcaggccatgcagaacgcgctccagcagaactacaacgtaagcgtcacgggcggtacgaagaccaccacctacatgctttcggccagttacttcgaccaggagtccaactacgtgggccccgattacggcgtaaagcgctataacctgcgttcgaacctgacgaccgaattcggccggctgaaactgggcgccaacgtcggtttcacccgttcggagatcaattccccgtcggatgccaacgaaggcttcctcttcgccgacctcatccgtttcccgaactactacttcaaccgccacgaggagaacggaatcttcttcggcaacaactataagtacggcggctattccgtatcgccgctggccggccttatgggcggtggcatcaacaaaaacgaccacgaatacctcaccggtacctttacggccgatttcgagatcatcaaaggcctgaaagcccgtgccgtccttggcggtgaagtccgccacgagcaccgtttcacctcccacaagacctatcagtatgtggtggacaacggcgccgaacactcggatatctcgaccgcttcgaccggcggcaacaccaagcgcgaagccgacgactggacgaagaaagtcacgttcgtcaccgcacagctgatgctggattataaccgcacgttcaaggagaagcacaatgtaaccggactgttcggttggtcggacgaatcggagatcggctatgacatcacggccgcccgccagggtatgaacagcatcgaccagccgggtgacggctcaatcgccacggaaggcaccaaactgtcgtcccagagcaaataccgccgtgcattgcagtcgttcttcggtcgcgccggatactcctacgacgaccgctactatttcgaattcaccgcccgttacgatatgtcttcgaagttcctcaaggagcgcaacggcgccttcttcccctcggtatcgctgggctggcgcatgtcgcaggagaatttcatgcagacctaccgcgaccgtgtcggcgacctgaaactccgtgcttcgtacggtctgaacggtaaccagcaggatgtgggcgattacgatttcatgaccacctacggcacctgggccaacgcctacggtttcaacggtgtcccggttcagggtctgatgttcaccatgggtaacgaactgctgacgtgggagaccgcaaagactttcaacatcggtgtggatgcgacgttcttcaagaataccctgagcgtcaacttcgactacttctacaagcgtacggaagatattcttctctccccgatcgtccccggaaccttcggtgcctcgatcgccaaggagaaccgcggtatcctcgacaaccagggctgggagcttaccatcaactataacctctctcgcggcgactggaagcacaacttctcgctcaacctcgccgactcgcagaacgaggtcgtccgctacggaaccccggctatcagaacttccgacagcgccggcaccatcatcatggagggccttccgatcaatgcgctctacggctggaaaacgaacggtttcttccagaactacgatgaaatccaggatgcagccctgccgaccggcatcgaccgttcgcagctccgtccgggcgacgtgcgctatgtcgacctgaacggcgacggcaagatcgacgaaaacgaccgcacctacctgggttacgccttcccgcgctatacctacggtttcacctacaatgtcaaatggaagggcatcgacttcagcatcatgctccagggcgtgctgaagcgagagaacccggttcgcggcgagctcgtgcagccgttccacggcgattattcgatgaccatgttcgaccaccagctcgactactggtcgccgcagaaccgcgacgcacgctggccgcgcctggcagtatcgggctcggtaagcgatacgaacaactgggggcacaccggttcggatatgatgctgctcgaaggtgcctacatgcgtatcaagaacatccagctgggttacacccttcccaagaagtggacaaagaaattcggctgcgaggcactgcgcatctatttcgacacccagaacccgctgacctggactaaaaacgggttcgtagaccccgagaccacgtcgttcggcaacaacatgagcggcggagcggacaactctgtgcgcaactacccgaccctgcgttacttcggtggaggtatcgacttgactttctaacaattaaacaatcggaaagaatatgaaaatcaaaaatatattagccatcctctccctcggtatggtcagctgcgtaggccttgagcaatacccgacgacctcctataccgacgagactttctggacaatcgaggacaatgtccgcacggccctgtacctggggtacaaccagtgctggcaccaagactactatttcgccaataacctgctgtcggacgacgtgtacggcagccgccactcgacgaacgaaaccagcatcgtaacgggtatggccaatacctcgaacggccgcttctcggacgaatgggacaagtgctaccaggaactgcgtacgatccacacggcgctcgacgcccaggatcgcatgaatatcgacgagaccttcaagacgcgcatgcttgcagaactccgtcttatgcgcgccttcacctacctgcgcctggtaacatggttcggcgacgtgccgttcttcacgaccaacccgacgctccccgaatcgcgcgtggtcaaggtaacacccgccgccacgatcaaggagttcatccactcggaacttgccgaggtggccgagatactgccgaaaaacacggatattccggaatctgaaaacggacgttacacccgcggtacagccgtggcgctcaatgcacgtgcatacctttatgacaacgatttcgagaactgcgccatctggtgcgacaagctgatcaattcgacggagtacggcacctacgcactcgaacaggactacaagaaacttttccatgaccagtcgtgctgctacggccccgagtcgatcatgacgatcgaattcgccacgctcggaggcattgacaacatcgtcagatcctggaacaatttcaatgctttcgttccccagtccatcggtaacaagggtgtaaccacccagtcgccgacgcaggaactggtcgatacctaccgcaaactcgacggcagcgtcgccgatgacacggactacgagaagcgcgacaagcgtttcgaagcaaccatcgcctacaacaactgcaccgtggatattccggaagcaaaaaccctgagtctggctggctcggaaggcacgggtaaaggcacttaccaggtctttacgaaggcatcggacgagagccaaaccagcgacaagcagcaccgtttcgactcgtacaacggcacgcaggatcgcacggctacggggtattataccctgaaaaactacaatgccgacatggtcgacagcaagggcaacacctacaaatcactcatggaaatccgctacgccgacgtgctgctgatgtatgccgaatcgatgaacgaacagagtaaaatgacgtccgacatctgggacaagacgatcaagccgctgcgcgagcgagccggattcgacgccgcatactgctcctatccgggcagcagcgacctgcgccaagttatccgcgacgagcgccgcgtggagctggccctcgaaggccgccgtgtattcgacctgcgccgctgggcgctgctcgacaatccgtcgctcaagagcacgggagccgcatacctcacgacccgcgctacgggtgcccccttcctcgacgatggcagtaacatccagtgccagaatgcctacaacatgaaatactggttccccattccgcagaaggagcgtgacatcaacgccaacctgccgcagaacccgggatggtaacagccaagttgtaaaggagattaactaaccaatcaagaaaaacacatgaaaaccatattgaaaaatatcatgttgttcgccgcaggagccctcaccctcgggtttaccgcctgtgaggaggatggccaggatctgaatttcaatattcagcccggcaacgagctctacgcacccgcggacaatgcatcggtcaatctggatcagggattgaataccagtttcgaatgggcaccttccgttgccgaagacggcggatacatcacttacgaagtgctgttcgacaaagcggacggcgatttctcggcaccgcttgccgttaagaacagccagatgaccggctccaaagcctcgctgagcatctcggccaaagagctgaacgaagtggctgccctggcgggaatcgagaatgccaagaccgggcagctcaaatggacggtacgtgccggcaagggtttgttcgcccagacctacacgcaggccaatgtgctcaccgtttcacgtatcaacctggtcgacccgctgccgacggccgttatgctgaagggtgaagccgtggaggatgccgcaggcatcaagctgatcccggcgtacctcgacggcaaagcagtcggttcgggtgtatacgaatgcttcacgaaaatctcggagggcgaattcaccgtagtcgacgaactggatcgctactactcgctcaagagcaacggccgcatcaagcatatcgtcgacggctcttcgaccgccaacacgctgaaggccggcatctactggatcaagatcgacttcagtgcgatgacctacaccgcagttcaggtcagcatgatcgaatactatgccgcatcgtgggcagacaactcgatgtcgaccgtctacaagaccctcacctacaaagggaaaggcgtatgggagctgctcgactacgataacgaaatatccgtcaactcttccaacgatacgcgccaccgcttcaacatgacgactgccgacggcaacaaatggttcctcggaacgacgtcctcgctgggatcttcctacacgaccgactatctgagggtgtacatctatactttcaacgataacgataaggactggaacaagacctataatttcctcgtttcggattgcggccgtgatttcgactgctacctttacctgaacggagacaacaaggcaggcggattctggcatgaatacatcttcaaatagcaacaagataccggatggttcctccctccggggaggagcctcccggaacctttgccgcgcagtacgcaaggcgtcacgcgcggaaagctattcgaagcacggattcagacacggaaccggaaacaaaacagtattgaataaaaattaaaatcaacctataaattatgagaaaatctctattcagatggactgttgccatgctgaccctttccgcagcagccgtctcgggcgcctgctcggaacaagaatacgaggatcttaccaagccggaaaaagtaacagggaacacccagtacgcgccctacacgatcgattggactgaggctgcggactcctgctccacggctttcatcgagcgcttctactgcagtgaaaaccgcaatggctacgaaggcgtgttctcgtacagggaatacaatgcgaccggcagtgccaattccaacaactactggcagcaggcacacgccatggctgccatggtagagtactacaaccgtatcaaggcgaccgatgccgaggaaaaagcccgtatcgagggctatttccagaaatggtacgataagcgcggtaacaactacgaaggcaatcagaactggcgcggttcgacgggtttcggcaacgatttcaccgacgacacctgctggatcattatcgccttgttccagatgtacgacgcaaccggcaaccaaacctattacgatgcagccaaacagacctgggacgagtgcgtatggccccgtcacgagttgacgcagtccggctggctgccttggaaatggtcggatctggggcccaacgagtgcacgaacggccctgcagccatcgcagccgcgaccctggcacagtacagccgcgcagcaggcaacgaagaggctgcccaggaatacatcgaccaggcctgcacctgcttcgatcagaacatcgacgtgatggcatccgacggcacgctgggttcgaccccgctgagctacacgcagggtacctgcatggaagccggccgtctgatctggaaactgaccggcgacacgggctacctgcgcaaggccatccaggcgggccgcggccagatgacctcaacccgcatgaacgaagtctacaactatgaaatgatatcgcgcgacgagggtacggacgagaacaactcgatcttccacgccgtgatgttccactggttcacgcgcatgatcctcgacacggaagtcgactcgttcgacggcaaaatccgcaaggagctctacgattatctctaccgtcatgcctcctactactgggcgacgatcgacaagacgccggaaggctggcccgaggcttacttcggtgtgaagtgctaccagccccgctcgtcgatgaacggcgacgtaggcggttcgctgggtgcatataccagtgctgcgcaggcgatcgaatccatgtggatgatcaaggatgtcaagttctaacccgtcaaaaccaaccgatttatgaagaagattatcatgatgctggtcgccggagccatggcatgtggcctggccgcctgcagcgacgacgatacgacgccttcgggcaatatcacccccgcggatcagctttacctgccgcgcaataatgcgacgatcatgctggagaccggcaacaccacccacttcgaatgggcggtttccaaagcgagcaagaacggctatatcacctacgaactgctgttcgacaaagtagacggggacttcagccagccgctttatgtcctcaccagcgacaacaacggttacgaaccctcggccaaggtcgcaagttctactttaaatacggtcgccacactcgcaggtgcagacctgggcgaaaccgccaccgtcaaatggacggtacgcgcctggtgcggcctcaactcggagatttacggcagcgaagccggcgtacgcacggtatctctcacccgtatcaattccgtagacccgatgccttcggagatcaagatttcgggaggaatcaccgaggaacagaaggagctcaccctgtttgccgccagcgtcatccacacggcgaaaggcaagtacacggatcagcgcgaggccggggcttacgaaatctttacgaaactgactgccggcgaactggttatcaccgacgacctcaaccgccatttcagactggccgagaagaacaggctggaactcgtcaaggacaacgaagcgacgactgccgtaactgtcgaacacgacggcatttactggctctacgtgaacttctccaacatgacctataagttcaaggaaatctcgaaggtcgagctcttcatttccaacccgggcaacaaggccgaactcacgtacgaaggcaacggcgtatggggcattatggactacgcatggaacgtcaaagagggcggtaacacggactcccgccacaagttcatctgtacctatgccgacggctcgtccgagttctggggacatttcgaagacgactgccatgactcggagaagtccgaggctgaaaagaatccgctgttctacaacattttccgccatacattcaacaaccagtgggataacacttggaaagtgaatgaaaaggaaagggaaggctacggaaagaaagtttcgttctgggttcatatgaacaatacggatgacgacctcttcctgctggagcgttcgctcggagtacccctcgcagtcaacatgcagggttccgccaccgagaaccaggaagccatcgcgctgaacaaggcactgcccgtcctggagaccaagggtagcgacgacttgaaagtcggtcgcgaggcgagcattttcgaatgcttcacgcaattgtcttcgggcgatttcagcattaccgacgacaagggccgctactacaagctcgacgcaagcaacatgaccttcgccatcgctgaaaacccggcaacgaacaccgtttcgaaagccggtatctactgggtcgccctggatttcaacgccatgacctacaagatgcgcgaaatcgagaaagtggaactctggaacaagccctggttcggacatgatgtacccgatacggcagagatgacctatcaggggcagggcgaatggagtatttccgattatgcatgggtcgtttcgcatgaagacggaagaaaggacacccgctactatttcatctgcacctatgtcgacggcttcaaggagcgttgggcgtattacagcgacgactgccgggagccccagaacagcaaccccggaaattatccgaatttctacaatatctaccgcttcgaccactcgaagttggaagaatgggatgattcatggaaaacgctgaacgactcggaaggcgtaggcaaaaaggcgacgttccatatctacatgaacaatacgtacgctgcagactacaagcacacgcgttcgttcaaataacagcacaaaccgacaaggatagcatccttatacagaaaagaaacggtcgacagaaacagtcggccgtttctttttacagtatccccggtcaaacgagctatccggataaatatattacttttgcacctatgaaaccatccgaagaactgaaggcctacatcgaggccgagatcattccccgctacggggcgttcgatgcggcacaccgcaccgaccatgtgcgcacggtcattgcgcagagcctcgtgcttgccgggcattacgaggtggatgccgacatggtctacgcaatcgcagcctaccacgacacggggctggcatacggacgggagtcgcaccatatccgctcggccgaaatactcctcgccgacaccttcatgcggcaacggttcacagaggaacagatggccgtgatgcgcgacgccatcgaagaccaccgggcctcgtccgaccacgccccgcgcacgatttacggacggatcgtagccgaggcagaccgctgcctcgaccccgaaaccgtaatccgccgcacgatacaatacgggctggcacactaccctgcgctcagccgcaaagggcagttcgaccgttgcgtggaacacctgcaacgaaaatatgccgaaggcggttacctgcggctctggatacccgaatcggacaacgcccgcaaactggcggaactgcgtgcgctgattcacgacacggcacggctgcgcgaagccttcgggcggatttggggagaggtttgccgggactgacaaccggatcggggtcagccgcacgcaccccgggacaacgccccgcccggaggtacccggctgcaaagacaggataccggccgaggtaacccggaaaagcgataccccgcaggccgatggcctgcggggtatcgctccaataggcgccggcgcctattcggcgtcgtgcggaaaatatttcatatactgcacgcgctggtaaacatcgctttcggcattgccgtaattcatcctgccgcggaactcgcccagggattcgaaaccgtggcgctcagcccactggtcgatgaaccggttgatgtcggcaatgaccccgaagcccttctcatggattgccgagcagacctgcaccgcattggcaccgcataacaacgctttcacggcagcctcgccgtcgtgcacacccgtcgatacggcgacatcgagttgcgggagggccgtagagcaaagcgccacgctgcgcaggacgttgcgcaattccgcaggttcgctgaacgggttgccgttgacgaacgccatgcgctccacgtcgatatcgggttcgaagaagcggttgaacatcaccacgccccgcgccccgcgcgccagcagcgaatcggcgacggcaagcacattggtcaggcgcatcggcagtttcaccgacaccgggatcttcacggcagccgccacgcggcgcacgacatcggcgtactcctgttccaactcctgcgccgtacggtggcggtcggtcggttgcagaaagatgttcagttccagggctgcggcccccgcagcctccatggccacggcgtagtccgtccacccgtcgtccgccgcgatgcagttgatgctggcgatgacgggtacccctgtcgtacgggcatcggagacaagcttcaggaattcacccttatacgcatcgccgatgtagcgttcgaggtattcgcccgaatcgcccatgccctgcgacgagtaatccagcgcggcggcatgacggatgatctgctcctcgaagatggatttcaggacgacagcgcccgcgccgttcgcgacgcactgtccgatattggccatagtcgccgtatagggcgaactgctgaccacaacgggactcgaaaggtcgagtccgaggtattttgctttcatatcacagaattacattaattttcaaaacattcccgaaccgggcgggccggagtgcaagccggccgggcaggttaaacgaacgggatcttcaccacctcggcgcgcaggggtttctcgcggataacgacggcgacctccgtgcccggtttggcatattcgggcttcacgtagcccaaaccgaagccgaccttcaggcagggcgacatcgtacccgacgtaacatggccgatctcctcgccatcggccgcggcgatcttgtaaccgtggcgcgggattccgcggtcgatcatccggaacccgacaagcttgcgcgtaaccccctcggccttttgtttttccatcagcgcccggtcgatgaaatcctttccttcgacgaatttggtaatccagcccaggctgccttcgataggcgatgtggtgtcgtcgatgtcgttgccgtagaggcagaagcccttttccaggcgcagcgtatcgcgggccccgaggccgatgttcttcagcccgtactccctgccggcctcccagagcgccttccagagtttgtcgccgtcctcgttggccgcatagatctcgcagccgcccgatccggtataacccgtgatcgaaaggatggcatcgcagccggcgaccttcatctttttaaaggtatagtattccatatcctcgaccggctccgcgcacattttctgcacgaccttcatcgccaggggcccctgtacggcgagttggcagatctcgtccgaagcgttgtaaagctccttgccgtggccggcctccatgccgaacgcccggccctgctcgcagatgtggttccagtccttttcgatgttggcggcgttgacacagagcatataagtttcggcatcgacacggtagacgagaatgtcgtccacgatgccgccgtgcccgttgggcatacacgaatactgcaccttgccgtcgaagagtttcgacacgtcgttggtggtgatgcgttgcagcaggtcgagcgccttggggcccttgacccagatttcgcccatgtggctcacgtcgaagacaccggcgccgttgcgtacggccatgtgctcgtcgttgatccccgtgaactcgatcggcatattatatcccgcgaattcggccatcttggcccccgcggcaatgtggtacttggtaaatgctgtggttttcatataggtacggttttaggttttactcgcggcgtttcacccccaggcgcggacagcggtggaactccttcgtccggtcgaagaggtaacggtaggtggtgtgtatcttatggcgcgtggcgcagacataagtctcgatcatgcggttcattacggggttgaaatcgccgatccaggccagctcgagtgtcttgtagcggctctgcgtctccatcatgaagtgccagtaacgcgccatgatggccgactccacacccttgccgtggaattcgggggcgatgccgaagatgatgccgaagatacggtcgcaggatttgcggactttcagctcccacatcaggcggagcttctggatcaacccgaatttgccgttgaacttcccgatgatgcggttcaggtcgggcacggtgatgaagaatccgatcggttcgtcgttgaaataggcgaaaaagatgatgtcggggtcgataatcggcttcatggccttcatcatctgcatcgcctcctcctgcgccatgggcctgacacccgaaaagagcgcccacgccttgttgtaaaccagccggaaattctcggcggcgtcctccaggttgttcatgtcgatattctcgacatgataccccggcgtagagaggagcctttcggcgcggtcgaaaatccgttcgctggcctccgagacattggcacgccagataaagctgtgctggttgaaatagtttttgaagccgtaattctcgaacagctccttataataaggcgggttatagggattcttgtagagcggctggaattcgtagccttcgaccagcagtccccaccagtcgcgccgctgcccgaagttgatcggcccgtccatcgcctccatgccgcggctggcgagccacatgcgcgaagcatcgaacatcatgtcggcgacctgctggtcgtcgatcgcctcgaagaagccgcagccgcccgtgggctgttcctcgatggccgccttttcgcggttgtaaaacgccgcgatacgccccacgacctcgccggccttgttgcgcaccacccagcggacggcttcaccgtcggcgaaaagttcgtttcgtgccggatcgaagacctcggttatgtcctgatccagcgggcagacccagttgcggttgcccttgtaaatcttcttgggtaaatcgagccattcacgctcctgtgcggaggttgtgacttcctgaaggatatatttgtccgtattcattgcgaatcgttttttatcagaacaaagatagaaataaaaaacgaaaatcgcgcaggccctgccggaaagtcgctgacaggcaaaagaaagcccctgtaaataaaccccgttccgcttgcgcgcgatgaaaaatatgcctacatttgtttgttattgcgtcttcaaatcccactacatcatgacgacatccagctacaatgaattcggatggcgcgacgcccagccgatgttctaccacaaactgctcggcaaatacatcgagcggttactgcccacggacggttcgccgattctggatgtaggctgcggaaacggttacttcgccaattacctggctggaaaaggctattgcgtctacggcatcgacgcatccgaacaaggcatagcgatcgccaacaggatgaagggagggggaaattcgaaccggtttttcgtctgtgatgtaacctcgggcaaactcccgcccgaactgcgcggcattcccttcaaaacagtgatttcgatggaagtcatcgaacacctctaccaaccgcgggcattcgtattgttcatccgcagcatcctcgaagccagcggcggaggtcagttcatcgtcaccacaccctaccacggctacctgaagaacctcaccatcgccttggccaacaaaatggattatcacctgagcgccctgtgggaaggcggccacatcaagttctggtcgcgccggacactcgccatcctgctcagggacgcgggataccatcatctggtctttacgggcgccggacgcataccctacctctggcgccatatggttttcagcgccagggtctgaacccggacgccgcgcccggccccccggcaactcccctcgtccgccggtatcacctgccgtcgggaaatatctttttaccggttggcgattttttcctatttttgttgaaataaacgaagtcgcgatgaacaagaatctcgaagaatacctgccggacgggaacaaggcccagtaccggttcatgaaataccgaatccataagatcctgctggtctgctgcagctacgacgggtatatcctcgaggaggacggacacatcgaatcgcagatcaaccaggaatacctcgacctgaacatgtcgaacccgccgtcgttcacgcgcgtgagctccacacgcgaagcattggagctgctcggccgcgacgactcgttcgacttcatcctgacgatgtacaacgtcggggagctggacgtattctcgtttgccaagatcgtcaaggaacgccacgcccagatcccggtcgcgctgctcacctccttctcgaaggacatctaccgccgtttggaggagcaggatcgctcggggctcgactacatcttcggctggcacggcaataccgacctgatcatggccatcatcaagctggtcgaggataaaatgaacgccgaggaggacatcaccgacggcggcgtgcaggccatcctgctcgtcgaggactcgatacgtttctactcgacctacctgcccgagctctacaagctgatcctgctgcagaacaccgaattcctcaaggacgccttcaacgagcaacagcagattctgcgcaagcgtgcccggccgaaaatcctgctggccaccaattacgaggaggccgtggaactctacgaccgttacaagaagaacatcctgggcgtgatctccgacgtagggttcgtgttgcaccgcaacgacccgcccgagagcgagaaacgcgacgcgggcatcgacctctgccgccgcatcaaggccgacaacccgctgatgcccgtcctgctgcaatcgtcgcagaccgagttcgaggtacaggcccgccagctcggagcggggttcatcgccaagaattccaaaacactgctcacacagctgcacgaatatatcgacaaggagttcgccttcggcgaattcctcttcaaagatcccgacacgggtgccgtcatcggcaaggccaaagacctggtgcagatgcaggagatgatcgccacgatccccgacaaggcattcgaatatcacacgtcgcaaaaccacctttcgaaatggctctattcccgggggctgttcccgctggcggcggcgatccgccggggcaacaagagccagttcgcgtcgacccaggaacatcgccagcgcatcgtcaacctcatcaaggattaccgcacgctgctcgggcagggcgtagtggcgcgtttcgacccggaaacttacagcgacgcggtggccttcgcacgcatcggcgagggctcgctcggcggcaaggcccgcgggctggccttcatgaattcgatgatcctcaagcaccggctctacgacaagcacgccaacgtgcgcatcatgatcccccgctcggtggtcatcgccacggattatttcgacgacttcatccgcctcaacggcctcaaatacatcatttcgcaggagttctcggacgaggagatactctcggaattcgtcagttcgacggttccggccaagttgcagcaggagctgaaggcctacatccagaccgtccgcacgccgctggccgtacgttcgtcgtcgaagttggaagattcgcactaccagcccttcgcaggcatctattccacctacatgatcccctacgtggacaacggggatcagatgctccgactgctgctcaaggctgtcaagagcgtctacgcctcggtctatttcgccacgtcgagggcttacctctcctcgtcgcaaaacctgatctcggaggaaaaaatggccgtcatcatccaggaggtatgcggcaccgagcaggacggactcttcttcccgaccttctcaggcgtggcacggtcaatcaattactaccccatcggcgacgaggccccggccgacggcgtctgcaacatcgccatggggctgggcaaactggtcgtcgacggcggccgtacgctgcgcttctcgccccgctacccgcagaaggtactccagacctcgacccccgaactggcgctgcgcgacacacagaacgaagtgctggcactcagcctcaagcccgaagaattccgcacgtcgatcgacgacgcggtgaacctgcacaggctggacatcgcccggatcgccggcctgcgcaacgcgcggttcgtctgctcggtatgggaccgcgagaatgaacgcatctcggacagcccgttcgaccggggacgcaaagtaatcacattcaacaacatactaaaatacaacaccttcccgctcgcagagatcatcagcgacatcctgaggctgggagccgaggagatgcgttgccccgtagaggtcgaattcgcagtcaacatggacgtacaggccggacagcaacaaatattcaacctgctccagatccgcccgatcatcgacaaccaggacaaccgcccgatcgactggagcaaggtggatgtctccgacgcgctgatatacggcgagaacgccctcgggatcggcatgatgggcgacatcgcggacatcatctacatcaagagcgatacgttcgactcgctctcgaccgaaaagatcgccgaagagctactcgaattcaacaaccggatgcaggatgaaaaacgctcctacatcctcgtcggccccggccgctggggctcttccgacccgttcctgggcgtccccgtgaaatggaaccacatctcggaagcgaaggtgatcgtcgaatgcggcatcgagaagttcgaggtcgaaccgtcgcagggcacgcattttttccagaacgtcacctcgctgggcgtgggttacctgacgatcaaccccttccgcggcgacggtattttccgcgaaggggaactcgacggccgccgcgcggtctacgaagggacgttcctgcggcaggtgcgcttcgaaaaacccctgtgggtctgcatcgacgggcgctcgaacaaaggtatcgtcaaggaagagggcgataaataataattccgcggaaaaattcgtcccgaagttacaatttataagaaataatattatatttgtaataaagaaacaaccttttaaaacttcaggcaatatggacgtaaacaaattaatggcggaacttgagcgcaagcaccccggcgaaagcgaatacctgcaagccgtgcgcgaagttctcatgacggtagaggaggcttacaaccagcatccggaattcgaggccaaccgcattgcagaacgcatcgtggagcctgaccgtatcttcaccttcaaggtggtctgggtcgatgacaagggcgatgtccaggtcaacctcgggtaccgcatccagttcaacaacgcaatcggcccctacaagggcggcctgcgtttccatccctcggtgaatccctcgatcctgaaattcctcggtttcgagcagattttcaagaatgcgctgacgacgctgcccatgggcggcgcgaaaggcggctcggacttcaaccccaagggcaaatccgaccgtgaggtgatgcgtttctgccaggccttcatggtcgagctgtggcgccatatcggtccccagaccgacgtcccggcgggcgacatcggcgtaggcggccgcgaaatcgggtacctctacggcatgtaccgtaaactggcacgcgagaacacgggcgtactgaccggcaagggcatgacctacggcggttcgctgatccgtcccgaggccacgggcttcggtgccgtttatttcctgcgccagatgctcgaaaaagccggcatggacatcaagggccagaccatcgctatctcgggcttcggcaacgtggcctggggcgcagcgacgaaggctacggagctgggcgccaaggtggtgacgatttcgggccccgacggctacatctacgaccccgcaggcctcgacgccgaaaagatcgcctatatgctctacctccgcgcatcgaacaacgacgtggtggaaccctacgccaagaaattccccggttcgcagttctttgcgggcaagaagccgtgggaggtcaaggtcgacatcgccatgccgtgcgccacgcagaacgagctggacggcgaagatgccaaaaagttgctggccaacggcgtgaaaatcgtggccgaagtttcgaacatgggctgccgccccgaagccatcgacgcattcatcgcggcgaagatcccctatggcccgggcaaggccgtgaatgccggcggcgtcgccacgtcgggactggaaatgacgcagaacgcacagaaactcaactggacggccgaggaggtcgatgccaagctgcaccagatcatgtcgtcgatccaccacgcatgcctcgaatacggcaccgagaaggacggttacatcaactacatgaagggcgccaatatcgccggcttcatgaaggtcgccaagtcgatggtcgaacagggtgtcctgtaaattaattttctataatagagaccgaaaatgagaatcattttcggtctcttcatttttcgccattactttacgctcctgcgcccaaatattccgcgccacggttttcacagataagccggttttcggcacatggtcgtatgtgtgcaatcctgacagattacaggatagatatacgttttttccgcgaaatacaaaaatatccaaaacaaaaaaagcgaatctcctgttgaaggagattcacttccatttttcgaggtttgagtactcagaacatagtgctttgccctgtcagcctcagttgcggcaagagcggcagagcatccgtttaacgcctgcggcctatggcccggacgatctcgccgccgattgcaatcagcgacgtactgccgatgatgactgcccactcccgccatgccagcggttcggtgcggaaaacctcgccgccgaattcgacgatgagcacctgccccacggcgatggccaacaggatcaggaagaattcacggcacccgcgcaggcaggaaaagaccgaatggcgtgtttcgaaacccttggcgttgaacatattccagaattgcaggaatacgaacgtcgagaagaagaccgtcagctggcgcacggtcagcccgccggtcgtgatcgtccaccagaacagcatgcccagcaataccgcgaccatgataatgccacacgtgaaaagcgtgcgcgccatggcgcgcgtaatgatgaattcattgcgcggacggggtttttcgagcatcacctcgggattcggcggcagcgaggccatggccatcgcggcgaaagtatccatgatgatgttcacccacaggatctgcaccaccgttagcggcatgtccgtaccgaacacggcgccgacgaagcagatcaggatcgccgcgaagttgatcgtgagctgaaacagtacgaaacgctggatattgcggtatagcgagcgtccccacatcacggccgtggcgatcgaagcgaacgagtcgtcaagcagcgtgatgtcgctggcatccttggccaccgacgtcccggaacccatcgaaagcccgacgttggcgaaattcagcgccggagcgtcgttcgtaccgtcgcccgtgacggccaccacctcgccgcactgttgcaacaggcgcacgagccgctgtttgtcgagcggccgggcacgcgacatgatcttcagttcctgtacgcggccgagcagctcctcgtcgctcatcgcagcgaattccgtaccggtcatatggttgcggtcggtatcgcgggcatcgttccacaggccgatctggcgggcgatctcacgcgccgtagccggggtatcgcccgtgacgatcttgacgtcgatccccgccttcaggcaacgcccgacggcttcggggacatcctcgcgcacggggtcggaaatcgctgcgacgcccgcaaaatgaagctgcgccgcggcgacagcccgctgacaatcgtcctcggccgtctcggcccatgccacggccagcgtacgcatcgcccgcccctggaacccgagcagctgttccgccacctgctcgtcttttccgtccggcgcacacatcgcacgcacgatttcgggcgcacccttcacgcaaacgatccggcggcccgaaataccgctctggataatcgtcgccatatacttgcgctcggtggagaaggtcagccggtcgacgatcttcgcgccggcacgcagaggttcgtagtcctcgccctgcgcgtgcagccattcgagcagcgccccttcggtcggattgccgatcacggcacccgaaacatcgaggaaggccgtcgaattggcggctacgatctcggcaaaatcgtgcatcggcagcgcatcgtagcgcaccaactcctgcacgtgcatccggttctgagtcagcgtaccggtcttgtcggtacaaatcaccgtcaccgcccccatcgtttcgcaggcatgcatgcgccgcacgaggttattggtcttgagcatccgccgcatggacatggccagcgatagcgtgatgctcatgggcaacccttcgggaacggccatcacgatgatcgccaccgaaaccatgaagatgtgcagcacgtgctgcgagatggcgagccagtcgccttcgagcaacccgttgatgaagatcgccttgccgagcatgacgcagaaaatagcgatggaaagcacgatgcccgcacggccgatcagtttcgaaaggcgtgtcagctggcggttgagcggcgtctgctcttcgctttggacggtcgcctgttcggtaacgcgcccggcttcggtcgcatcgcccacggccgtcgagaccatcacgccgtaaccgtcggcgaccgtagtgccgcgcagcacgacgttcgacggataggtggcatcggggtcgaagtgcgcctcgtccaccgttttgtcaacttccagttcgcccgtgagcgtggattcgttgatcctcagcgacacggcctcgaccaactcgccgtcgacaggcaccgtctcgccgctctcgatgtagaccacgtccccgaccacgacgtcgcggcgcgggacttcgtgcatcgcaccgtcgcgcatcaccttgaccggaatatcgtcgttgacctggttcagccgccggaaacgccgcatagcatcccactcgaaccagaaaccgacgcaagtggctaaaataatcgcacaaataataccgatggactcggtgaaatccttatgcacgaaaccgatggcgagcgagagcaccgcagccagcagaaggatgcggatgatcgggtcgcggaacttatcggccagcagtttccataccgaatcgtccttcggcggcgtaatgacattgtcgccgtgctgccgtctgctctcggcgacctcgttcggagacaaaccccggggattgtaacggatcatgtgtgtcagaatttattattcagggagaattgccgcgtcgacgcatcgagccgtacggcaatgaacaacagtattgtaaaggcaatgagcgacgagccgccgtagctcatgaacggcagcgggatccccatgacgggcatcagcccgatggtcatccccacgttcaccagcacatggaacagcaggatggccgccacgcaatagcagtaaatgcggccgaaaggttcttgctgccgctcgcccatgcgcatcaggcgcaggatcagcaggcacagcagcgccagcacgaccatcgtccccacaaagccccactcttcgcccacggtacagaagatgaagtcggtatgccgctcgggcacgaacccgtacttgatctgcgtaccctgcagaaagccctttcccagaaagccgccggagccgatggcgatcttcgactggttgacgttgtagtccgtccccagcgggtcgctgatgatgcccaggaagctcaggatacggtcttgctggtggggtttgaggatcgaattgaaaatatagttggtcgtaggcaggaaaaccaccgtgcaaaggaacagcccgaccgtaatgaagatattgttcaggttggtgcggtaggcataaaccaccacccagaccagcgacagcagcgtcacggtcaagaggcaggcatgcagatccatgaagcccggcgcgacaagccccatcgccatgcagagcaggatgctccccagtgccagcgcggcaaggtaaacgaggcattggcgccagtggccgttcatcatcgcctgcgaaagggtgcagaccagaatgatcgacacgagcatcgtcatgggcgaaagcaggaacgagaagatgaacagcgcggcgatcagcagcaccgggatgcagagccacttgttgagcccttcgcggtagagcacgaagaggaacgacccgagcacgatgcccgaaccggtatcgttctgcaggatgatgataaagagcgggacgcagatcaccatcccgaccttgaacaggtcgcccggccggttgatcgagaacgaataggcgctcatcacgcgggcgagcgccaatgccgtagcgatcttcacgaactcgaccggctgcatgcggaacgacccgaactcgaaccacgccttggccccgttgacctcgcggccgaacagcaatgcaccgaccaacagcgcaaggcccgcgaaataggccgggtaggcgaacatatggtaaaaccgatcgtcgagcaacagcacgacgaccgccgtagtccatgccacgccgatccacatcagctgtttcatgtagaagtgcgaaaaggagaagacatcggccgtaccctcgtcgtacgaggccgaagtgatcgacacccaccccgccatcacgatcaggacatagagcaggactgtccagaggtcgacaccgtagaagatactgttatggcggttagcggtcatacgcggggtaatttatggtcatgttcctgacataatccagcaatgccgggcggcggatcgtatccgtcaggtaatactcttccagcaggctggcgatgggcagcgccgccgaggcgccgaacccgccgttctcgacatagaccgaaatggcgatcttcgggttgtccttcggtgcgaacgacaggaaggtcgagtggtcgcgcccgcgggggttctcggccgtaccggtcttaccgcagacatcgagcccttcgagccgggccagcatcgacgtgccgccgacgttgacgccccgccacatgccctcgacgatcggctcgaaatgcttggggtcgaccttcgtataatggcgctcgtagaaacggcggtcgagcgaatcccgcccctcgaccttcttgacgatatgagggatgtagtaataaccgcggttggcgacgatggccgcgaggttggccagctgcaagggcgtgcagcccagcgcatcctgcccgatggcgagcgaaatgaccgtcagcgaattccacgacccgcggtactggcggtcgtaccagccccggtcggggacatacccgtcgcgctcgtcgaggaagtcggaacccagcttgcggccgaaaccgaagctctcgacatactctttccaggcatcgtacccttccttgacgttcccgtatttgggattgtccaggatatcgcggaagacatagcagaaataggcattgcaagaagtcgccacggcaaaacgcaggtcgagcggcgaagcgtgcgaatggcacttcatacgccgtcgccctgcctggtagccctcgtggcagacatgcagatccgacggccggagtaccccttcctgcaaaccgatcaggccctgcaccagcttgaaggtcgaacccggcgggtatttggccctcacggcacggttatacaacggctggcgtttgttgcccagcatcttcatgtagttgttgccgcgctcgcgccccaccagctcgtcgggatcgtacgtcggcgaggaaaccatcatcaggatctcccccgtggaaggttcgatcgccacggccgccccgaccttgccgcgcatgagttcttcgcccagcagttgcaggcgggcgtcgatggtgctgacgatatatttgccgggctcgggcagcgaatcgtaaacgccgttcatgtaggagcccttgatggccccgtgggtgtcgatctcctggatcttcacccccttcgttcccctcagcaacggttcgtaggccgactccacgccgcccatgcccacataatcgccgatcttatattcgggattccgcttgaggtaatcggcattcacctcgctcacataccccagcaggttaccgccgattttacgcggataacggcggacggtgcggtaaaccgtatagaaaccgcggaaattgcactcgtcgaaacggagtttgtcctctttcgaaatatagttggtcacgacgcggggcgcacgggggcgcatccgggcattggccagctctttttcgagtttcccgcgcgaaagtcccagcacgtcgcacatgcgcacggtatcgaacccatgcttgtcgatctcgctgtaaatcaccatcaggtcgtagcactcgcggctctgaaccaggtattcgccgttacggtcgaacacctcgccgcgcggcgggtactgcaccacatggcgcagcacattggccttggccagttcgttgtatttcgaatcgacaagctggatataggccaggcggccggcgatcagcaggaagatgaaaagcaccaccccctgcaaggtacgcatccgcacgaaaccctcggaacttttcatatgcggacggggagtttggcggtgaagatgcgggcgatgacccagatgaaggccaccgacacggcaccgctcgccacggtacgcacgatcgtgcgcacgatatgcgcccacgaaagtgcttccagcgagaaaaatacggcatggtgcaccagcaccagcacgatcaggtaattcaggaagacccggttcccgagccgtccggtactggggatgcctccctcccggatatcgtcacgggggtacagcagcccgagcagcgtcgggcgggcaaaggcgatgagcagcgtggcgatggtgttcacaccggcagcccccatggccaagtccatcgtaacacccgtggccagccccgacaacagcagcacgacaggcggcgtgtcgagcggcagcagggcgatgaaagccacgtagacaagcggattgaggtaaatgctgatggacaggttgtcgaaaaggaaaacctgcaagagcaccacaacggcaaagagtgcgagatatgggagcgtcttgtgcatctatctgttctgtcgggtatgttgttctactttctcactgttctgcaattcgcgcacctccgtgaggtcgcggttctcgacgaggatcacgtccgtcaggcgcgtcatctcggccgccagccgcacgtgcaccctgtaagccgtacgggtctcgttcagatgggcactctcgacccagccgatcagcacgtcggccgggaaatactgcgaaaacccggtcgtcacgacctcctgcccgggttgcgggtcggcatacttggacaactcgtccagcaccaccgtatgctggtcgcccccgtcccagtagatcgagccgaaataatcggagccggcgagcttgccgctggcccggaacgaggtgttgagtaccgacatcgccacggcatagcgctccgtgcagtcgacgacataccccgccatggccccgtcggacgacagcacggccatctcttcggcgaccccgtcgcggcggccgcggttgagcacgatcaggttctgtgcccggttgaccgtattggatgtcaccgaggcggtcatgatgcggtatttcgaaaccccgatatcctgcatgtagccgtcgagccgggccgcggtctcggcctcttcgtacagtgccagccgttccttcatccgggcgacatgcgccagcagctcacggttctcgcgcccgagcgaaaaatagtgccggacacccgcgaacagcccgtggacgcccccgaccagttggttggaacgtgccagcaaccgtgcctgggtgtagtaggtcgagtgggcgtaatagctgatggctattgcctcgagcacgacgaacagcaccacgacatagacgcttcggataaactctaagagcttgcgcaaggtttctcgttaatttgagattgcggacactgggcccgcaatccgtttatgtgactacacactcccgtcccggcaaagcggggacaggccgcaactatttcatcaagaatgagaagcggttgatattcttcagtgcgatgcccgtaccgcgcgcaatggcgcgcagcgggtcttccgcgacgtggaacgggatgcccgtcttttcgcccaggcgccggtcgagccccttgatcagggcgccgccgccggccaggtagataccgttcttcacaatgtcggcatacagctcggggggcatcgattcgagcaccttcatcagcgccgcgtcgatcttagtgagcgacttctcgagcgcataggcgatctcgctgtaactgagcgaaacagtctgcggcaaggccgtcagcatgttgggccccgtgaccacgaaatcctcgggttcctcctccaggtcggagacagcggcaccgatcgaacacttgatggcttcggccgtgcgttcgccgatacggatattatgctgctgacggacatagctctggatgtcgttggtaaagacgtcgccggccgtattgatcgactcggagcagacgatgccgcccagcgagatgcaggcgatctccgacgtaccgccgccgatgtcgatgaccatgttgccttcgggcgcctcgacgtcgaggcccgcacccagcgccgcggccatcggttcgtagatcatgtagacttcgcggcctccggcgtgctcggccgaatcgcgcacggcacgtatctcgacgttggtcgatcccgacgggatgcagatcaccatccgcagcgagggggcgaaaaggctgcccgaggtcttgactttcttgatcatgccgcgcagcatcagctccgtggcattgaaatcggcgatcacgccgtccttcagcggccggatcgtcttgatgttcgggttggtcttttcgtgcatctggcgcgcctggtgcccgatggcgaccaccttgcccgtatgcacgtcgagggccacgatcgacggttcgtcgacaacgaccttgccgttatagattatcagcgtgttggccgttccgaggtcgatggccagctcctgtgtcagtgaaaaaagtcccataatgtcacacccaactattatttttcctaatcattttataatcaactccataaacccctccctgcccgaaccggctcgaaaaggttacatatccggacaaaggtagcaaaaagcgagggatatttttacatttttttattattttttttgattacatttgtcctgcgaaacaatcgatccgcacatggaatataaaatcggaaatgaggcccgctgcgccgtgataggctatggcagctgggcaacggccatcgtgggactgctcacggccaacgaaacccgcgtaggctggtatgtccgcaatcccgaagtgctcgaagggctgctcaccgaaggccgcaatccccggtacctgagcgacatggagttcgaccgcgaccgcatcgccccctccgacgacctggacggaatcgtccgcgaagccgacatcctcatcctggccaccccctcggcctacctcaagaccttcctcgaaccgctgaccgtttcgctcaaggacaagtttgtcgtttcggccatcaagggcatcgtcccgggcgactacaagaccaccgtagagtatatccacgaccattacgggctgtcctacaaacagataggcatattcacgggcccgtcgcacgccgaggaggtttcgcgcggaaagctctcctacctgacggtcgtctgcaccgatcccggaaacgcacggtcgttaggcgcaaaattcgccacggactacatacacctgagctactccaccgacctttacggcatcgaatatgccgccatcctgaagaacatctacgccctgtcggtcggcatcgccgtgggactgggctacggagacaacttcctggcggtactgatcgccaacagcgcgggcgagatgcgccgtttcctggaggagagttaccccgcggaacgcgacacgctcgtatcgggctacctgggcgacctgctggtgacctgctactcggtatacagccgcaaccggcggctggggctcctgatcggccacggatgcacggtcaaaagtgccctcaacgagatgacgatggtggcggaaggctacttcgcggccgactgcatccgctacatcaacgcccgccacaaggtcgacatgccgatcgccgacatggtctacaaagtcctttacgaaggcgcatcggcccgcaagtgcatgaaagaactgacaaccaaattaatctgacgataacatggaaacgattaaattagacatctccaaaaccggcattgcggtctcggccgaaatgcaggccaaagcacaggccgccaacgccctgctcgaatcgggcaaaggcgcgggcaacgacttcctgggctgggtacacctcccgtcgtcgatctcggcggcagaaatcgaagccatcgaaaaacaagccgcgaaactccgcgaaaaggccgaggttatcatctgcatcggcatcgggggttcgtacctgggcgccaaggccgtgctcgaagccatgagcgacccgttcagattcctgcacaaggagcagacggctcccgtggtgctattcgctggccagaatatttcggaagactacacctacgaactgctcgaagccgtaaaggagcactcgatcgccaccatcgtgatttcgaaatcgggcacgacgaccgaaccggccatcgccttccgcctgataaaggccgagatcgaaaagcgctacggcaaaaaggaggctgcggaacggatcgtggcgatcaccgacaaggcgcgcggcgctctgaaaacgctcgccaccaacgaggggtatccgacgttcgtcatcccggacgacgtgggcggccgcttctcggtgctcacgcccgtaggcctgctgcccctggccgccgccggcgtcgacatcgcggcactggtgcgcggtgcgcaggagatggagcgtgcgacggccgacggcacgcctttcggacagaacccggcggcggtctatgcagccgtgcgcaacgaactttacaacggcggcaagaaggtcgaaatcctcggctcctatgagcccaagctgcaatatatcaacgagtggtggaaacagctctacggcgagagcgaaggcaagcagggcaagggtatcttcccggccagcgtcacgctgacggccgacctgcactcgatgggacagtacattcaggacggcgaacgcacgctgttcgaaacgatcatttctgttgccaaacccgcccacgaggtggttatcgaggccgaggccgaaaacctcgacggcctcaacttcctcgcagggaaacgcatttcggaggtcaaccgcatggccgagctgggcgtgcagctggcacacgtcgacggcggggtgcccaacatccgcgtcgaaatccccgcaatcgacgcacacgccatcggttcgctgctctacttcttcgagaaggcctgcggcatcagcggttacatcctcggcgtaaacccgttcgaccagcccggcgtggaggcgtacaagaaaaatatgttcgccctgctggacaagccgggctacgaggaggcatcgaaagccatcaaagcacggctgtaaacagccccggattatggaaatgcggaacctcgcacggggttccgcattttattttgccctccggaaaccggacgggagggcacgcaggaacggtatggcataaaaaatgcacccgggcaatcagcccggtacgggtatcacccccaccgtaaaattatgaaagtacgtccgttattgattctgctgctgttcgtggtatcgacaggcatcctcgtctggatatacttcgcggcactgcgcgggcagcgggcaccgcatcgccggcaatggacggagacgctggccgacctggacgcctgctgtcgccaaaaacacatcaaatcgaagcagtacgaccatttcgcagagaccgcccgggcggaacagcggcccggcgcggaacacctgttccgggcgatggccttctcggctcgcctccatgaatacaactgcgccaacgcgatcgtgcggctcggcggccgctacaccccgccggagaaggtcacggttttccgcggcacgaccgaccagaacctgcaacggagcatcgactacgaacgccgcacgcccgacgcactgcacgccggggagatcgaccgggcactcgccgcaggcaaccgctatgcggcccgggtgctgatctggtcaaaggcgggggatgtacgccatagggcattgatggcgaggtatattgccacaggcgagaccgggcatgaagccggctaccgaatatgccccgtctgcgggaatatctatgcagcggaatattgcgacccgttctgtccgcaatgccagaccgacggccgggagttcgtccgcatcggagagtgatacaggcacttatacggccggcagcgagttgcatatgggggggggcagacatgccgcgccgaccggccgcagccgacggaatcggggagtggagccgggggaatggcaccagaggccggaaccgcaaatgacaccggggaggggcggaaccgcagcacagccacgaaaggaggggctgccgccactttacggaagcaccagaagccgggcggcggatgcccggaggtaagattcgaaccggtcgtcgaacctgaactgcccgatgccgatcaacggcttggtcttgccatggaaatcgcttccgcacgtcataagcgcaccgcgccgctgaaccagcggggcgaaatagccgatctgcgttgtatcgtggtagttgttgaagacctccagcccctcggccccgaagtcgagcaatctctcggccacacgttccctgccacggaaattaagcccgggatgtgccaccacaggcacgccgccgttgtcccggatcagggcgacggcatcccggtaatccatgaaatcgacaggcacgaacgcaggccgcccctgcgccccgtaatccagataaaaattgatgtagggcatatcgccccgcgctccgccctcgcggtaaggcgccagcaacggcgtgtcgtacgccgcatccgacagcatcacttcggcgaccagttccagcgtgggcagcttcccgcccgcagccgcaagcaccgccgcgccgtcgaccgcaaaccccagcttgcggagccggtgcaccgtctccccgaatgcctccgtgaccttcgccgcaacgtcctgctccaacgacgcgaaatcccgggaacgccagtcgatgccgtatcccagcaggtgcaggtcgatgccttcgaaattgcaatcgacctcgatgccgggcacaaatcccagcccagccttcgacgcgcacccggcggcttcgtccagcccccgcacgcaattgtgatccgtcagcgagaatatcgccgtccccgaagccgcacaccgctccgcaatacccgcgacagggatttcgccgtcgctgctgtaagcggagtggatgtgcaaatccataccgatcctgtgttccatctcattccgggagcccgtttatggcctccccgtgcgtaaaggtaggaaataaagcggcggcgaaaaaaatccaccccggaaaaacaggcttccggggcgaaaagatatcgggcatgaaacggaggctactcctcgtccacctctttcatattatggtatacgttggtcacgtcgtcgtcctcttcgagcttctcgacgagtttctcgatcgactcgcgcccttcggcatcgagctccttggtgtcggtcggcaggtagaccgactcgcccgacacgatttcgtagcccttgtcgtcgagccacttctggatcgccccgaaggactcgtaaggagcgtataccgtcacaccgtcctcctcgggatagaactcgtcgacacccaggtcgatcatttcgagctccagctcctccatgtcggcaccttcggccgcatggaacttgaagacgcatttatggtcgaacatgaaagccacgctgccgctgttgcccagcgtaccgccgcacttgttgaaatacatgcggacgttggccaccgtgcggttggtattgtcggtcgcagtctccacgaggaaggcgatgccgtgcgagccgtagccttcgtagatcacctccttgtaatcggcggcatccttctcggtggcacgcttgatggcacgctcgacgttctccttgggcatgttctcggccttggcgttctgcatcaggatacgcaggcgggtattgcccgaaggatcggggcccccggccttgacggcgatctcgatttccttaccgatcttggtaaacacgcgggccatgtgtccccagcgcttcagtttacgcgccttgcgatactcaaatgctcttcccatatgaatttttcgttattattttattcgtggtgcaaaggtataaaattaagcattaaaaaataagaattatagataaaatttatatatacgcggggcgtatgcggatttcacgataattgtgtaattttgcagcgtacaaaatttgggaaccatggaaatcaagagccgattcgaccatttcaacatcaacgtcaccgacctcgcgaagagcctggagttttacggcaaggccctggggctgaaagagaccggccgcaaggaggctgccgacgggagtttcgtactggcctatctgggcgacgggcagacgggattccgactcgaactgacctggctgcgcgaccacaccggggcctacgaactgggggagaacgagagccacctgtgcatgcgcgtggcgggcgactacgacgccgtgcgcgaataccaccgtgcgctgggctgcatctgctacgaaaaccacgagatggggctctacttcatcaacgaccccgacgactactggatcgaaatactgcccgcaaaataaccgacatgcagaacgacaacgaattgcagcgcgaggccgacgaggctgtccgcgtgctgaaagagggcggtatcatcctctacccgaccgatacggtctggggactgggctgcgacgcgaccaacgccgaggccgtggaacgcatctacaaactcaagcggagcgaaaacaagaagtcgatgctcgtgctgtgcgcctcggccgacatggtcgtgcgctacgtcaaccgggcaccgggcatcgccttcgaggtaatggaactggcgaccagccccctgacggcgatcctcccgggtgccgtgggcgttgccgggaacctgatccccgaggaagggacgctgggcgtgcgcatccccgaccatgccttctgccagcggatgctccgcgggctgggcaggccgatcgtttcgacctcggccaacatttcgggcgaagcgacgcccgcagggctcgccggggtgtcgcgcgaggtggtcgacggtgtcgatttcgtcgtcaacccccgtttcgaaggcaagcccacgaaaaaagcttcggcgatcatcgccttcggcgagggcggcgaagtgaaaatcatccgcgaataacgacaaatggcaaaggtactcgaaacagagatccagaaacggttttcggacgtagacccgttccagcacgtcaacaacgtctcgcagcagatgtatttcgacgtggggaagatggaatactacgagcaggtgctcggcgacgaagtgctgctgggcgacctgcgcatcatcaccgtttcgacgtcgacctcctacatggggcagatccgcctccacgaccgggtgcgcgtcaccacgacctgcgagaagatcggcaacaaaagcctcacgctgttccagcagctcgtcgtcgacggccaggtgcgcagcgagagccgctcggtgatggtcgccttcgacttcgccaggcagttgagcatgcccgtgcccgaggcatggcgcacgaggctgctcgcggactaagtgcgcagccgcccgtcgtgccccacgggcgggagcccgtggcggacatagtatttatacccgatcaccaccaggacgacccccgcgaagatgaaggccagcgccacgatattggcggcgtcgaacaccgcctgcccgcggacgagggccaggatgccggcgatgacgggctggatatagcggtacagggccgtatgcaccgaagtcagtttctcggtgccccggtaaagcaggtacatcggcaacaccgtccccaggatcaggatgtaggccagttcggcctgtgcctgcaacggcaggcgcaggaattgcgtatggtcgatgtatttccagaagaacggcgccgtcacggccagcccgacgatgtaataccaccccatcacgaccagcgttcccagccgttcgagctggggtttgataatgaccgtattgatggcgatcgccaccaccgcgacgagcaccagcgcattgccgtaggcgcggctgccgtgcgtgagcacgaagccgtggtcgaagagcagcaccgcagcccccgccaacgcacagacgacacccacgacccgcgccttgatatatttgtgcgggtgcatgatgtgatccatgatcagcgtcacggccgggccgagcgtcgaaatgatcgaggcgtcgatgggcgaggtgtaggaggatccccagagcagcatgtacatccaaccgtagacaatcagcatggtgacgaccagtatgttgcccgcgtcgcgccaccggatgcggaaagactgcttcgaaaaaagggcgaacgggatgaagaaaatcgcgcccgaaagcacctgcaacatgaatatctgctggaaatcgagataattgcgcgtgagcgagacatagaatgaaaagttcgccccgaaaaagatgttggcaaataccaggtcgagattatagcgcgttttactcacaaagatccatccgggcaattattacaccaaattttacctatatttgccgcgtcaatcccgcaaacgtatggacggaaaactgaaagggcatgcggccctttgggtcgcgaatatcatctggggcctcaacgcaccgatcggtaaaagcgtactctggtcggaaacgcacccgcagggagtcagtccgttcgcactgagcgtataccgtatgctgggcgcctgcctgttgttctggacggtatcgctcttcctgcccagggagaaagtcgccccgcgcgacatcgtgctgctgctgttcgcctcggtgttcggcatccagctcaaccagatgcttttcctctggggcctttcgctcacctcgcccatcgacacctcgatcatcgccaccatcgtccccgtactcaccatggtgctggcgacgctgttcctgcgcgagccgatcacctggctcaaggcgggcggcgtactgctcggctgcggcggggcgctgctgctgatcctcgtcagcaggcacggcacgggcggcacgtcgagcgtggcgggcgacgtactgtgcgtcatcagcgctgtcagctatgccacctacctcacggcattccgcaacgtgatcgtcaagtattcccccgtgacaacgatgaaatggatgttcctcttcgccgccgtcgccgccgtggcgatctactaccggccgctcgcagaggtggactacgccgcactcgcaccccgcacctgggccggcatcggctatgtggtggtctgctcgacctttctctcctatttcatggtgccggtcggacagcgttacctgcgcccgaccgtcgtgtcgatgtacaactacgtgcagcccctggtggcggtgctgttcaccgtcgccgtcgggctcgacaccttcggctttacgaaaggcgtcgcagccctgtgcgtcttcgccggggtatggctggtcaccaagtcgaaatcgcgggcacaactggatgcggagaaagccgcagcgggacaggcaccggagaatcggccccgggcataaaaaaccggctgccggaaatactaaattactgattgttcccgttttgcagaaaaccgaccttttactgacatgaaatccctcctgctcctcgccgcaacgatctgttgtgcatgctgctcttgcgtgcagcccaaacacgaccccgactattcggtctcttcgggcttcgcactcgactccctcgacgcccgggatccgcaggtcatcgaaaacctcggtgtcacctgccgtgtatggggttacgtcaagtaccaccatcccgttttcgccgattcgaccctcaatgtcgattacgagcttttcggactcttgccacaagtcgccaaagccacaccggaggaacgaaacagggtactttacgaatgggtaaaagggctcggacggttcagcaccgacaaggcggaatacgacgaagccctgaaaaccgtgaaatgcacccggacagccgacctgctctggatggacgacacggcacggttaggcaacgtcctcccgcgcctcctgcgggaattgcgctacgccaaacgcgaagcaaaccgctacacggattttacagcaaacgcaggaaatttcgtaatgcgaaacgaaagcactgccgggtcatccgatgactgcggttaccggatgctgttcctgttccgcttctggaacgtcatcgaatatttctcccccaaccggaaccttaccgacaccccgtgggacgaaatcccggaaaaatacattccgcttttcatacccgggcaaacacccggcaacccgaaccaggccatgctcctgcgggagctgtgcgattcgcattcagcctcggtcagatacaatatgttcggttacaacaccgttccggcggaggtgcgcaacgccgaagaccgggtcttcgtaatcgccgacggcccgctgcgcaaaggcgacgaaatcctctcaatcgacggccgcggatggaaaagcacgcacgacgggcttgcccgtttcgaagccgcatccaacgccgagaaccgcaactacatgaccgccatgtgtatggtctgttcccaccgggatacggccgccgtggagctggtgcgcgacggccggcggctgacggaacggattgcgactcgcagtgtcatggattggagcccctacatcacggagcgcatgctcgacaccgccaacatacgcctgctcgccgacggcataggttacatgacgggggttaactacaccaaagcggacggcgcccggattatggaaaaattccgggatacgaaggccctgatcgtcgacctgcgctgctatccccgcgagttcatgatcttcgacttcatcggccgctacttcatgccccgtacgtcgccgcacgtcatctggcttgcgccgaccggcgcactgcccggagtattccatgagttgcaggactccctcttcgtaaacccggacaatcccgccgtcacggagaatcccgattactacaaagggcgcgtcatcgtgctggtagactcatcgacccaaagccaggcggaatatactgccatggcattccaggccacaccgcgctgcacggtcgtcggcacgcaaacggcaggcgccgacggcaacatttcggcactcgtaatgcccgggggcgatttcggatatttctccgggctgggcgtcctctatcccgacggcacgaacacccagcgcgcaggcgttcggatcgacgtcccggtttatgccacagtcccgggcttacaggccggacgcgacgaaatcctggaaaaagccctcgaaataatcgccaccggggcttacgacccggcagccaaaatataatccggcgaataaaaaaggtcgagcggaaaactcgaccttttttattttaatacaacgacggggcggcagcgttcctacgggttccgggccgcggctttggtcaatcccttttccgcggccagccgctccatcagggcataggccgcgtcgtagtcgttgggaatctccccgtcgaggattgcgttcttgatgacctccttgatgtcgccgatcgcacggcacggcccgatgccgtaggtctgcatgatgacctcgcccgtgatcggaggctggaagttgcggatacggtcacgctcctcgaggtctttcatcttgcggcgtaccaggccgaaattggccaggtagcgcttcaccttggcgtcgatgcccgacgtgatgtcggcctcgcacagggtcatcagcttttccacatcgtccccggcttcgaacagcagtctgcgcacggccgagtcggtgaccatatcctccgaaaggatgatcgggcgcaggtgcaggaaaaccatcttctgcacgaatttcatatgctcgttcaggggcagtttcaactgccggaaaataccgggcaccatcttcgatcccacgacctcgtgtccgtggaacgtccagccggccttcgggtcgtaggccttggtcagcggcttggcgatgtcgtgcagcacggcggcccagcgcagccacaggtcgtcgctgtgccgggcgacgttgtccagcaccttgagcgtatggacgaagttgtccttatgcgcatgggcgccgcgtttctcgacccctttgaggttatgcagctcggggaatatccgctccagcaacccggtcgcctccagcagttcgaagccgatcgacgggacgggcgacaggacgatcttgttgagttcggcggcaatgcgctcccgggatacgatcccgatccgcggcgcattgcggcggatggcatcgaaggtctccgcctcgatcgtgaagcccagctgcgaggcgaaacgcacggcacgcatcatgcgcagggggtcgtccgagaaggtgatgtcggggtcgcacggcgtacggatgatgcactcctccaggtcgtacatcccgtcgaacgggtctaccaactcgccgaacgaatcggcatcgagcgaccatgccatcgcattgatcgtaaagtcacggcggcgctggtcgtcttccagcgtcccggcctcgacctgcggcttgcgcgaatcgtgcgtgtaagactccttgcgggcgcccacgaattcgacctcgattcccccggcacggagcatcgccgtgccgaaagtcttgaaaacggacactttggcgtgcaactcgcgccccagagcttcggccagggcgatcccgctccccacgacgaccacgtcgatgtcggtcgaagggcggcgaaggtagtggtcgcgcacgtaaccgccgacgacaaaggcccgcacaccctgctcgccggcgatacgcgaaattttccggaatatggggttcgacagcggcacgcggctatttcacgtatttctcgatgacctctttccaggcgagatacccctcgcccatcaggtgcagcccgtcgttcgtatagcgctggtcgagcattcccttctgatcgaccagtgccgaatagacgtcgatgtagagcacattcttgcggccttcgcagagcgcttcgatcagtttgttggcttcgatgatctcggcgccctttttccagtggttcttggccttagccttggtatccacgccgttcacagggaggatgctctgtacgtagatctttgtccagggcgactcctcggcgaagcggtcgagcagtttcccgatgttggcggccacctcctcgggcgacacgccggccgccaggtcgttggtgccgatcatcaggaacagtttcttgggatggccgttgacgatcggatcgagacggtcgagcagccatcccgaacggtcggcgctgatgccgcggttcttgatatggcggttgttgaacaactcggcccactcgcagccgtcggtgatgctgttcccgagaaaaacgatgtcgttaccccggatcggcaactgttcgaaaaggctgcgtttctgatagttgtattcgttttgggcgaacgatgcgaccgcgacgaacagagccgcggcaaagagaatggcttttttcatatccggcttctatttttttaatatttaagttcacgtttataaagctgcacggtgttttccagcccgtagtagagcgcatcgcagatcagcgcatggccgatcgacacctcgtccgtccacgggatgcggccgacgaagaagcgcaggttttccaggctgaggtcatgcccggcgttcagccccagcccctggcgacgcgcctcttcggcagcagccaggtagggtgccagcgcagcatcggcacccgcagggtactcgcgggcataggcttcggtatagagctccacgcggtcggcgccgcaagccttcgcaccggcgaccatcgcagggtcgggatcgacgaagaccgaaacccggatacccttttcgtggaaccgcgccgcgaccccggtcaggaaatcccggttggcgagcgtatcccacccggcattcgacgtaatggcgtcatgcgcgtcgggcaccagggtcacctgggccgggacgacctccagcacgaggtcgacgaaactcgggatggggttgccctcgacgttgagttcggtggttagcacacgcttcaggtcgcgcacgtcgtcgtaacggatatgccgggcgtcggggcgcggatgcaccgtgatgccgtcggctccgaaacgctcgatatcgagggccgcacgaaccacatcgggcatgttgccgccccgcgaattgcgcaccacggcaatcttattgatgtttacacttaactttgtcataaaattcgctatatttgcacgtaatgacggcacacgccgctgtctccggccccaagcggagcacgaaccatgccgtcccgatgttgaacccgaccgcgccggccgatccgcacgggggcacgaacggctcccggatgtcgtcttgacgtggtaaagttacttattttttcgaaactccgccgatgaaaatcatacttttttcccgcaggcagctctcccacaccgcagccgagatatgccaattgttcgatgcactgtgccttttcgggttcgactacgccgtcaacgaggagttcgcccccctcgtcaccgaactcacgggcatgcagatcccgcccgaaaaggtctacgggcactgcgtaggccggcagcccgccgacagcctgatggtctgttacggcggcgacggcacgctgctcgaaggcgtacaccgtctctgcggcgccccgatccccgtcatgggcatcaacgccgggcacctcgggttcctgaccagcgccccgagcgccgggctgaacctgatcttcgaagaggtcgcggcagggcgcctcaccaccgagccccgctcgatgatcgaagccacgggcgactatgccgagcagcccgacacggagctggggctcaacgaattcaccgtacagcgccacggcgccggcatgatctcggtcgaaacctacgtcgacgagcagatggtggccacctaccacggcgacggcgtgatcgtctcgacccccacggggtcgacggcctactcgctcagcgccggcggccccgtcgtagccccgacatgcgcctgcctggtgatttcccccctggccccgcacaacctcacgatgcgccccgtggtcatccccgactcggccacgatcacgctccgcatcgacgcccggcgctccgacgcattcgtcaccctcgacagccgcgtatacgccatcggacaggaggcggcattcacgataaaacgcgccgaacagaagatttttttggccgtaccgcacaatatatcattttatgacacgttacggaataaaatgatgtggggcatcgacatccgcagttgaagcccctgtctcaaatcggtgtaaagttgttcagtaaagtaggtagattttcattttaattccctatatttgtgccctaatatgagcgagcagaatcgcataccgcaacacgtcgccatcatcatggacggcaacggccgctgggccgagctgcgcggcaaggagcgttacgaaggccatgttgcaggtgtggaacctgttcgggcatcgttgcgcgcagcggcacgctggggagtcaagtacctgacgctctatgcgttctcgaccgaaaactgggggcgtcccgcacaggaagtcgacgcgctgatggagcttttctgcaagagcgtggtcaacgagaccccggaactgatccgccagggggtggagatccggatgatcggtgaccgcacacgattttcggagaaggtgcagcgctacctctgcgaggccgagcaacggacggccgggggcaagacgctgacgctgatccttgcgctcaactattcgtcgcgcagcgagatcacgcgcgccgtgcagcgcatcgccgcacgggtcgcagccggagagctcgccccggaggagatctccgaggggacggtcagcgcttcgctcgacacggcgccctacccgaaccccgatctggtcgtccgcaccagcggcgaatgcaggttgagcaatttcctgctctggcaggcatcctatgccgaactttattttccggaggtgctgtggcccgatttcaccgaagaggagttcgaccgggcaatggaggaatacgcccgccgcgaccgacgtttcgggctggttaaatagatgaagtaaagattagattaaaatagatgaattatttcggtaagatattcacggcagccgtgaccttcgtgttatgctgcacgaatatattcgcccaggaacagaatcctgcagacaccgcggcctcgtcgaagcccgcattcccggaaaacgcccccatgatgcggcaggatgacccccagaagctctactacatccgcgacatcaatatccacggtgtgcagtacctcaattccgacatcctcaaatcctcggccggactgatcgcaggcgactcgatctacctgcccagcaatttcatcgccaatgccatttcgcgcctgtggagccagcggttcttctccgacgtgaagatcggtgcccagatcgaaggcgacagcctcgacctggaggttttcctcaaggagcgtccccgtgtcaacaactgggatttcgaaggcatctcgaagggcaagaagaaagacctgctggagaagctcaaactcaagcggggcagcgaattgtcggattatatcatcgacaagaacaaaaaactcatcaaggcctactggtcggaaaaagccttccgcaatacggaggtggacgtgcgcatcaccaacgacacgctgcgcccgcagatggtgaacgtcacgttcctcatcgaccgcaagaacaaggtcaagatcggcaagatcaatttcacgggcaacgaacagttcaaggacaaacgcctgcgccgtaccttcaagaagacccaccagaagagcatcaacattttccgcggggcgaagctcaacgaaaacgattacgaagaggacaaagacctcctgatcgacttctacaactcgcgcggttaccgtaacgccacgatcgtacgcgattcgatctacccgatcaacgacaagcggctgggcatcgacctcgaagtctcggaaggcaacaaatactacatccgcaacgtatcgtgggtcggcaactcggtctacgaaaccaacgacctgcagcagatgttcggcgtgagcaagggcgacacctacgacaagaagtcgatgcacaaacgactgggcatcggcaaggaaaccgaccccgaggcgatgtccgtctcgtcgctctaccagaacaacggctacctgatgtcgcagatcgaacccgccgagacgatcatcggcccggactcgatcgacatcgaggtcaaggtattcgagggcaagcagttccagatcaacgaggtgggcatcacgggcaaccagcgtgtcgacgacgaggtcatccgccgcgagctgcgcaccttcccgggcgaactctacgaccgctcgctgctgatgcagaccatccgcacgctcggttcgatggggcatttcaaccccgaagcgatcatgcccgacatcaaaccggtatccgaccggcttgtcaacgtcaactggccgctcgaggagcaggcatccgaccagttcaacatcgcgggcggctggggttccggtacgttcgtgggttcggtcggcatcacgctcaacaacctttcggtcaaaaatttcttcaaaaaaggcgcatggcgcccctacccgatgggacagaaccagcgtctgtcgttatcggcccagaccaacggtacctattacaaggccttcgccctgagtttcaccgacccgtggctcggcggcaagaagcccaactcgttcacgatctcggcgcatttctccgagcagaacaacgcctactacgtatggcagaagagtacgcagtatttccgcacgtacggcgtggcagccggtctgggtaagcgtctgaactggcccgacccctacttcacgctctacggcgaggccagctacgaacgtttctcgctcaagaactggaatacgttcggcatgaccaacggtgcggccaacctgctttcgctcaaactcgtattcgcccgcaactcggtcgaccagccgatctatccgcgccgcggttcggagttcagcgcttcggtgcagttcacgcccccctactcgctctgggacggcaaggattacaagaaactcgaacaactggccaacagcacgaacagcacgaccgccgacaaggccaaccaggagcgttaccgctgggtagagttccacaaatggcagttcaaggcacagtggttccaggcgctgacgaaaaactcgaacctggtgctgatgctcaaggccgagatgggttacctgggcaactacaataaacacaaggtttcgcctttcgagcgtttcgaggtcggcggcgacggtatgtcggggtataatatatacggtatcgacatcatctcgatgcgcggttacgaagacggggcactcgaccccacgagcgactattcagtcggctacaacaaatacacggccgagttgcgctacccggtcatcctgaaaccctcgtcgcagatctatgtactgggcttcctcgaaggcggtaatgcgttcgaatcgtggaagaagttctcgcccttcaagatcaagcgttcggccggtttcggcgtccgcctctacctgccggtggtgggtatgctgggtatcgactggggttacggattcgatgccccggcaggttcgaccaagaagagcggcagccagttccacttcgtactggggcagcagttctaacccgcggcacggcacgacggccagaagaggggcaatccctcacgataatccgtgccaatatacgggaagcgcaaataaagcgcagtgtggcaataaatttgaaagaaaatagttatatttatagcaccgttccgggaaaccggccgaatattaacttaaagcacaaaggattatgaaacgtctgattttaatagcggtattcgttctcacgaccggcacattggcggcacagaactacataatcgtaaacagcgaaaaggtcttcaagtccatcgacgcctacaacactgcgctttccacgctggacaaactggccgaacaatatcaggatatggttgacgcgaagttcgcagaggtggagacgctctacaacaattacatgaaccagaaagcctcgctcacggccgcgacgcgccaggcccgggaaaacgacatcctggccaaagaaaaagcggcacaggagtatcaggaaaccctcttcggcaacgacggcacactgatgaaaaagcgtgtcgaaatgatcgagccgatccagaaacaggtcttttccgcgatcgaagcctatgccaaacaggtgggtgccgacgtggtgctcgattcggccaacaacccgacgctgctctactcgaaccccagtgtggatcgtacgcagcaggttatcgacgtcctcaaaaaatagaatcatcaaaacattaactgataatttatgaaaaaaacaatcaaactaacccttgcggttgtattcgtgatgggcgccacatcgctcttcgcacagaaattcgggcgcatcaacacccaggaagttatctcggtgatgccggaaatgaaggagatgcagaccaacatcgaagcttacagtaaggatcttcaggagagcatggagaacattgtcgtcgaatacaataacaagtaccaggagttcaacaagaatttctcgaccatgtcggacgccgtacgccagctcaaagagaaggaactgaatgacctcatccagcgccgcaacgatttcgaacaggttgcacagcaggatctccagaagcgttacaacgagttgctggccccgatcatcgacaaggccaaggctgctatcgacaaggtcgcaagcgctggcagctacctggcagtcttcgatacctcgacggggtcgctggcctatttcgatgaggccatgctaaccgacctcgccccggccgtgaagaaggaactggggatcacggacgccccggcagctacgcccgccgctcccgcagcacctgcggcaaaataaggtaagacgaataaactcaaaataaaaacttaaaaagtgccggctccccggcacttttttcatgcccatatccggcaaaacaaccggaaaaatacggaaaggagtctatattgttcatttcgttcgattatcgaacataatgaacttaaattactgtttttttgctatattcagcccgactataagggataaatgaacagaaaacacacagaaactatgatcaactcattcacgctgtcgcagctcatcgaaatgtccggggacaaccgccagggcctgataagggagtgcttcacggccagcagtgacaaccgtatggaaattttccggttcccgtgccgcatcgacgccttcgtcatcggcgtcggcacggaaggcgaaaccagcgtatcgctcaacctgcacgaatatcggctgaagaaaaattcgatcttcatcttcagcccgaagaatatcctccaggtcaagtcggaggagtatttcaaggccgacgtaatcgtcgtatcacccgatttcctgcgacgcatcaacatcgacacaaaaaacctgctccagcttttcctgcaattcgcagccaacccctgcctgacgctcacgcacgaggaaagccactcgatacgcagtttcatcgcgcagatcgagcgtgaaacccggggcaaagaaacccatttcacgtacgatattatcaacgggctgattgccgcgacgatctacaaggtcggggacgtcctctacaactacctctcggagcatcccgaagtacagaatcccatacacaaccgggccgaagaatatttcaagcaattcacgcacctgctgggcgaacactaccgcaccgaacgcagcgtggggttctatgcccgacaactctgcatcacgcccaaatacctcacgacactcataaaacggatcagcgggctgtcggtttcggagtggatcgacaactacgtgatcatcgaggccaagacactgctcaaatattccaccatgagcattcaggagatcgcctactacctcaatttcccgaaccaatcgttcttcggcagctacttcaaacgcaatacgggcatgtcgccttcgcagtacaaggcacagaactgacggcacggcattgccgcagacaacgaagcctccccggccatacggccggggaggctttatgcgtcgggctccgagggtaatcctccgccggcaaaaaaggaaagggcggggatcagaagggataccccacgccgaaattgagcgccgtatttttccagcgcaggttgtgtatccacttttcgccggagggattgttcggattatggagctgcacgccccagtcgaggcggagtaccgcaaacttgatgtccagccgcaggccgatccccgtattgaaacccaactgcttgtaaaacttgtcgaaatgaaagaccgcatcgtcggagtagtcggagctctggcggatataccaaatgtttcccaggtcgaagaaggtcgcgccatgcaccatgccccataccgggaaacgcagttcgaggttggcctccagcttcacatcgcccgtctgtatcgggaaggagctgtgagggtcgggcaccgaaccctgccccagcgtacggggcgcccagccgcgcatgccgttgctaccgccgcaatagaactggcggtcgaacggaacggaggccgaattgccgtaagccatcgccacgccgccatagatgcggccgacgagtgccgtggcgccgcccagcatgatcttgcggctgatgctcaggtcggtacggaaatactgtgaatattcgatcccgaagatcttggccgggcttccgtctttaggacgtgcgtagaacaggcggtctacggcgtcgatcaggttgcccgccgtctcgaaattgaaccgaatattggtcgcattgcccccaaggttcttgcgctggttgttgtacgaatagccgaacgtcagcccgccgatgaactgcgtccggaaactctcgagcaggtacttgttcggagtgagttcctggtgccccgcagagtcggtcttgtttatcatcaggaacgattcgtcgaggttgttgacatcgaccacgttgatgtcgatgggccgcagcgagaacgacgagtaacggtcgttcgtccactggtaggtgatgcccgcgctggaaagcgtgcgccggtaataggggcgatcctggaaattgaccgacaactcgaccttggtcttgggctggttgaccgaacggaaccgccgcgtgcgccagggcatcaggaaacgcgggaaagtcagcccggtcgttatgccgaactccgtagcctgcttcttcctggcatcgggagccttcataaactcatagccggccgtgaacgaaacgtcgaatgcttcggcaccccggaaaatattgcggttctggtagcccacggtggctttcagtccgtagaagctcgacgtggtgcttccttccagatcgaccttgaagctctgtttcagggtcggggtacagaggatattgcatttcaggtacccttcccgcgtatagcgggtctgcgtggaatcggccgatgctccgataaaggagacatagttggtgacatcggcactctggggctgctcctcgaattcgattttggcgctcttgaaatacccgagcgacatcaggtcggtatacgcgcggttcacctgtgccgaattgtagacatagttcgggtagagcggcaccgcctgccgcaggatcgcgggtcgcaggttggggcgtttctcgtagacgatattcaggccgcggtaatagagcgtgtcgagccgctgcaggaaggtcgaatcggttcgggctaccgtagggtcgtaattggggaagacgttgatctggtcgatacggtagaccatgttgttgtccatgaccggaaggccgcgctcgtcatatcccgtaaggttctgcttgacaaccagttcgagcccgaccttatggccgccgcccagcgtatcggccacatactcgatgttgttgaccgtaaagttgtaatacccccgctccttgaggtaggccgcaatacgctcgcgctcgcggtcgagtaccgtgatgtcgaagatgccgcccttgcggagcagcgtattggcggtatcgggaaggatgatctgttcgaggaacttgtcccggaactcataggaaacggagtcgatccggtaaggctcgccctgccgggttcggtaggtgaccctggcgcgtttgcgccgcgaagtggtatccacctcgaaggtcacctgcgacgcgcgaaatcccttcgaatccataaagatcttcaggttctgggcactccgctccgtcaggcccatgtccagcaatacgggctcctgcccgatccggcgcttccagttgttccaccagttctgcttgccgggattggcctgctcgtagagccagacatagaaattggtacccagaaaacgtttgttaggggtctggcgcacgtatttctcgaaatcagccgcagtgatacgctccttgcggggcgtcgacttgtcggcgtcgatcttcaccttctgcaacaggtactgaccttcggggattttgcgtgtgacgctgcatgcggagcagatcaggcccagcatggcggcaacgaatatacgacaggccccccgcaccccagcgtcagttgttaaagaaccctttttccttcaggagcgcgaaataggagttcgaaatcgcgaggttgtccttgcggacgtagcggcgctgcgtgaagacctgcgccaggttgggcaggtcgttctcctcgaggaggcgtttggtgagctccgactcttcacgctcggcccacaactcgtcgatttcggcggccgtatagtcggtatatttctcatagtgcaccacgccttcgagcggcaggcggtcggtcagcccgggcgactcgtcgggataccccacgacgacggtcgtcagcggaatgacgcccttgggcagttccagaatgtcggcgatctcgccggcagtatagatcgtcgttccgagatagcaaatgcccagccccttcagttcggcctcgacgcacaggttctgggcggcgagcagggcatcggtcacggcattgaggaaccacgcgaaattgtcataggccgggtcggcatcgcgctgccggcaccacatcgagaagcggtgcacatcggcgcagaccgtcaccacgcacggagcctgcgtcaccatcggctggttgaagtggcacggggcgagcctcccgcgcaaagcggcgtcgcgggtcacgaccagcgagtagagctgcatgttgccgcatgtcgaagcacgcgatgccgcttcgagaatctcgtgcagcacgtcctcgggaatcggggtggaacggaacttacgtatcgaacgatgcttgaaaagcacacttttcatgggaattgtatttataggttttctgaaaaaacaatacgggcgcctgccggtagcggcgaatacgcatattttccacaaaagtagtaaaacttttagaagttttattatttttgcgatgatataaccactatcggaagtgctggtaaaattcgttaaatacgagggggcgggcaacgatttcatcctgatcgacgaccgcgagggggcattccggccggatgcaggacatatcgccgccttgtgcgaccgtcatttcggcatcggcgccgacgggctgatgaccctgcgccgcagcgccgggctggactgctcgatgcgttactacaacgccgacgggtcggcaggggagatgtgcggcaacggcgcccgctgcttcgcgctcttcgccgaacatctgggcatcggcggggaaaccaaatatttcgacgcgacggacggcgtgcatacggcacacatccggcgtgcgcagggccccgcgggcgaaatcgagctgggcatgataaatgtatcggaaatccgcagcggcgacggctggtggttcctcaatacgggggttccccactacgtggaaatggtgcatgctgtcgacggcatcgacgtaaacggacgcggcaggggtatccgttacgatacggggcggttcccgcagggtacgaacgtcaatttcgtcgaggtcacgggcaacggagcgatccgtatgcgcacctatgaacggggcgtcgagcacgagacgctggcctgcggcacgggtgccacggctgcggcgctcataaccaactatgctttgcagcacggaacgacaaaataccgaatacaggttcccggcggagagctgatcgtgggcttcacgcacgaggccgggacacagaattatacgaatatcaggctcacgggccctgcccgcagggttttcagcggggtattcgaaaccgacaatttctaaaaccaatcctctcccacccatgaaaacacccaagggaatccgcgaacacgacgcggacgaacttcgaaaggcaaaacgcctcgatccgatacgcaagagcggcaaagagcggcactcgctctaccgttcgatcgacgaagaggacgacgaggatctcctcggcacgacgcggcgcgaatccgtactcgactacctcgacgaaggggatgacgaggaggaataattcccggaacatgaccgaaaaatttataatggcagggtctacggccctgcatgtctgcgattcgcaggtcggtgacaagtgtgtcgtgctgctgcacggctatctcgaatcggcattggtatgggaggatttcgtcccctacctatataaagaggtacgcgtagtgacgctcgacctgccgggtcacggcatttcggtcgtcacaggcgaagtgcatacgatggatttcctggccgacacggtagccgacgccctcacggctctgggcatcgggcgctgtacgctcgtagggcactccatgggaggctacgtggcactggcattctgcgagcgccatcccgggatgctcgacgggctcgtcctgctcagttccacccccaaccccgatactcccgaaaaggccgaaaaccgccgcagggagatcgccctcgtaaaggcaggcaagaaggagatgctcgcccgggtagctccggcagcaggctttgccgaagagaaccgcgcgcggatgcaggatcatatcgaagacctgaccgaacaggttttccttaccgaggacgaagggattgtcgccctgctgggcggcatgatcgcccgcaaagaccagaacgcgatgttgcgctcgtcgaaggtgccgcagctctttatcctcggcaggaaagacggttacatcccgcccgaagcggccgagaaaatggtcgcggagcatccgcaggcgaaggtcgtatggctggaaaactcgggacacatgggattcctcgaagaacccgaggcgacggcccgggcgatcctggatttcgtgccaaaataacacccccacccccaacacacaatcccaaacaataatgacaagaaaacactttcgccggcttatcagcggcatttatctgatttcaacggggataggcatttcaatctccctcatagccctatactccaagttgggcagcgactactcgcctcctctgacatggctcgccgtcttcgaattctggactctcctgcttcccgcactggtgacctgcataatcgtggggctggtgcgactgaccaataaaatagaacctctttcggaagaggagcgacagcagagtttcgtggagcgattgtcgaaaacccagctcttcataccactgtcgctgttgctggccgtaccgtccgccttcttagcttccacaatacccgacatctggattcggggattcttccgggtattctccattttcattgcggtacatctttttattacctagctgctggtacttctcctgcgcagaaccacccgtatccgaaaaaccggctggaaaatagtgctgatcctgcttttcatgctgtcgaccatcgcatacattctggtctcgaccatcgcatgcgacctcgcctcgaccgacgcattctattggtcggaatcgcatcgccgctcgacatcggacaaccgggaatatacggaatcggacgcgcagcgagaaaccccggactgccccgacgaagaggtagtcgtgagtgaagaaaccgcagaacgtcttgccgacgacgctatgtatatctacaaccaatacgattgggcagcactgggtgaagactacgtttattcttttgtaatggagtgcagcgaaatattggaatataatccgaatgcgatttatacgccttgtatcctaacgagtcccgaggagataggcgaagaaaaatacagggaattcgcggcaagggacagcatgcgcttcgtcgtcaaacagcggttaagccgcttttaccatcaggtattccactcggactatgaggatttcgattcggaggatttcgacaccatgctctggtggctgaaaaaagcgctgctgaaaagaaaggacgctatcgattataatttctttgccaaaagggtcgacatgctcgatctggcctggcgggagttgaacgcactgggtgaaaagaacggcagggacgctttcactgacatttacaactatgcaaacgaggaagacacgtatctgctttggcgagaatacggcgactacatcaccaatccctatgtacgctacacggtcaacagaaattccgacgatcaatatctgttgctttgggcttatacgttctgggggcggcgttccaacgacggaaccagcgccatgtggcgcatactcctcgatcaaatactcgacgtgtatccgaacgaactttatcctgcggaaacggttcgcagccagacccgcaatatagcccgggccaaagagagggctaccgagtttatcgactggtacaaagccaattactggtcgttcaaggagctgaaagccgcaaaatacgatgacgaaggcaaacttgtaaaactcgaccgggatgaactcggcaaatacgtccacgcactgaagcaaagcaattaccttacacccgacctgctcaagaatctggaaacgactttcgaccagatggccgacagtgttaaaacaggcaaaataggcagtggacagggcgagtggctccgcaaggatccgctgatcgacaactactccgccatcgccgaagagatgaacccgataacctgggaagtggactttatctgggataccagacggcaggagatgcaacttacctcatcggacgggaatctgaatgccacggtcaaaggtatagacgaccaatggatgatcgactgcttttgcttttaaccatgcccgcgaatatatccggcaaataaatttgccggaaacgggaattgcctacatttgtaaaatggatatttccggcacagactaaacagatcctcgacgaaccgcgcctcatcggttccggcaggatataaaactttagaacgatgaacgaagagatgaaattctgccagagctgcggcatgccgatgcaggcggcgggcgatttcggcactgaaaccgacggaagcccgagcggggaatactgcgtctattgttacaagggcggcaccttcaccgcggcatgtacgatggaggagatgatccgccactgtgcacagttccacgaacagttccgcgacgaaaatggcaaaagctatactttcgaggagtccgtcacgctgatgcgcgaatactttcccacactcaagcgctggaaaaaagactgagcttcgcagcacggcaataacattcggaaccgggaaaaccgaatgggctttacgtccatagcggttcccggataatttgctatctttgcctggaaacttaaaactccgtaaacgaaaatgaagaaactcctgcttttatgttccgtcctgtccctaagcgtcctgtggcccggggatgcgattgcccagctgaaaatcggcggcaagaaactcaacacggcaaaactgctcgacgccgggaaggatgtcgccaaagcggtgaccctgagcgacagcgacatcgcacagttgagccgcgaagccgtagcatggatggacgccaacaaccccgtcgccgatgagacgaccgaatacggggcacgcctcaaacgtctgaccgagggtatcaccgaggtcgacgggttaccgctcaacttcaaggtttacaaggtggcagacgtcaatgccttcgcttgcggcgacggttcgatccgcgtcttcagcgccttgatggatctgatggacgacgacgaactgatggcgatcatcgggcacgaaatcgggcacgtagtccacgccgacacaaaacatgcgatgaaaaacgcctacctggcatccgcggcccgcaatgctgccggggctgcggaaggaagcaggctggccaagctgagcggctcgcagctgggcgaattggtgacggccttcaccgatgcgcaattctcgcagaaacaggagtacgaagctgacgaatacggatttgaattctccgtaaaacacggtttcagcccctatgcgatgggcaactcgctgaacaaactggtagaactttcgaagggagccaaggcatcgaccgtacaaaagatgttttcatcgcaccccgacagcgagaaacgcgccgccaggatgaaagagaaggccgacgcacacgcggaacagtagaagttacaccgaataataccggctcgcccgggacagggtcgtgcagggagagtccgcactattcggcagccaatgcgcccaataatctatctgccgcacaattacgcaaaagccggggaaatccccggcttttgccgttcatgctttcggcggggacacaggccggacttctttgaaaaacaccttcgtccccggtaaagccggagctatttcaagggctggcaatgcgggcaatagtaaaccgccccgcccagataggcctccttgacaagtgcacctccgcatacagggcacggatccgtatatgtatttttcgagaggatgaccttgtacccgccggaattgccgaaaagatccttctccgtatcccggccaccgaccgctgtcatttcggccagcgtggatttcacagcgccgaacagcgcgtccagttctcgctcgcccaacgtcgccatcttccgtttagagtggatccgtgcattgaaaagaatatcctgcaggacgccgtttcccaagccgggaatccgctgttgcgtagcaaggaatgctttggcggaaagattaggtttagcaccggccaccaggcggtcgaaataagcggcatcgaacccatcgccgagcggggaaggtttcgacaaggcacccaggtagtacggattatccagtgtatcccggaaagcattgatcccgccatacatggccaccgtgaagaccaggaaactgtcatcgtcgaatgctatcagcaactggtatttgggcgggatatccgctccggccggacagtaacgcatgtgtacgccgtcggaaagcgcgatatgcaccctatcctccaacagcaggtcgacaaatgccccataacctgcggcagccagaactttttttccggcgaacaaactcctgtatgcggccggatccccggtataccagctaaatttatgcggatacgttgcgttgaaaacatcggtaatcgtacggccggtcaatacatcggccgcctgcttcgccaaggtgcgagactcgggtatctctatcataatctgttctttggaataaagatagtaaaaagattccaagcaccaagcctattcggggcaagtcatcgatttacaagattcttcatctcatctccgaagtcccgttttttccgtcagccagtttgccggccagccataccagaaagggcaggtagcagaagcccaagcgcccggaagatccgaaaaatacaccacggtcaaatgggagctccttcgcaatgggagggctgtgccaggcatcccaacagaacaccccgcgccacacggaagaacaaggcacaggaaggcatagggaaaaggacaagcctggggcacaaggctgcgaattacccaatgcggaaaggggcataaaaaaaggtcagaccttacgatctgaccttgaagaggcggctacctactctcccacgggaaaaccgcagtaccatcggcgttagtgagcttaacttctctgttcggaatgggaagaggtggaacctcactgctataaccacctaaaagaacgttttcgataaaccgggacaaagcaaacctgtttgttttgtcgtgtggagaaaacgaaggacgaagtccgacatgctccatgctatcgaagtagtgcgagcagccttttagtcgctgcaatccgtcgcacccggtataagttgacatacttcggagatgagataaagaatcttgtaaaaaagcctttcgggtaattagtactgctcggctttgacattactgtctttacacctgcagcctatcaacgtagtcgtctcctacgcccctcaagggaagacttatcttggggatggcttcgcgcttagatgctttcagcgcttatccagaccgaacgcggctactcggcagtacacttggcagcataaccgatacaccggaggttcgtccaactcggtcctctcgtactaaagtcagaacccctcaatcttcctacgcccgcaacagatagagaccgaactgtctcacgacgttctgaacccagctcgcgtgccactttaatcggcgaacagccgaacccttgggaccttctccagccccaggatgtgacgagccgacatcgaggtgccaaaccgccgcgtcgatatgagctcttggcggcgatcagcctgttatccccggagtaccttttatcctttgagcgatggccagtccacgcagaaccaccggatcactataccctgctttcgcacctgatcgacttgttggtctcacagtcaagcacccttatgctattgcactctacgcacggttaccattcgtgctgagggtaccttgggaagcctccgttactcttttggaggcgaccaccccagtcaaactacccaccaaacggtgtcccctctcgagggttagaactcaagtacacaaagggcagtatttcaacgtcgactccacgaacactggcgtgcccgcttcgtagtctcctgcctatcctacacattgtgtacccaaattcagcgttaagctatagtaaaggttcacggggtcttttcgtcccgttgcgggtacccggcatcatcaccgggactacaatttcaccgagctcacggttgagacagtgtccagatcgttacaccattcgtgcaggtcggaacttacccgacaaggaatttcgctaccttaggaccgttatagttacggccgccgtttactggggcttcgattcaatgcttctcttgcgatgacatcccctcttaaccttccagcaccgggcaggtgtcaggccctatacgtcttctttcgaatttgcagagccctgtgtttttgataaacagtcgcctggacctcttcgctgcgcccacctcgcgatgggaccccttttcccgaagttacggggttaatttgcctagttccttaaccgtgattcactcgagcaccttaggatactctcctcgaccacctgtgtcggtttacggtacgggtgacatatactataacttagaagattttctcggaagtcgacttgggtgcactatcaaattgcccgtaggctctctgtactgtcaggtttcagcaaggactaactcttaatctgtccctatacctaagccctttaaccacctattccgtcaggtggcggcacttacgttccttcgtctctccatcgaggtatatgtcagtatcggaatattaaccgattatccatcgagatcaccgttcggcttacccttaggacccgactaaccctgatccgattagcgttgatcaggaaaccttggtcttgcggtgtgcgggttactctcccgcattatcgttactcatgcctacatttgcttttccatacactccaccaaacctcacggttcggcttcaacgcggaatggaatgctcccctaccgcactttcgtgcccagaacttcggtggtatacttgatgcccgtttattatccacgctttgccgctcgactagtgagctgttacgcactctttgaatgaatagctgcttccaagctaacatcctagctgtctctgcagcaaaacatcgttagatcaacttagtatactcttggggaccttagttgctggtctgtgttgttccactctcgtaaccggacattagcacccggtcgctcactgctgtaaatcatactactggcattcggagtttgtcaggatttggtaggcggtgaagcccccgcatccaatcagtagctctacctccagtagactcttaattacaacgctgcccctaaaggcatttcggggagtacgagctatttcccagcttgattagcctttcacccctaccctcaagtcatcgagaagcttttcaacgcttattcgttcggtcctccagttggttttacccaaccttcaacctgctcaagggtagatcgcaaggtttcgcgtctacaaccactgactaaacgccctgttcagactcgctttcgcttcggctccgtgcatccgtgcacttaaccttgccagtgattagtaactcgtaggctcattattcaataggcacgccgtcacggcacgaagccgctccgacaggttgtaagcgtatggtttcaggttctatttcactcccctgttcggggttcttttcacctttccctcacggtactggttcactatcggtctcttgggagtatttagccttaccgggtggtcccggcagattcagacaggattcctcgtgtcccgccctactcaggatactgctatcgcctgacgtgcttacctgtacgagtctttcactctctacggatgaactttccagaacattccagttcacagtcatttgaatattgcagtcctacaaccccacagttgccgtaacaattgtggtttaggctgtttcccgttcgctcgccgctacttaggaaatcgatgtttctttcttttcctcctcctactaagatgtttcagttcagagggttggcccactttcgtgtgacaggccttctgcctgccgggttgtcccattcagaaatcctcggatcaattctcgtttgcaaatccccgaggcttatcgcagcttaccacgtctttcttcgcctccaagagcctaggcatcccccatacgccctttattactttcttacatttccgataacccctattgtagttatcggaactttatctcatctccttaaatatgtcaatgaacgctggtcgaatcctcgacctgagtggaggataagggagtcgaacccttgaccccctgcttgcaaagcaggtgctctagccaactgagctaatcccccgagttcggtgtagtcccgtgcggacttgaaccgcagacccctacattatcagtgtagtgctctaaccaactgagctacgggactgtatccgcgggaagaccccactcggtataacataaaaattacaggttaattcgagagaaaagaatgagacttatctgttgacgaaatagtcacactctccagaaaggaggtgttccagccgcaccttccggtacggctaccttgttacgacttagccccagttaccggttttgccctaggtcgctccttgcggtcacgaacttcaggcacccccagcttccatggcttgacgggcggtgtgtacaaggcccgggaacgtattcaccgcgccatggctgatgcgcgattactagcgaatccaacttcatggaggcgggtttcagcctccaatccgaactgagataggctttcgagattggcatctcctcacggagtagcgaccctctgtacctaccattgtaacacgtgtgtagccccggacgtaagggccgtgctgatttgacgtcatccccaccttcctctcggcttacaccggcagtcccgccagagtgcccagcttgacctgatggcaactaacggtaggggttgcgctcgttatgggacttaacccgacacctcacggcacgagctgacgacaaccatgcagcacctagtttcctgccccgaagggaaatcctgtttccagaatcgtcagtaactttcaagcccgggtaaggttcctcgcgtatcatcgaattaaaccacatgttcctccgcttgtgcgggcccccgtcaattcctttgagtttcattcttgcgaacgtactccccaggtggataacttatcgctttcgcttagtcaccgactgtgtatcgccgacaacgagttatcatcgtttactgcgtggactaccagggtatctaatcctgtttgctccccacgctttcgtgcctcaacgtcagatatagtttggtaagctgccttcgcaatcggtgttctgtatgatctctaagcatttcaccgctacaccatacattccgcctaccgcaactactctctagtctaacagtattagaggcagttccggagttaagccccgggatttcacctctaacttatcaaaccgcctacgcaccctttaaacccaataaatccggataacgcttgaatcctccgtattaccgcggctgctggcacggagttagccgatccttattcgtacgatactttcagtcacctacgcgtaggtgagtttaccctcgtacaaaagcagtttacaactcatagagccgtcttcctgcacgcggcatggctggttcagacttgcgtccattgaccaatattcctcactgctgcctcccgtaggagtctggtccgtgtctcagtaccagtgtggggggttaacctctcagtccccctatgtatcgttgccttggtgagccgttacctcaccaactagctaatacaacgcatgtccatctataaccaccggagttttcaacccggagagatgcctctccgaatattatggggaattagtaccaatttctcagtgttatgcccctgttataggtaggttacatacgcgttacgcacccgtgcgccggtcgccaccaaagtattgctacctcgtgatgcccctcgacttgcatgtgttaggcctgccgctagcgttcatcctgagccaggatcaaactctccattgtataaaattataaatgttttgttagagtcctgactattcgtttatcctttataaaaggaaattgacagataaatactacatttcttttctctcaaaatataaccagtaattcaaagaaccagtttgaaaaatcgcatttacgatgcgaaaggactgcaaagatagagtaactttttgaatcctgcaaatcttttttcaaaaatctttttaagaacttcgcgtctcgggaaatcgggcttacacagagctttaagctcctttattgtaaactttcagccttcgtaagaacaaccgtttttctcaaacgcggatgcaaaggtagcgacttttttcgaacctgcaaatattttcgcatattttttgcataaaagttaaaaattcttcaaatctgaggtatacacctatgttttattaaagaagaattagtcggccagcccttatgaagcccgggccgcacatcgccgcaaccgggaagccgacctgcggggccgagggcttccatggaaaagaccgcagcgagtaaattcgggtcgagtcctgcaaaactgagattttttactatttttgcgtcagattatccgaccgatatgaatttcagaaaaatatcacagctcgtgctgatcctgctcatcgcggatcaggcactcaagatctgggtcaagacccacatgcacctcgacgaatcgatcgtcgtcttcccggactggttccaattgcgcttcatcgagaataacggcgcggccttcgggatgcacatcgccaccaaaggcgggttcgactgggggaaactcctgctcgggattttccggatcgtgatggtcggggtcatcggctggctgatacaccaccttctcaacaaacgcaaagacacccccaagggagtcatcgtcggcctggcgctggtcatggcgggagcgctcggcaacatcatcgacagcgcgttctacgggctgctcttctcggagtcgacgccctatacggtcgcacatttcggcggacactacgccgggttcatgatgggcaaggtcgtcgacatgttctatttcccgctcttccagtggaacggtgtaccgcggttcctaaacttcctggtggacagcaacaactactttttcggggccatcttcaacctggccgatgcctatatctccgtcgccgtcatctatctgcttctgtttcagtacaaattcctgagcaagtagatttttttcgtaaaaatagttggtgaatgagaaaaaagtattacttttgcacaccacaatttccaaaagcccaggtggcggaataggtagacgcgcacgtttcaggtgcgtgtgccgcaaggcgtgcaggttcgattcctgtcctgggcactaagttgtgaaaaaaaggagctgataatcagctcctttttttgtgtagggtaaaatgtaggataaattaaatcaatcgtccccttcaaaatccttaaaaaaggaactgccggcaattatagcagcattctcatccacccccaatcgcaggtaacgcatagtcgtagtaactttcttatgtcccaaggctctggagattgatgaaagcggaactttggaacgctgaagatgcgttgcgaatgatcgccgtgcagtatgggtagagatcaaagcatacttctcaatccggatctctttcacctctcctcctcgatgttcgcatattgtcactttttcgtcgatccctgccatttttgccagtcgcttgatatagacattcattttctggtcagaaattgtctttgacaagtcaaaatcgctctcgaggattctttgtatcacgggatgaagtggaatggcaatcggggtatctgtcttacgggtacgcatcataatcatcccatcgacaatatttgactcgctgaagcgactaaagtcagataccctcatgcctgaaaaagccccgataagaaaccggttccgtatcagttcacatgtagctatacgctgcctgaccgctttctctccgcacagatccggccactcattcaatactgcgttttttgtgattctcaatctatacaacttcatcagttcgtcaaccgaaagatagacaggatcactctcttttgctaccgtgataaaatttttatgagtgtgccattcaaattatgcaggtgatccacatctcgggcttccctataaacctgtttaatcactttgatgagactgccgaaataattatccgaatatccctgcccatatatccagctccggaactgattatagaaattgatattgatatcttcaaattgcaaacgacaccgaatcatcttttcatactgcttcagcttattcaggactgttcggtaatgccggatcgttattatcgacctcgcatcggcatagcgggcaatataacgctcaaaataatcagagtaatagtcaggggggaggctccagggtatttatcgacggaataggtcgctctaaggctttgcaatattcttcatctaccaactcgaagaagtcccgcaaagacggaaccatattgcttttcttaaaacaaacctcagctcgttgggctgcctgactccattgctccaatgtatcattcgtacaattcgctaacctgttttcacggcacacccgaaccctctgccgctgggggtttcagaactttaccagagtcgactcttttgtcgtgcgtcgatactgtttgcccttaaatgttacggataagataatcgccgatctctcccgctggggagtagctaaatagaattttatcattttgttcgatatactattatggagtccgtgtttgaaaattggatcccattacaatatatcaaacacagaactactctttaacacgctctttatcaggatattccacgccaacgcgggggggggctggtgtagttccaagaaatgatcgtttatgaaattttgttgttgaagtaatgtttcagcctgagttctaattattgtcataagctcagctatcattgagtcttttgcagtattctccccacgaatagacgaagaatccaattcctgctcaacaataacagcatcgccaatcccagttaacagccagtgaagattaacatctggaacaatacacaatatatttgctatcgcatttgaattcaaaggtgtattctttgcttgcccagtaaaactcccataagacattcctatcttctcacaaaaattcttcttaccaaaccattttatttcagcgatatacaatatcctgcccttaatcgcaggaaatttattttgcatattgttgcttattagaaaatatatttgcattgtggtacgtgcgtaccgaacttgcgtaccacaataaattggataaagttaagaaataacatttgtaaaccaaagacgtggctcgaaaaatcactttcactgaagtgccatcttctaaagggtgggaaccattttttaaaggaatggcggtaaaagatcctgccattttcaaaaatgtagggaatgtagtcacaaatggccgacaggcaataaagcggtataacaagaagataaaaacaggaaaactcgagccacgaaagtttgaaaccaaaacatattcagacgaaaatatatttactatcacgagaatatcgtaaacagtaatcagttcatggaagactctacacatattgattccaccaagatcagtctctacattcaacaattcgaattcactgtgagtaatctggaggccacgattacacggatgaaaaaggagtgtttcgaccctaaaaaattctatggaaccgcgataaccgttgacgcttgtgcccgaatgcacagcgtatgcaccgtgactgttcgtgaatatgtccatgccggcctcattcccactcacccggatagcacctctcgaaaaatcctcatacttacaacagatgccttattgctcgacttcaaacagctcaagcaaaaatataaagaattgaaattatcaatataaagcacaagagacttgaggggagtggtgataagactgcatcactgatcccacggtagcagttggcacaccatatcccctctctcttgtttatcctcgatcatggaatctgtgcaaaagatatatagcagcaaggactctcgggtatacaaaagcgagagcttgatcgttcccccaaccctcccgactggcgaagcaccactcgaattaaaccagccaaacatgatcttggatgccaaatacaattaccggctgatacaactatcggcaatcgtaaaaatcaccaacattttacagccgatcatcaatcaaaatatagacgaatacgtcacgctgtgccgacgcttcggaaacaaagaggaacatccaaaaattgattaccttttgggggaagagcggaacctccgattgcacgccgaaaacgtttactggaagatcaacgagcggacactcgaggttaggatacctttagatgcttttacgaatatccgaagccattatagccggatcagagcagccatcagcgatctgatcaggataccggttaaatttcccacatggtcggaattagccaaagaaacactgactgacggatgccggcctttatgtcaaggagtattttataacaatgacaagtctcagaaaaacagaagctatatccacattttcttcgatgaagacatagccagattactggtcaatccctgttacggatactcacgcctattacaagctaccgtcgacaactgccgttctatttataccgcgaggatctacatgcagatctgccgacacgcagatgggaagaaataggctattccctaccctgatctccgattgcttctgaatgtcgactcacccaagaagaaagggagtacagaatccaagcagcgtatccgcgccaactcagtcccgaggtaccatgagttccgtcggcgcgtcctcgacgtcgcacgcgatgagctgctccttatggtgcaaaataatacgacaaactattatttcacctataccgaggagttcccgagcaatcgccattccacgccaagccatattatttttaacatatacgagacacatccgtcgaaaaaagatctcgacgcttacgagaaccatctttcccaaattatgtatattggtacgggtataagaccgtgaacacacgggaagcatttactccggcgctcgactaccctgcacccatcgagtccgcacagctcctcaagattcagctataccccacctttcgggcatatgaaataatcggtgccgatgatcccggctgcggacagtgggcgcccatcgagcggacgattaacagcccgagtatttccggacatgagttcgcccccataaacacaacacatgccgatgcacaaggtatttcatgcaccttgacgagcgtgagcaatatgactaggctcgataccaaaaatcccctgctcgctccttacaccgaaggtgacacaatgctcctgttgccgtttaccgaaagcgcggcaatagctgcgaaaatgatggataggacatttattaagtataagttctacgctaaaactcagcctaacaaagtgaagatcagttcattttataataaaccaaatttacaaatcgaatcaacattctcaaaatcaataataaccttaactaaacgacaccccgaccgatcagccgaagatttgtaggtaaccgaaagtgcaaaaaaagagtaaatatgttgtttgcaagtatttaattctatttttctgcatgtgtccggagcaataaaaaagcgaaatcggacagatttaacggtaagttgtgttacttatccgttacctacccgaaatactttgcattgcattaaggcgtttgttttcaggcccttgcatcgaatttccgcataataaataacttgacattacgtttaacgaattcaaaaagttaagttattatgcaacgcagcactttcaaagtccttttctgcctcaaaaggcagtccgaaactccgatcaggttcccgtcatgggtcgtatcaccatcaacggcacgatgtcgcagttcagcgacaaactcaccgttcgttccaccctctgggatgccaaggctaaaaaagcttccggtaggagtctcgaagcccagcgtctcaatgaaaagttggaaaacatcaaaaccaatatcggtaagctgtatcaacgtctcttcgaccgtgatttgtatgttacggccgaaaaggttcgcaacgcctttctgggtatgggcgatgactgccgtcttttgttgcaaaccctcaacgaataccttgcaggcttcctcaaatgtgtgggcaaagaccgcgcctattccacctatgaggattactgcctgcggcgcaggcgtcttgccgctttgcacgaatacgaataccatgtcaagaacattccgttcaaagagttgaagcgggactttatcgaaaagttcgtggtctacctctcctcaatacaagggatacgctccgggacgatcctcccacagcatgtcgggttgactcgcgcccgcaattttcagtgtatccatataaattatttgtcgtttggtttgtcgtcataggtaaagggaaccagccgggtgatcacaaaagccggaatggcggcgagcatcaccgcgaggaagaagatccggtagctcatcagatcgctcaaaaagcctgaagccatgcccgtgagcatcaccgagaggttcatgatacccgaagcgaaagcgtagtgcgccatctggtgacgccccggagcgacctgctgcatcataaacagcgtgaggcccacgaatccgaatccgtagccgaagtactccacgacgatgccaccgcccacgagccacaggctcgaaggctggaaccatgcaagcaaggcgtagaccccgaacggcaggttgaagatacagcacagcgtgaaaagagtgcgccgcagaccacgtcgggcgatgtagtagcccgccaaaagcgagcccagcagaaacgcccccgcgccgaaagtcccgtagtaaaggccgatctgctggttcgtaagacccaagcccccggatgcggtatccgccttgaggaacagaggaacgatcttcatcacgaagccctcgcccaatctatacaggatgatgaacgcgatataataccagatgtgtctcttcgtgaaaaaagcgccgatgacctcacgcaggcccgacaggccctcccgcagctgagccgcctgaaggaagcgcacggagatggtaaaggcccaaagcgacgagcgcggcgcacaggagcaacagaacgaccgtccacgaacgaacagaggcgtcgtaagaagacgcgccgacggccgagaagccgtcgcagagccaccccgcaagccacaccagaccgcctggggcaaccagtttcgcaaaattgtagaacgcaccctgccagccgatgtatttagcctgggacgccggcggaagctccgacatttagaccccgtcggccgtgatgtcgtgcgtagcaccgctgaaggcaacaacggcaaagacagcaacactgaccgcgaagaacagcggaagctgaagcgaaagggccgctgcgccgaacagaacaccgctcagcatctggctcccgacgagccagaacttcttcgtccggtacaactccaggaacggctccacaggaacttgatcgtccaaggccacatgatcagagacgtccagaacgctatctgagcatccgagatccccagctccttgtacagaactgccgagaccatgtgcagaacgacaaacggcgaacccatcgcaaagtacaatgacgaaccccatttcaaaggagaatgtttaagatggctaagagattgcataatacacaaatagaagaatgcttaaagcattataaacatatggatttgctccgacataaacaacttttttatatgtttatactaaatattatttattctgatataatgcgataatcgcgaaatacagccttgccttttaacaaagagacttgttcgaaatttttttgtatctcgtgctaggttatttgaaatgcggtatttgaacgcaataggctgaaaatagcctgttgccttctctactgtataaagaatgtaacgactcgataaatcgagtcgttacgctctttcaatcccatagcagaatgggattcagctgccacacacgaaccgtcgttcccgacggacaggcaacgcttattttatccgctcaaaattagggcagactcatctccacccagttcataccctcgtcgccaatctgctggccgtttgaagagcggacattgatttcgcccaccatgtcgttgcccgacggcgacgagtctttgacgattgcaccggcaccgtcgttgagcttccagtagcctaccaaaccctccgaatccaccggaacggagtagaagtggttctcggcattgatctcctccttggtcaaggtgcggttccatacgcgcacctcggccatgtaaccggggaagaaacggtcggcattataagcgtaaccgatccagaaggcacggttccagtcgctctcactgcctccgtatgccacacccagattgaaaccggagtaattggagataccggcctgatacaaaagttctccgtcaacatagaaataagcgaaggtatcgtcccacgttactgcgacatggtaccagcgatccagttcggaaagttccagcttggcatccgtacggtttccgccgctcatggccagctgaatctggttccagggcacaccgacgtcgcccagacggaggaggaatttcccctcgatacccataatagtagacaacgaaccggctacgcgcgtatcctgaatattgaccagcgcctccatggctccgttcttcagaccgttgagcgcattggcattcttcagatacgggaagtagcagcgcgcgcgacgcatgtcggccacgcactcaatcagtcccttggacttctgcgaaatcttgatgttgaccgtcagcggctctgcattgtcgggagcgttcttctcggtgagcacgacctcgcagctgcgggcagatccgtcaaccagagcctccactgtgaagtgcaggccgctatcgtcggcattattataggtaaaccagccgtcggcaccctcacccaccgtcacgtcgaactcgacattggccgttaccggaatatcgagcgtctgagcctccacatccaggaaataggccagcttctcgggctcaatcttcgactggggaagctgggttaccttcagcacggctgcgccgttcttcacgcccttgatcgtcacggtagcctcgcgcggagtctcgccgtcgttcttagccatggagaaataggccgtaacgtcggtatcggcgccgccctcagtgggacgggcgatcgtataggtcagccagccttcggcctccgatacgatttcggccgtcagatcgcggtagttaacattcgtcgacagttctacggccagacgttcctcagccgtataggccagacgcatctccgccttcgaggtgatctcgatggtctcgggcacctcgcccttctcgacgatctggaattcgacctgtttgctgcccatcttgaagacgtagtcggcgctccgctcctgctcagtttcgttgggatccacctcgaagaccacttcagcgccgtcttcgcccgaggttgaggaaggatggacaaaatcggccgtgccttcgagcgtccacgcgcccgaactggtaaccagcaccgtcaccttaccgccttcgcggggtatgatgttcgattcctcggcatagaagagttcgagctgctcctcggtctcggaggcctttttcttaagcgtaatcttgaaaggagcggtcttcttgccgcacgcgaacgtataagtgaagacctggtcttcctccttgtcgttggccttcaccgtgaaggccacgatgtcgccgtccttgcccttagcggccgaaggggtcacataagcgttctcggcgccttcgagcgtccactcgcccgagctggtaaccatggtcgaaacatcgccgcccttgctccccacgacgccttccgtcggcgaaatggaaatcttgtcttcggtagtcgaaggatccaccttgtcgtcgctgtcatcgcaagctccgcagagtgcgagcgcagcagctgtaaaaagaaatattttcgaaattttcatatcttgtcattcaggttttaaggatttgttcattgccggcgaaccggacaacggcttcgtccggttccggccgaacggtcggcggcatcccggccaaagccgggacgcacgacctcgtcattcgttttcaggttagttgatcgggtgcggtgcgggatcgtactgcccctcgccgatcttgttgtagacgtttttgggatcgagtacgttctgctcgtagcagccctgtgccacgttgcggaactgcttgagcgagtgcgaacggttgttgctgactgttccggttccggaaggatcgaatgcgaaccacatgatccagccgtaaccctgattcatcagtgccttggcactctcagacgaaatggagttgccatagttgagctggatggaattaccggcacatccgctcagtcccataccgtttaccggtcttgctgcaccgccgtagtcggcgcagacgttgtcaatgaattcagacggcttatgctccacaccgtcgatgaataccgaaggcagcgaggactggatatagcccaagtaatagaggtgtacccaggtctcccaggggcacaattccttcatcgcctttttggtctcgtagcagagacgggcggcctgctgggagctggggcctgcgaaccattttccggatccggagtagctcgaatactcgtcatcgaaacctataccatcgagcttatagtcgagacagatttgagccagctccttgccgaactgctcacagccccagtcgctcaaaccagcgatgccggcctggtcatggttgcccaggatgtcgagcaacaccttgatacctttcttacgcagcggctggagcagctcctccgagttgtcgagtagcgcctgcacgttggggttggcgttcatgtaaaccttctgtttcgaagcatcccagttgatgttgccagcgaagagcacgacggcatcgaagaacggctgaccgtcctccagaatgtactcgatggcgttgagcgggttgcagtcgttcacctcgaagtaacagatgttgcggatcttcttcgaaccaatgcgcgaaactaggaagtcgacgtattcagcctcatctttgacgacgacaccctccgtctgggctacagcctgaaggggaaccatgtaggtggtaacatactccagatcggaagcactcggcgagagcgttacctcgatctgcgcagaggtttcgccggcagggatggttatcacgccgtcgttcgcaatggtgcagagtttctcggggaatacgacgtactcagtagcgtggtcgaagttgtactcatcgacatggcgttcgtcgaagacgagcttcaccttggtctcagccgtagcggtcttctccagcgtgaaggtcagggttttcttgacgggctccacggcatcgtgagcgaactggatgttcaaatcatcggccgtcgagagcgaaccgacgatctcctcgcccggggcgggattctcgctgccggccttctgcgatacggcgatcttcgcggtcttctcaccctcgctggacgtcacgacgatctgccctacacgggcgtctcccgtattgtccttggcgttgaccgtcagcttgtcgccctgcttctcggccgtcatccactcctcggggtaggagaacgtccagtcgggtgcattggtcgtaacggtcagctcaacggccttattgccagtagcctcgaacccaatgggatccgacggcgaaacgctcagtacgatttcacctacttcaagccccttctggtttacgttgatgttgacgggttcggcgttaccggctgtaatcgtgatgcggcccggacgtacggactccgtggtgttggcctgggcgttcacggttagtttgtcaccgtcctgcttggcgacgatccattcgccgttcttctcgaatgcccacgacttggcgtcagtcttgacagtcagcacaacgtcctgattgtcgccggccttgaactcaatagcagacgagggcgttaccgacaaagaattctttttgttcacatcatcgtcgtcatcgttgcagccgacgagagcccccgatgaaatggcgaacatacccgccaaaagcatcagaaatgactttcttttcatgtttggttgattaggttaattaaaaaggttaaattaaagttaaggtattacgattcctcaggtaataaatctctcactcttcggggagcgcgacgctctgccaattcacttcgcgctcggtcttcagatcgaagccgttgccggtataatccttgacgattttacccttcgtattgtcgtcgaacttccagtaggccaccagtccgtccgatgcgggatcgatcttgtagaaatggttctcggaagcgatctcttcggacgtcaaggccttgttccagaggcgcacttcgcccatcatgccgtcgaaacgacgctcgtagaacaagtcgccgtccgactggaggcggtacgagtgaccaatccagaagcagcgctccttgccgtccgtctcatcggaatgcggaatggcgaagttgatcttgtcaatgatcactgcctgcccgtcggtaccggatactgaggccttggccgtatccttcagcttgccgtcgatatagacgcagatagtgccgcggtcgaacgtgacggcgatatgatgccaaacgaactgcttgaggtcgtaacgactgtcggcctcgaccggaatcttcccgcgtgcaggcgaggtctcctcctccgaaaccttcttggcgaaggccacctgcaactggttggtaggacggccatcgtcgcccagacggatgaggaacgtatcctcgatgcccatgatcgtcgagatcttgcggtcaaacgagttggcgtagacgagcgcttcgagcgtgaaggtctccatgtccttcaccgcctcggtgtcggccgtccactcaggccaggcgcaattattttccatctcggccacgacgttaatgagcgcggccttcgagaagacgaaatagaccgtccgggcactttcgaggatattcatgccgtcggccgacacgatgcgtacgggcaacacgtagcgctgcttctcctcgatgggcagattatccaaattcgtaaaggcgaaggtgagcggcgcactctccaccatcccggccgtgatgacagtcgaaatatccgcgaaatcgtaatagccgccgttggcggggagcaattcggccgtcggatcgtcgtagaacatccggtagtgctccaacagaccgggagcctcggcgaacgtgaccgtgatgtcgcgctcccggggctgggccatggcgacggtgacgtcgcaactctcttcccgggtcacgtcgaggttgtcccgtttgataaacacgtcgtcggtgaacgacgttgcggagatgaacacctgattgctgaagtggtgtttgccctcctcatcctccttgcagcccgtgaatacagccgccaagagcaggcacaatgcgaatcctaatttatttttcatcgtcgtttttattttcaggattgttttcggactcctcttcgggctcggggttcaggatgccgagcgcctcgcggattctcttgtaggttggcgtattgaaatagtcttcctgtgcgttcgatgcgcagagccccagcttatcgcactgtacagtctgggaggttttcggatccatcacccactgggcggccacctgaagcgaagcgcccacttgagcgtcgctgccgccgtcggcgatcgacggcacagaggcttctagcacgatccggtcactcggaacgccctcttcgagctgatcgcgcaccatacgggagatagccaccgacgacgaggcaccctcggtcaggatgatgacgtagtcacactccgaaagaatcgtctggttctcgatgctcgtgataaaggcggggtatccgcggaagaagagcagcttgtcgggattgtcgcggcgccacgtgtctgccgccagcacaaacggagcggcgacactgctgtcgtaaccgcccagataggagacgacgatgccgtcgaatccataccgggagcaggccgcaagctgcttttcggtctcgatcttgcagtattcagcgaacttatcctccgtaaagtccccctcgtgctccgtcccggaagattcctccttcatagcgacccatgcactgcggatcgtcgtgtagtccacgacgttgagcgtgcgggtgcccttcttcgagcgcacctcggcaatctcatccatcagcgccggatgtaggttatcgacgtcggtcatgagcaggtaatccacactgtcaggcatagacataggatgctggttctgccgattcggagcagtcgaggttcctcggacgatcatcatcgtcaccaagtgttcgccggccttgaaatcccggagcgatgccagaaaaaccggatcgctctgattcatctgcggcaaaagatctctgtgttcaacttccgtccagtcgctgcacgaggccagtagggccgccgtggcgaaaaacggaataaatatgcgcttcatgtcaaatttcgttttaatgggttaaaaggcgtgtgcgattatttgacggccggattgcagtcccaccacatgcgggtcgccatgttgtcggagccaccaagcatctccacggctttggcgtagttctccgggttgttggtcgcctcgtccgcaggataggacatgcggcgggcgccgagcgtaaggttccggatgccctgcgagttattgcccacggcggactccatggccggaatcaggtgcgggaagcctgtacggcggaaatcagcccacgcctcgttgccaagatggaagttggcgatccacttctggatgatgatgcgctcctgcatctcctccttcgaggcgccgtcgttccaagccacccccagctgggagagctgtgtagaataggaggtcgcaccgccgttggggtcggtgtaggattccggaagagtggtgccggcaaggtattcgtcgacgcccgcaacaccccactgttcgaacgagaggcggacgccctgctcgtagaaggtcttggcgctgccacccatgttccagccgaacacgccgacggcttccgccttcaggaaggccacctcggcggcattcatccactgcaacggagtagccatgccgtctacgaagttgacgcctgaatagagcagccccacagtgctgagcgctggaatggcgataccacgacgcatgcccacatactcaggggcgttgtccccggagaactgcgccttgctgaaatatttctcgcggcgtggatcctcataaccgttcatgtagcagatgatgtcagctgcagcatgcgaatcgccgcccgtcaccgacccagctggggagttgtacatgcatgccgtatagagcggattgccgtccttgccgaaggccagggacgaaagctgcgcattgtctgcgttcgactgcatgacaccgacagagtgcgccacggcctgttcgcccaactgctgcggagagaggcccttcgagcttacgaaatcggtgtataccacccgcatggccagccgcagcttcatcgagttggcaaaacggcaccatttcacggctgtgccgtcgaagacctggtcggtcgtactcgtgatactccggtcgatgttctcgtccaacagggcgatcgcctcgtccaattcatcgaacatctgcgaatagaccttgggctggtcatcgtaggccacctggatcttaccggtgcttccgatctcggaataaggaatcggcccataggtgtccgtcacacggttcaggacgcagaccttcacaatcttgaggatggccagaacgagcggatcctccgaaataccctctacgttcgacatgttgctgtacagctgcgggatgactttgtcgctgtacatgaacacgttcgtccagttgtcggtcgggttgtatttggaaatggtgttcgtccagccgttgttcgcatcagcgtaataaccgccctgcgtactgcctagcagacaatcagtgaactgcgccgtattgacatccgtcgagacgacggtaccgaacatggcagagagtcccgaggcgatggcgtagtccttggcctccatctgctccttgtccacctcatagggattgctgttgatgtcgaggtaattcttggtgcatgcgcccaacccgcacaagactgcgaaggagagcgccgcttttatcattttgtctttcatcgtgtcgctgttttagaatttgaaacggagattgaatcccacgttgcgcaatgacggcatcatgaagtagtcgataccttgatagtagttgcccgtcgtcgcgatgctttccggatcgaacggagccttgttgtagagcatccacaagttgcggcccacgatcgaaaccgtgatctcgcagacgttgcgcagcactttgcggggaatcgtgtagccgattgaagcctcctgcaagcgcacgttcgtagccgaataggtgtagaactgcgggatggaattgccgcccgcgatggccgaataccaggtgtaggcatccaccacgtcgccgccgttgagcgtcacacctccggcatcgcgcgccgcggccgtagcctctgacacgccgtactggtcgagcatagcctgcgtacgcgaatagacgatgccgcccaaacgggccgcaaccataaaaccgaagttcaggttcttccaccggaagtcgttgcgccacgacatgttggcgtcgggcagcacgctgcccagcttgacgtatttgtttacatcctgaatcgtctccgtagccacatttccgttctcgtcgatgtaaatggcgttgttctcgtcgtagcgcaaatcgcggcgggagtagagatcacccagcgtacccccctcctgcaacaggaacagcgcgtcgcccagaccgcccatattgagccggtcgatcgagaagcgctcacccgtggcgtagttgataacgttgttggccagtgagacgattttattctggttggtcgacaaggtgtagttggtatcccacgtgaagtcgcgccaggtattccggtagcccaatgccaattcgataccctggttgcggacattacccgactggatgatgatcttggagaaacccgtgccgcccgagatctgcgggtcgaaggtctggttcgacgtatgcgaattgtagtaggtgaaatcgaggttaaagtgcttgaggaagcgcatcgtcaaccccacctcgaacgacttggtgcgctcgggcttgaggtggtaggcgggatactgcgtctgcgtgttccacgacaggccgctttcgttccacgaatagagcgggttggcaatgtagcgttcgaaggcgacgcccaccgaggcgaacgaaccgcgcaacttgatataggagagattttcgggcatgttaggaatgagctgcgacaacacgaccgaaagtccgaccgaaggatagaagaacgacttggcattcgaatgcggacccgccagctgcgacggccagtcgttgcggcccgtgagggtcaggtagtaggtgcccttgtagcccacctcggccgaagcgaagatcgactgcgtctgttcgcgccagccctcctgcttgcggacggtcttggtcgagttgcttaggttctgaatgttgaaaacgttggccagcccctgcttctcgcccgacgtaccgtcggcgatgggaccgcggatcttcagagcgtcgttcttcatatccgagaacgaagcgccgatgttggcctgcaacgaccagtcgtcaccgaacgttttgttgatattgagcagggcgtcgccgtaaacctgacgatccatcgtcttggtgacgccgtaaaggccgttggcagactgctcggtgagctgcacgttcgacgacgcatacatcttttcggtataggtgttgtgcgagttgtcgagacggatgcgacccgagacattcagccagtcgaggatgtcgtacgacagcgccgcgttgagcatgtaacgatccttacggttctcgcgcaggttgcggtagttcgcccagtaggggttctgcatggtgatggagccgtcgcccatcggccagtactgtttcgaaatcttgtctatgggatcgtagcgctcgtacatttcgatatccgcccagtcatcgccgcgcgggaagaggtaggctcccgtcagagggttgttgtaggttccctgattgatcatgttgcagtcttcctgcagtacgtaactggctcctacgtccagtctcatcttgtcgttcagaaaagaggtggtgttgcggaaagtgaagttgtagcggtcatagctgttgttgggcacgataccgtcggaattgatggccgcggctgagaaataggtctgattcttctccgttccggtcgaaagcgaaacgctctcggaattgactacgccagcacggaaatagtcctcgcggggatcgtagccgtatcggttggcgcggttgagccgcttgccccagctgtaactggccacgttgatcggcgtagtaaggttgcccgtgccataacggttctggaactcaggcagcaccagcgggctcatgatctcaacaccggccgtcgcggtgacggagagctgtccgacctgtcccttcttagtcgtgacgacgatggcaccgttggcggcgtccgagccatacaatgccgcggccgctgcacctgtcagcaccgaaatcgactcgatgtcctcggggttgatgtcggcgatgggatcggtcgtaccctgcgacgcgaactccgtgccgccgtccatcgccttggtaaacatcggcacgccgtcgattacataaagagcattcgaagactgtgaaatggatttcgtgcctcgcatgacaaccttcgaggctccgcccatgccggccgacgaggcgttgatgttcacgccggcaactttaccattgagcgagttgatgaagttgacatccttgttagcgatgacggcatcagcatccacctgctgtacgttgtacgacagcgccttctcggcacgtttaatgcccagggccgtaacaacgacctgctcgacctcgatggacgaattggacagtgtgatgtcgaaagtcgtgcgcgagccgatgggcacgacacgggtttcgtagccgatgaaactgaccgacagttcggggttgtcgaccgaggcggggagcgtcagggtaaagtctccgtcgataccggtggtcgttccgacggtcgtccccttgatcagaacggtggctccgataatgcccaaaccgccggaatccttcaccacgcccgagatgaccgacggccttgcagcggagacgcgcttcgacagcacgatgttgggaaccgtgatctcataggtgatgtccgtgtccttgaacaacagcggcagcacctcgttgagaggcttggaatcggccttgatcgagacaatgcgttccgtgtcgatttcgtccgtataaagaaaaagatacttggtctgcttttcgatttcgttcatgacgaccttcatcggaaccttcgtcatgtcgagcttcaccgcgattttctgcgtttgagccacagcaggcacaccgcacaggaacacggagagaattagagtaatcaggcattttatctgcctaatacttaaatttttcataagtttgctgatttaagatcaataggttagcaatcgaatcactgtttatctcccgccggcggacacgagcgtgcccgagcgcgtcggcggtgcagcataaaagtgtcttgaggcagaagtcggtttattccatagagtcggtttagatttttgttatttttatgtgtatcgtgttcgtctcgtcgtcgcgcgtaaaggagaagttattggtgatctggagcaacttcagcgcatgatccacaccgtccgacacgcggattttgccgtggtacttgagcacgggcatatcctcgggattgtcgatcgtgatccggacaccgtaatagttctcgaatttgcggatcacctccccgaacgacagcgtgttcaggttcatcagcccatcgacccagcggaagtcgtccggatcggttatccggttgagtttgagatgtccgtcgaccaggtcgatctgctcgttgggggagagaatgaaggattcgccgccgccgaggcggttcaagattttcagccgtccttcgagcagcgcagccgagaaatcggcggttcgggcatcggccaggatgttgaatttcgtacccagcacctcagcatcgcaggcgaatgtttccacgatgaacggacggctggcatcgtgcttcacctcaaacatggcctcgcccgaaatcttgacccggcgtgtctttctggaaaagatcgaagggtattccaatttggcgcccgaattgagccatacggtcgtcccgtcgctcaaggtgacggacatgctctgcccgttgggcgcggtaatggccatcatgtcccgggtacggtattcgagaatcctgtcggccagatagtggctcaccccggcgcatacaagcagcgcggctgcggccgcggcactccattgagccgtcctcttccagagcgaaacagtgcgtctgctgacacggggctgcgcctctccggccagaatattgagattggaaatataatcgagccgatcgagataccgctggttttccgttgacgcgtccaaccagtcgagtacctcggcgagttcttcctccgaggtctcgtttctcaagtatttctgcaataaaagatcgtccatgtgttcatgttatatagtaataacaaacacacggacggggtaagtagtaaaaaatgcaaattttttcagacaaagatcggaacgcactccgggcagccctgcggagcgctattttaccaccgagacgagagtatcagggtgatcagtacggccgggaggtaatccttcagttcgaaacgcatcaggttgagcgcccgacggatttcgaaattgacatggctgacggaaattcccagttcagcggcgatctcgctgtacgtcatattcctgatccggcttaacaggaatacgttgcgagtcattttcggcatcttacggactgcctgtttcaggattgcgcggatctcttcggagaagagcaggtcaggatcgcatgccgacagtgagcgcacatcggcctgaagccggcgcgtcagcgtcgaatgcatgtcctgctccgccctgcggtggcgaatttgggcgttgaggtagttcaggcaacggtttttgaccgaggtgaggatataagccggcacattggtgtccgccggcaggttttcatgcatttcccaaaaagtcatgaaactgtccgacaccagatcttcagcggtttcccgatcgcggacatagcggtatgccagggcgataaaacggggcttgaattcgaaaaacaactttccgaattccgtggaggaaatgctgtctgtcttgacgtctgccatttgaagtcccgtctgcccggtacacgaaaataccggcgaacccgattcagaattcgcccattacaaaatccccccccccgatgaaaatcagaatggaagtcactgataatgttgtatttaatgaattttccaatttcccgaatgcttttgtcggacaggaaaccgtcaatgattcctatcttcgacaaagatagtgataaaaataataattgagtagtttgcggtgaaatagtttttcgatacggagtgactgaaacggcccgttcggcaacaaaaacggccccagaaccgctttgcaaaagaggggacggatgatttcgcctatatattatcggtatacggcgtcggcaggatttccgccccccggaacgcctttcgaagagagtcccgatgaccgggcatgccctgtttccggcgtcgccaagagcaatttcgaagagtttgccggaaagcgagacgcagaccctcgaacctccacaaggtggacgagaagatggtaatcgtattggctttcgccatcgacggcggagcgaaagagtgatccccggaaacacaccctcgtttccgatcagtgcggtgcagaacctctctgcaccgtttttgattatcgcggagcaggtttcgccttaacgcagtctggcccggacgggacatacacgacgtaaggccctttctacttgcgtttgaacttaaacgtacacaaaagtaaatcatagaaggttttcgacgcattgtttgatttgccaatccaaaaaacttttcgtatcttgcagataggttatttgaaatgcggtatttgagtgcaatagactgaaaataaaccgttaccatctcgtcacctattctcctatacaaaaaaaaaatgtaacgacccgataaatcaagtcgttacatcactttaattccacatcgcttaagccattttttcatactggcatcggaatgaaaccggcacccaaaatttcgattttagcatatccaaaaatcagacaccatcggcaataatattttaattctaaatttataaaaaagtgaaatcatcaatatgcaaaataataagcatcaatatcaaatatgaacggttcaaaattagcacccgaagcagctcgaatagccctgctggatagaataaactacagccagtctgccctgcaaaaagcctacgacagccacaagatactgcttgaacaacttaacgaaatatcggacgaacttaccatgcctgataaaatactgttggaagtagaagaatatcttgaacccgaatacacccgagcgacccggatagaaaatattaaattatggcttacagtggcattaggtgtttcgtctttatgccttacgctcaatcatatagcagcaatatattatactggggttatcttgttcgttgtcgcgttaattttaggtattgtactgcttgtggtgagtactgcgttacgtaaaggaaatattcagcagcgaaaagcatggctcaataagttgttgagcattattgtggcaatattattttttgctatttgtgcagccagtattttactctattatttcaacgaagatacatattttatatttagcagtatactattcgggggaggatgtatcttgatgatgttcttcatccgcagactcgataatcaaatacgattattaagaatacgtgggaaaatcttcaagaaagcatccaattacaaatccaataaagactaacaatgagccaattaacaccaatggggaaaatatgcaccgaatatgcctgtttttagatacatgcagtaccagcattttttggattgggttagaacaggtctgtaccggataagcaatatctgtaaatgggaagacccctatgaaaattacctgctcaagtgcccgttgttggatagatttggactgcgaataagtaagatagtgcttcccctatacgggcaatgttggacaacgctcccagagtccgatgctatgtggcgcatatactcaaagattagcagaggacaggccaatgataccgtagacagctgtgaaattggtgtaagaattaaaaccacagcagaaagactgcaaaaattaccatcaataatcacgggcttcaatcgcggccatatcggcccagtaaaatatatcaatcagaccgttattgatcgtaatctgcagagtcttcaattaaaaaaacgaaggagtattgggatgcttgcgataaaactctttttgaaaaacgggaagaattcagtcatgagcagaaatttaggttcgtattcttatacaccaatggtgatccttcatatttggaagtacagataaaaccacaagaactaatcgacgaagttacctttgaccccagaataactaaagaggactttgacattcaaatattaaacaattaaccgtagctgttttaacctctatcctgttctgtgcttgcagcccccagccaccgagcaatagcatggcattagaactgtccgacacgagaattattaaaatcacccacggcactccgcacccgattcgggccgataatgccagaattatcggcatggatgaaatgctcgatagggtcaaatcaatcgactacataaaactggattcatccgagcccgtcggcgtaatagacaaaatgatcgttacaaaagacaaaatctatatattggactgctataccgcacagcagatcttcgtattcgacaaaacgggcaacctgttgttccgcatcaagaacaaaggccgggggccgaaagaatatcagagcatcagagatatgcaggtcgacaccatccggaatgaaatacttgtaaatgacgcactggcccgttcctatctttatttctccgccgatgacggagcattcctacaccgggaaaaaaggagtagcaaattgctatttggcgcatatcgacagtttgtatataaattatcaaatcccaggacaggattttaacgaccatgagaattgggcgattctcgtttccgacaaagactccattctttacaagggcttcgaaccaacgccacttcagaatgataattttattaacaatagctttacttatgactgcgagggaaagcttttgtttactccggtctactccgatactggttaccaatttatgtctgtatccatcgtatcacccaaatatgtgatccgccaaaagaagagcatatggaatctttataaccaaaaaaaacctcaggaagtagataagttaatcaagcagaaagactacacaagatatgcgggtaaatttctcgatggggaaaattatgcttcttttgaaattgctcataaatgagataaatatattacccccagactttattttggggataagaaaacagatgtcgtttatcaatgggatactacgcaaggtgcggatacaagtttggtcattcgcgatattatccagcagccgatagccgtctacggcgatacctttttcggcacctgttcgccgcaaatccccgaagaatacaggaaaaacctgaaccccaagatcaaaagcctgctggagtgctccgatgaaagcgacaaccgatcgtggtcgcgtatacgctgaaataatcggacgcaggccttgcatcgggaaccgttttttctggattacaaaattgcaccttattttcaaaacggcaggcggataaattgatttttagcctatattttgatcggacggacttatcggaatccggcaagcgccccatatgccggatttccggggcatagattcccggaagagaagttgccggaagcgggatccggtgttccgcccggaaaaagcaggggcggagcctttacagcctccgccccgcgcaatcttaccgtcatccgttaatacacctcgaactcatagattctggcggtatttccttcgctttggtcaggttttgagaccacgagcctcacgtatcgggcgattatgggttctggaaggatcctgtcggtttcgaaagccgtgttgtcatagaccgtgtccaccgttttccactcctcgccggggctttggcgcacctgcagcgagtactcctttgtgatgtagtccagggattcgagcgcagcatgcatgacataccatccccggatcgtggtctcccggccgaggtctacccccagcagtttgggtttggcatcgctgtaatcgcaccacttggtggacacatcctcgtcggtggcgcactcggccctctcggaggcgttgacctcccccgacctttccacgacgggtttgccatagagcaggttcctgcgcccggcctgcgaggcgtcggcgcctttcacgggcagctgcacgcgcagcaggtcgtaggccgcaccgatacctccggcggggtcttcggccaccgtcgccgcgaacaccacgatgcgcgggtcgtcgggcagtaccagctgccgcgccccctcggggatgtcgaggccgatgcggaacatgtaggtgaattcgtagggtctgtcctcgttacggatcatatcatgcttgtgcgtgcccacgaaggccacctgcgcatccttgaggtagggctcggtatgccccgtatggccccactgtccgataaagccgccataatagggtaccagtgccgtgtgctcctttccgtcgacggtgaatacggcctgcgtgtcgtacatggtcgaggcggccagcaggtagagcttgccatagcgcccgcggggcaggtcgatggtgtcgcggcggcatttgacaccgttctccgcggcgggatcccccatctcgaagccgacacccccgtacacgatgcgggacggcagcagctcagcggcgtaggagcagcccttgccgtcgaagttggcgtccgagcggaacgggttgtaggaggctgtcttgacgttgtaaggcagctccaccgccgcctccgcggcaggcgtgagtgcccgggcgggcttggcgagtttcacgcggaaggtcttcatgccgaagggcccaacctcgaagcgcagctcgcggccgctgaactccgcgtcgcccacgacgtcctccacgccgttgagctcccgggcgtcgacgatctgcgccgcgaagcccaccacggcctgctgcgacccgaggcccgaggtctcgtagaaacgaaccacatattcgtccgaatcctcagcctgtttgagcgcccgcagcgccacattggggttctgcgaggcggccagcgagaagctgcggcccagcaccccgccgtggcggggcgcgacgaatgcccgaagcggctggttgagcacctcggccttgcgcacggcacctcccgcgcggtaatcgcccgcgtgccctacgatcgagtaggtgaacgtatggtgtccgaagtcctgcttgttctggtaggcgtagccgcccttggtcgcaggcgtatgcagcagcgtaaggcgcagcgtgttgtccgcgggtttgtcccagccgtacttgctgtcgttgagcaccgagaccccgtagctgccgtccgcgtcggtgaggtcggcccactgctgcgcatagacctcgtaggcggtcgcggtgttgttgccccgcgccacggagcccacgccaaggtcatagaccgcctcggggttcgagaccgaaagcgggaactcggccttcagcagggcatcggacgactgccagtcgatgtcgttcacaaggtcgatcctgtcggcctgggcgccttcgcgcagcgtgatccactgccggaagcgggaatcccccagcgtacgttccacgcataccgaggcgcgcaggggcccctcttcggccacggtgaccttcacctcgcccgtgatggactgcggtgctgcgtccacggtcttcttgagaatctcccaggccggccagctgtaagactcgttctgcgggaagaacgcaaggcggatagacttgccggcggccaccagctcgcggccatggcgcttgtcgacgatcgacgagatgtcgccgttagcgtccagcgtgagtttatagacgctgttctccagccccgaagtagtggccgttatcgccggggccttcggctgcccgcccttgcggatgtcgtagacggcataccccgcagccgggacggtggcctcgaccagcagccgcgtctgcccctgctgcgtgcccagcacctgcgagggaacccggacgcccttgtcgtcgtagaccgtgaacttgctgccttcgagcggaagcgtaacttccaccacgtccgagacctcaaaccccgcagcgttgtagagcaccacggggagccctttgacatcggtatccagaccccgcgaaaccgcgccaaccgaggtcgtgagtacgtccgcgaactgtttgagcgagatcagctcgtcgttccacgagaactcgtaggcccgggggatgctcgtacccgtaaggtcgtcgtggaactggtgccagataaagcgtttccaggcctcggtgagaacctcgcgcgggtagggcacggccccgagccagtcggcggcaacggcgctgcgctcggcagcgtccgcaagctgttcgttgcggcggttgtagagcttcatcgcagcctgcgaggtatagcaacccgtggcatgcacgtccatcagcaactccccgttccacaccggaagctccgggtgggcggaatagggaaggtagtccttgtagaggcggtcgctcgtggcgctgatgatctccaccggcccgtcgccctgcagtcccagttccaaagcccgcaccgactcgatggtcggggcgccgcccgtgtcgcccgtaccgtaatagtggtaaacggcattcagagggttgccctcggcgatgccttgcaggtacttgctatggctgaggtcttcgtaacgccacttggtcgtatagttgtgggcgtccatcacggccatgatacgcgaaccgtccacgccctgccacaagccgatctcgaacggaatcttgctcgcgccgtggaacgggcggtggcgccacatgagtttctgcgtcgagaagccgataaggccgctgtgtgcggcgatcgtcggaagcgtccacccgaaaccgaagcagtccggaaggaagatgtccgtgccttcgaccccgaattcgcggcgatagaagtgctgtccgtacaggatattgcgcgtgaaggactccgcggacgggatattcgggtcggtggcgtcccacgtgctgcccgtgacatgccagcgaccctcgcggatgtaacgcttgatcagctcgtactggtgcgggtagtactccttcatccactggtacttgatgccgccctcaaagttgaacacgtaatcggggtaggtgccaaggagaaacaggttttgatccagcgtcttcgggatgtactcccggatcgaacgctgcacgtcccagttccactgggaatcaaaatgcgcgttggatactaaataagctttggggctattctgtgaaaagacatgtgctgagatcagcacagacaggcacaataataaaattcgtttcatgggctggttggtttagactatttctgggttaaagaatttatatccgtattgggtttcaaaattagccggaaacgccccgcaaaaaatatttttaaatgacatattagtatgatcttttgacataattcgtaaaaatgcacgaataacccggatatttcgttctcccggcacaaaaacgaggctgcggggcatccggcaaaaacagaggagccatgtccggacaacaaaaacaggaatgcgggaagcgccccggacacacggctacggatagacgggaaagcagccggacaagggcaggcccgggcaatccggcaccgggaggggtcagcggcagctgaacacgacgctctgcgaagcgccgtgttcgtcgatcacggtcaggcggtgcttccccggcgccggacggacggagattttgtgttcgaaagaggtcgaaccgacgtagtagtcgtcgatatgccagaacagcacggcattgcggtcgcggtgcacggccgtaaagacaaggctctgctgctccccttcgagcgacctcggggcgaccagcacacgccccggctgcggatagatgatgtcgatggggttgttttcggcttggttacccggcaggccgggatgcagcgggggcagcggacggtagtcgggatgctgccggcggtaataccactcctgcgcaggcgggaggataaacatcggcatgcggacgatcctggccgggtcgtagcaatccgccgtcacacggtatttcaggtcggcgctcaggttgacgatccggtggtaggggcacacctccccgacggcggccgcacggggaatcatcaccgtatcgcggtcgggacagatatgcgaagccagatagccgctctggcggcagaccacggcgggttccaggtcgctgacgggctccgcgaaccactcccctttgggcagcaggccgaagacctcgaacaggacaggcgcggcataccccacgcccgtcatcagcgggcgtccctcgcccgtgcagttcccgacccagaccccgacggcatagtccggggtcatacctacggcccacgcatcgcggttgccgtagctggtacccgtcttccagccgatcttcttcgacgacgagaaatactgccattcgccctcctcctcgggacgggccacgtggcttatcgaattggccatcaaccatatcgcgccccgcgagaggggaatatccccggcatcgacctccgtgccgccgccggggtcgtaatgcggggtgcgtatcgtctgccggccattgagtttggccgccatcttcatgtaggccgaggtcagatcccacaacgaaatctctgcaccacccagaatcagcgaaagcccgtagtggccggcgctgcggttgatcgtcccgaagcccagggcacgcaccagcgcgagaaaattctcccgtccgtacttgtcgagcatcctcaccgaagggacgttgagcgaacgctcgaccacccggttggcaggcaccgccccgtcgaaggttcggttgtaattatggggtgtgaagtccctgtaataggtcggcacgtcggggaaaagcatcgcgggcaatgtcgtcccgttgtccagcatcgcagcatagagcaggggcttgagcacgctgccgctgctgcgcggggcgggaatcacatcgacgctcgtaccctcggtgcggtcggcggggtcgtacacgttccctacgtaggcgagcacttcgccgctttccacgtccatgacgacgatggccatgttgttgatcttattacctcggtaacgcttgttgtagcgccgggcgaggtcgttgactcggctttgcaggtcgtagtcgagcgtcgagcggagcgacccctcgcgcattttgcccagcaggtacatcgcctccatcggcatcggttcgggggcgtcgggcagatgctcctgttttgcgagggcgcatgtcagcgagtcgatacggccgtcgtgccaaatccggtcgagcagcccgtcacgcttctcccgcagccgttcgcggttgcggcggatatgaatcagcgacggagagttgggcagcacggcgagcatggcacattcggcccacgaaagctgtgccgcactgcggccgaaatagtaccacgcggcactttccagcccgaccacgttgcctccgaaaggcgcatgggaagcatagagggccaggatttcatccttgctgcaacgcagttcgaggcgcgtggcgagcaccatctcgacgaacttttcccggaacgtgcgaggtttcccgccgcggctcaggcgaatggtctgcatggtgagcgtgctcgccccgctcgtgatccgcccggccgcaaggttctgccgcacggcacgccccagcgccagcggatccaccccgaaatggcggtaaaaacgtttgtcctcgtaggtcgtgatggcgacccggaacttttcggggacgctgtccgtgggaaagaaacgccactggccgtcggaggcgaccttggccgacatcaggcggccgtcgcggctccacacggtcgccgaaaaaggctcgtcgaagagcgtccggggcaggaacaaacaataccccgcggcgagcatggcaacgaccagcatcgcgaaaaaacatattctctttttagccggtttttttgccatatttttacgtatctttggcaaagttacctaaaatcccccattatgaaaacaatatgccatgctttgtttgcgctgtccgccctgctcatcgcctcgtgcagcaagcagacgtccgacatcatcgaatggtcgaccaacggagtgacgggcgtcaggatgcctctccacgtgacgttcgtcgaaaacgtacaagtcgaggaaagcgccatgcaggatgccatatcaatcaccccggccgtcggtttcgacgcctacctgtcggggatgcgcatgatccgcatcgtccccaaatccccgctgcaatacgacacgcagtacaaggtggccatcgacgccgcgaaactcaccggccggcagcacaagggcatcgcggagttcaggtttgcgacccccaaactgcggtttacctacaacgacagctggctgcagcagaacgacgagatgaccggctatgtgctcatcggcgagatcgtctcgtcggactatgccgacggcagctacatggaacggaacctcaaaataagcggcgcggcgggtaccgacgtcaaatggacgcatttggaagacgggctcacgcaccaatacaccgtgggcaacatcgtcccgcggggcgatgagggctatacgctgacgctcgatttcaattacgacgaaaaacagaccctccgggtggaagtcccccgcaaggacgaatacgcggtcatcgaccacagcgtaaatccggaaccgctcgccatcgtggtcaccttctccgaacccatccggcagaaccaggatctgaaaaacctgatccgcttcgacaccaagttccggacttcggtcgacaaaaacaggctctacatctatcccgaagcacgccccacgggagcgcatagtgtcacgatcggccgcgacgtagtgagcaagaacgggcagaagctcaaagagagctattcgttcacggctacgctgccgtcgcgcaccccctcgatccgcttcacgggcaaaggctcgatccttccctcgtcgaacgacatgtcgctgctgttcgaggcggtgaattaccagaaagcccgggtgcgggtacgaaagatattcgccaacaacctgctgcaattcttccagcagaactactacgacgaccaatactattcatccatggattacgtgtcgcgcgtcgtccgcgacacgaccatcgacctgggggccaagtcttcgaccaggctcgaccagggcaacacctattcgctcgacctcagccgcctgatcaccgacagccgcaagtcgatgtacctgctcgaaatccggggtgtcgacccgcttacgcccgttgacgacgaatacgactacgactattatttcggggattacaggacttacaaggagcggtcgaaagtggtcgtgcagtccgacatcggcctcatctgcaagagcagcggcagcgaccagtacgtcgtctacacgaccgacctggtctccgcccgccccaaagggggctgcaaagtcagggcctacgaccggcagaaccagatgctggccgaagcgagcaccgattccgaagggcgggccgtgctgaagacgaaggacgagccttacatcgtcacggccgaagccggaggggatgtcaccttcgtaaaggtagaaccgggcacagccctgtcgctgagtaatttcgacgtgggcggcacggcaaatcccaaggggataaaaggctatatcttcggcgaacgcggcgtatggcgcccgggcgacgacatacacctcacgttcatcgtcacctcggacaatccgctgcccgaaagccacccggcatcgctggaattcttcaacccgaacgggcagttggtgcagtcgctcgtgaacaacagctcctcggacggcatctacacgttcagtctggggacgacgccggcgtcgccgacagggctatggcgggccaagatcaccttcggcggcgcacaattcgaaaaatccgtccgggtggacgcgatcaagcccaaccggatgaaaatcgagatgaagctcggggacggacaactggtcgacgccgcgcatttcacgggcagcctgaccgcccggtggctgcacggcgcccctgcggccgaagccaaggcggtgctccaggcacagttgtcgcaaatcgccacacgcttcaagggctacgagggctactcgttcgacgacgcctcgaaatactttggcaccgaagagcgggaaatcgtcaccggcaccaccgacgcccaggggtcactggcactttcgaccgacgagctctcctcgctggaggggttgagccccggtatgctgagcggcagattcacggtaaaggtcttcgaaaagagcggcgacttcagcgtcgaccagcaggttgcgaccatatcgccctatgacacctacttcgggatcggagtcgccacccagaaaagcgactggggcgacgaatacctcgacagcaggaaggagcatatcataaagatcgtgatgctcaacgcgaagggcaagcccgagaccggcagtgaaaacgtgctcgtatcggtctataaaatggattcctactggtggtgggacgcctcaacgcccaattcccaggcgcactacgccaaaaatgcgctcaactcgaattacaagaccctccaggcaaccctttcgaacggcacgggacaggccacgatgcgctggagcacgggcgattacggctattacatgatccgcgtcacgagcccgaaccgggcacactcggcgacccggatcgtatgtgtgtcctcatccgactggcggggcgacgtcacttcggtgacggatgccgccacgcgactcgccctcacccgcgacaaggccaaatacgtcccgggggacaaggccagggtcaccatcccctcgtcgccgggcgcacgggcgctggtcggcatcgaaagcggcagcgtcgtgcgggaaagcttctgggtggagtgcaccggcaagcaaaccgacatcgaaatccccgtcaaggaggggatggcccccaacatctatgtctcggtaacactcgtccagccccacaactcgacgctcaacgacgcaccgatccgcctgttcggcgtgacgcggctcgacgtcgaggatgccgcgcgaaggctcacccccgtggtcgagatgcccgaaacagtaaaacccgaatcggaggtgacgataaaagtccgggagaaaaacggccggaaaatgagctacgtgctggcgctcgtcgacgagggactgctggggctgacacgcttcaagacccccgatccctacggttatttcaacgcgaccgaggcactgggcgtccgcacgtgggacatgttcgactatgtcatcggcgcctatggcggcaggatcgaacagatgttcgccatcggcggcgacgccgagcagccgaacacgggggcgctcaaagcgcagcggttcaagcccgtcgtacggttcatcgacgcacagaaactgggcgccgggaagacgaacacgcataaaatcacgctcccgccctacttcggcgaggttcgggtgatggtcatcgcctcgaacggccgggcgttcggcgccgcggagaaggatgtcgcggtgaaaaaaccgctgctggtacaggctaccatgccccgcgtagtttccaccgacgaagaggtcgaggttccggtcacggtcttcgccctcgaagacggggtcgggaaagtcgacgtgaaaatcgccgcgaacgaatcgttctcgcccgtcgggccgtccagcaagagcatcacgctcggccggagcggcgaggaggtcgtatcgttccgcctgaaggtcaacaagcgaaccggcatcgggaaggtacgggtcacggctacgtcgtcgggcgacagctccgcgtcggaaatcgagctggacgtccgggaaccgaacccctatgtgaccctgtcgaaggactatgtcatcgacccgggcaagacaatggcgataaaaccgctcaaggagaacggcaaggcgaagctggaactttcgtcgatcccgcccatagacctttctcggcgcctcgaatacctggtgagatatccccacggctgcatcgagcagatcacctcgggcgccttcccgcaactctacctgccttcggtcgtggagtgcgacgcgaacatgttgcaggacatcgaccgcaacgtcaagagcgtgctttcgcgcctgggcagctaccagctctccgacggcgcattcgcctactggagcggcaatacgtcgaggtcggaatgggggacggtttacgcgacgcacttcctgatcgaggctgcgaaacacggctacggcgtggacagggcgatgctcgaccgggtgctcaaatacctgcgcggcaacccctcagactactacctgacccaggcctacacccagtatgtgctggcgctgaacgggactccgacccggggtgccatgaaccagctccgggaaaaggccgcctcgctgagcggcgacgccaagtggctgctggcggcagcatacgcactggacggcaaccggaaggtcgccgaggaactgatctcgctctgcgtggacaacgcggaaaaggccaacccctacgacggcacctacaacagcgacgaacgccggatgtcgatctcgctcatgacgctcacgatactcggacgccgcgaagaggctttccgcatggcgctgaagatgtcggacatcctcaagaaggacaggtggctcagcacccagtcgacggcatggatgctcagcaccctttccaatttcgccgtagcgggacagaacggcatcgacgccactgcgggcagggagctcgtcaagaccgacaaatccatcgcgagcatgcccctggccgcaccgaccgaggtgaggaacaatggttcgggcagcctctatgcggtcgtcagccagagttatacccccggcaagggcgaggaaaccgaagctgcgaacggcatccggatcgacgtgcgttacacgaatatggacggtgccgccatcgacccggcctcgatccgggtatcgaccgatttttacgccatcgtgaccgtctctaacaccagcggccacgaacggtacgccgaccttgcgctgacccacatcttcccggcaggatgggagatcacctccgaacgggacttgtcgtcgctcacctaccaggatatccgcgacgaccgggtgctgagctacttcgacctgagccggggcgaaagcaaggagatacccgtcaagctgacggcaacctacaaggggcgctactacctgccttcggtctactgcgaggcgatgtacgacaacgccgtccgcgccctgaaaaagggacagtgggtcgaggtggtcgattaatgccgccccggcagccgggaaaacgcagcgcaaccggcaaaaggttccggcgacacctgaaaatattatggcaaaacggcttcgggcatccggagccgtttttatttccggattcgtactcccggagggaaaacgccgctaaattcgggtaggagagacagtttcctccggtaaaataggaatttggaaaatatttttaatatatttgttgccaaggttagttagattagtcatattatgtgcgagaaactgtttattttcgacaccacgctccgtgatggcgagcaggtgccgggctgccaattgaacaccaccgagaagatcgaagtcgccaagttgctggaaagcctcggcgtggacgtcatcgaagcggggttcccgatttccagccccggagacttcaactccgtactcgagatttcgaaggccgtttcggccccgacgatttgtgcgctgacccgcgccgtgaaaaaagacatcgacgtcgccgccgatgccctgcgactggccaggcacaagcgcatccacacgggtataggcgtttcaccccagcacatttacgacaaactgcgctcgacgcccgagaaaatcctcgaacaggccgtcgaggcggtgaaatacgccaaaagctatgtcgaggacgtggagttctacgccgaagacgccggacgtgccgatccggcatacctcgcccgcgtggtcgaggccgccattgcggccggggctacggtggtcaacattcccgacaccacgggctactgcctgccccacgaatacggcgcgaagatcaaatacctggtcgaccacgtatccaacatcgacaaggcgatcatctcgacccactgccacaacgacctgggcatggctacggccaacaccctgagcggcatcctcaacggtgcgcggcaggccgaggtgacaatcaacggcatcggcgaacgcgcaggcaacacctcgctcgaagaggtggtgatgacgctgcgctgccacaaggagatcgccgtcgacaccggcattgacgcacgcctgatcaccaaagcatcgcacctagtgtcgagcctaatgaacatgcccgtgcagcccaacaaggcgatcgtcggccgcaacgccttcgcccactcgtcgggcatccaccaggacggcgtgctgaaagaccgccagacctacgagatcatcgacccgcaggacatcggcctcaacgagtcggtcatcgccctgacggcccgcagcggccgcgcggcgctcgtacacaggctcgaactgctcggctacgacctcacgcaggaagagctggacgcaacctacgccaagttcctcgagcttgccgacaagaaaaaggagatccacgactacgacctgctatacctggtgggcgacatcgaccgcatgaaacagcagtccgtatcgctcaaattcctgcaggtgaccaccggcacgctcgtcccgacggcgaccgtggtgctgaagttcggcgaccacgagcgcatggccatcgccacgggcaacggcccggtggatgccgccgtgtcggcgatcaagaccctgatcaacgagaaggtcgtgctcatggaattcctcatgcaggccatcacccgcggttcgaacgacgtggggcgcgtacacgtacaggtacagtgcggcagccgcaccgtccacggcttcgccgcgcacaccgacaccacacgggcgtcgatcgaggcgttcctcgacgcgctgcgcgtactgaacgtaaccgaacgcaaggaaaaggaggagtaagatgggcaggacacttctggacaagatatgggatgcgcacaccgtgcgcaccgaagacggcggacgctcggtgctctacatcgaccgccagtacatacacgaggtgacgtcgcccgtggctttcgcaggcctggaacggcgcggcatcggcgtggcacgcccggcacaaatcaccgccacggccgaccacaacatccctaccgtcgaccagcacttgccgatcgccgaggccgaatcgcggcgccaggtcgaggcgctggaggccaactgcgccaaattcggcatcgaacatttcggcgtgggcaacccgcgccagggcatcgtgcacatcatcggccccgaactgggattcacacagccgggcatgaccatcgtctgcggcgacagccacacctcgacgcacggggcgctgggcgccgtggcattcggcgtcggcacctcggaggtcgagatggtcttcgccagccagtgcatcatccagtccaagccgcggagcatgcgcatcacggtcgacgggacactgcgcccgggcgtcgaagccaaagatgtcgtgctctacatcatctcgcagctcaccgcttcgggcggcacgggctacttcatcgagttcgccggcgaagcgatccgttcgctctcgatggaggggcgcatgaccgtctgcaacatgagcatcgagtgcggtgcgcggggcggcatgatcgcccccgaccggacgacgttcgactacctgcgcgggcgcgaacgtgcgccgcagggagcggcgttcgaccaggccgtcgcccgctgggaagcgctttacagcgatgccgacgccgtattcgacaaggagtaccggttcgatgccgccgacatcgccccgatgattacctacggcaccaaccccggcatgggcatggccgtcgatgcgcagatcccggccgaggccgaccccaaagcattggagtacatgggattcaaagccggggaaaagctgctcggcaaacctgtcgactatgtcttcgtgggcagctgcaccaacggccgcatcgaagacctgcggcgcttcgccaagctggtcgaaggccggcgcaaggcccagggcgtaacggcatggatcgtccccggttcgaaaggcgtcgaagccgccgcacgggccgaagggctcgacaaagtgctcgccgccgccgggttcgagctccggcagccgggctgctcggcgtgtctggcgatgaacgccgacaagatcccggcaggcaaatacagcgtttcgacctcgaaccgcaacttcgaagggcgccaggggcccggtgcgcgcaccatgctcgcaggcattgcggtagccgccgcggccgcggtatgcggcaggatcgaggatccgcgcaaggtgtttgaaatgtaaaaatttttaacttcggtttggatcggccggtcgttgccgccgccttcggcgtcgtttataattccggcccacccccaaatccccgcctcaggcaggggcttacatgctgctttgcggcaaaatggccgctgccgaataccggaaaaaacaaaaccaatatgtccatacccaaattcgaaaccttcacctcgggggccgtgcccgtgagcacggagaacatagataccgaccagatcatcccggcacgtttcctgaaagccacccagcgcaaaggattcggcgacaacctcttccgtgactggcgctacgacgcccgggggcagcggatcgcctcgttcccgctcaacgacagccgttatgggggcaaaatcctcgtcgcaggccgcaacttcgggtgcggcagttcgcgcgagcacgccgcgtgggccatcgccgactacgggttccgcgtcgtggtgtcgagcttcttcgccgacatcttccgcaacaatgccctcaacaacgggctgctgccgatcacggtaagcggggagttcctcgcggcggtcttcgcggcgatcgacggcgaccctgcgacgcaattcaccgtagacctggacaaccagacgctgacgatctgcgccacgggccgcagcgagcacttcgagatcgacgcatacaagaagcggtgcctgctgaacggctacgacgacgtggactacctgcgcagcatcgcgccccagatcgaagcgttcgaacaggcgcataaatagccgcgcgatgtatccccgcgtagagataatggataccacgctgcgcgacggcgagcagacgtcgggggtttcgttcaacgcccgcgaaaaactctccatcgcccggctgttgctggaagaactgcgtgtgagccgcatcgagatagcctcggcgcgggtttcgcagggcgagcaggaggccgtgcgccgcatcgccgaatgggctgccgcgaagggttataccgaccgcatcgaggcgttgggattcatcgacggcggcgtgtcgctcgactggctcggccaggccgggtgtcgcgtggtgaacctgctggcaaaggggtcgctcaaacactgccgcgaacagttgcgccgcaccccgcaggagcacctctgcgacatccgcgccacgatcggcggggccatcgcgcggagcatgaaggtgaacgtctacctcgaagactggtcgaacggtatgctgcattcgcccgggtacgtctacacgatactcgacgggctggccgacgcccccgtgcagcgcttcatgtgccccgacacgctgggcatcctcgacccctataccaccgaacggttttgccgcgacatggtgacacgctatccgcagcttaggttcgacttccatgcccataacgattacgacctggccgtggccaacaccgcagctgcggtcaaagccgggttccacggggttcacgtaaccataaacgggctgggcgaacgcgcaggaaacgcacccctgtcgagcacggtggccgtgctgcacgaccggctgcactgcctcacgggcatcgacgaaacgaagatcaaccacgtcagccgcatggtcgagacctacacgggcatccggatcccgggcaaccgcccgatcgtcggcgagaacgtctttacgcagtgtgccggcatccatgccgacggcgacaacaagaacaacctctatttcaacgaactgcttcccgaacgcttcgggcgcgtacgcgaatacgccctgggcaagacctcgggcaaggccaacatcctgaagaacctcgaagcgctgggcatcgagctcgacgaagcctcgatgcgcaaggtaaccgaacgggtggtcgagctgagcgacaagaaggagctggtgacggccgaagacctgccctacatcatcgccgacgtactgcgctacgaccaagtcgaaaaccccgtgcggatactcaattacagcctgtcgctggcacaggggctgcacccggccgctacgctcaagatcgagatcaacggctgcgaatacgagcagacctcggtcggcgacggccagtacgacgccttcatgcgggcgctcaggcagatctacaagcaccagctcggccgcgagttcccgatgctgcgcaactacaccgtctcgatcccgcccggcggacgaaccgatgccttcgtgcagacgatcatcacgtgggagacggacggcaaggagttcaagacccgcgggctagatgccgaccagaccgaagccgccatcaaggcgacgatcaaaatgctgaacataatcgaaccaacatacaacgaccatggatgttaacatagctcttttagccggcgacggcatcggccccgaaatcattgccgaggccacgaaagtactcgaccgcgtggcggcgaaattcggacaccgattcgactaccgcgaggcgttagtgggcgcctgcgccatcgacgccacgggcgacccctatcccgaccagacgcacgccatctgccaggctgccgacgccgtattgttcggtgccatcggcgaccccaagtacgacaacgaccccaaggccccggtacgtcccgagcagggactgctgcgcatgcgcaaatcgctgggactgttcgccaacctgcgccccatcgcattgttcgacacgctggccggccgctcgccgctcaaggcagaggtggtgcgcggcaccgatttcatctgcgtgcgcgaactgacgagcggcatctatttcggccgaccgcaggggcgcaacgaagccgggacggaggctttcgacacctgcacctacacgcgcacggagatcgaacgtgtgctggacgtcgcattccggctcgccatgagccgccggcggcgcctgacggtcgtggacaaggccaacgtgctcgaaacctcgcgcctgtggcgggaagtcgcgcaggatatggcgccccggcaccccgaagtggagctggaattcatgttcgtggacaacgccgcgatgcagatcgtacgccagccgacccatttcgacgtgatcgtcaccgaaaacatgttcggcgacatcctcaccgacgaggccagcgtcatcagcggctcgctcggcatgctcccctcggcgagcgtcgggtcggaagtggcgctcttcgagccgatccacggctcctatccgcaggctgcggggaagaacatcgccaacccgatggccacgatcctctcggccgccatgctgctcgaacacctggggctcgacacggagggcagcgccgtgcgggccgccgtagaccgggcactcaccgaaggcgtcgtcaccgaagacctcgccgcacagggcgaacgccgctactcgacctccgaggtcggggacttcatcgccgcgcatatttaggcacgccccgctccgggggctcctatccgcaaaaaaggggttgcaaccgcaaaggttgcaacccctttttccgtgcaggccacgaggcgcaccccgcccggacagcaacgccacggcccggcagccggtttatatcccggccacgaattgctcgagtgcccccaggtcggccgccataggctccgaaacccggggcaggcaggcgagccgggccagccgcggaggcagcggaaccgcagcccccgtgacgggggagatgacctccccgaatttggcgggatgcgccgtagagaggtaaaaacccggtttcccgcacgctacggaagcggcatatccgatggcgctgtgcgggtcggaaaggtatccataattgcggtgcagcccgtcgatcgtacggcggatcatggcatcgtcgcagcggaatccctccagttcatcacgcagggcatccggctcaccgccgcagagccacagcatacgttcgaaattgctcggcgctccgacatccatcgcattggccggcgtccgcaccgacggcctcggacggtactcgccgctgcgcaggaactcgggcaccacgtcgttccggttcgaagccgcgacgaatccgccgagggggagccccatgcggcgggcgagcatcccggccgagaggtttccgtagttaccgctcggcaccacgaccacaggtcgcccgccgcccgtctgctgccgccacaggcaatagccgtagaaataatagaatgcctgcggtatccagcgcagcaggttgatcgaattggccgacgacacgcggtgccccgcacggaattttgcgtcggcaaacagccccttgaccagccgctggcagtcgtcgaacgtcccggccacacgcagcgggtggatattgccgccgagcgtggtcatctggcactcctgcagccggctgatcttcccttcgggatagagcagcaccacctcgacgcccggcacgccgtaaaacccgtgcgccacggcgctgcccgtgtcgcccgacgtagccgtcaggatcaccagtttttcgccggcaccgcccatcaggccgatcatccgccccatgaagcccgcaccgtaatccttgaatgcgaacgtcgggccgtggaagagctccagcgtatagcggctgccgacacggcgaagcggcagcggaaagtcgtagatccgctccatctcccgccgcaggagaccggggtcgatgtcgtcaccgaaaaaaagttccgccaggtatccggccagcgcggcataggactccccggccagccgctccgcgacggccatatcggcctgcgggatacgttccgggacgaacaacccgccgtcgggtgccagccccgcctgcacggcctcgcgaagcgaaaaggcgtgtgcgcatgctttgtctttcgtgctataatatttcatctgtttgtcgttttatactattccacaatccttgccccgcagttcgacacgcggcccgcatatatcttgcagccgataccggggcgggcgaaatgcgcccgcatccgctgcacgacccgctgcgagacggcctcatcggcggccagggcgaagatcgaaggccccgacccggcaatgttcatcgccagggcgccttcggcgagcaccccttctttcagcacatcgtaacccggaatgaaccccttgcggtaaggctccgccaccacgtcgtgcatcgaccggccgatcagcgccacgtcgcccagggcgaacccggccaccagcccgccgacattgccccactgcgtcacggcatcgtgcaggggtacctcgcggggaagcacttcgcgcgcctccttggtactgaccacgatgtcgggatgcaccacggcatagaaaaagccctcggggacaggcaggcgcacgatgtccagcggttcgtacccccggatcagcaccacgccgcccagcacggcagggcccacgttgtcggcatgggacgtaccgccgatgagcgcctcgcccatcatcgcgaactccacgagccgctcccctgaaaagggacgtcccaacagttcgttcacgccccagaccgctgcggccgacgaagccgcactcgacccgatgccgctgccgggagcgatcttttcgaggatcgtaacctcgacccgcacgggtttttcgtatgccccgagcagtgccatcaccgccggggtaatcacgttgtcctcgtttttggcaggaagttccttcccgctgcggttgcggataacgagccctccggcaccttcttcgatgccaacctccagcaggtcgcccacgccgtcgagcgtcagccccatcacatcgaagccgcaacccaggttcgccaccgttcccggggcgaaaactttgatatatcgcatgataaaaatctccttttgaatgaaaccacctttgatcgaaccgggctttccgttccggcagccttggccggaaaatgcataacgggtatgctcgtgacggaaaaataacaactacacccccacaggggttgtcgttgtcgtcgtcgttgtagtggcggtagcggagataaggacggtgaaagaaacggtgcacgccaccgggctgcaggctaccccgcatcccccggtcatcgtatggttccgtttcatatccatcggggacaaatataaaacaaaaaaatttaatatccaaattcgggtaacaaatcgtaagacgccctaaaaagcactggcagccgctttatatataataggagtagtccggaaaggctgaaaataccgaacttgacgacaaaccgtaatatattaggggttcccggaaggcctgctttcctccgaatcgggctaaaagcggttaaaaggcaaaaaaatacggtttcaaactgtaagataaaaagcctctatccgggtcgtcataaagctcaagaggggatataggttccggattatcacattattaaattttttgcaaaattattttgacgaaacgattttatatccctatctttgaaacggaacaaatacggaaattccggacatgaacgcccagaaccattcgaataataacgtcattaatctgctgctcgtcgtctttggcaagataacgggagaaaggtgatgtgtatatccgaaagatgataaaaaggcctttctcccgctggagaaaggttttttattatccgggcagatggcaaaggcgcaatacgcagaaaacaagaaaaagatgaaacacccactcagaagtgccgtcacgacgacgggccggcgtatggccggagccaggagcctgtggcgtgccaacggcatgcgcgaagagcagttcggccgcccggtcatcggcatcgccaactcgttcacccagctggttccgggacacgtgcacctgcacgagatcggacaatacgtcaagcagcggatcgaagcgctcggctgtttcgccgcggaattcaacaccatcgccatcgacgacggcatcgccatggggcacgacggcatgctttattcgctgccctcgcgcgagatcattgccgacagcgtcgaatatatggccaacgcccacaaggtcgacgcactggtctgcatctcgaactgcgacaagatcaccccgggcatgctgatggccgccatgcggctcgacatcccgaccgtcttcgtatcgggcgggccgatggaggcggggcatctcggcgagcgggcgctcgacctgatcgacgccatggtaatggctgccgacgaaaattgcagcgacgaacaggtggcgcgcgtcgaacgcgccgcatgccccggctgcggttcgtgctcggggatgttcaccgccaactcgatgaactgcctgaccgaagcgctcgggctctcgctcccgggcaacggcaccgtcgtggccacgcatgtcaaccgccgccgcctgttcgaagaagccgcagcgctgatcgtccgcaatgccgaacgctattacttcgagggcgacgactcggtgctcccgcgctcggtggccacgaaggcagccttcgagaatgccatgtcgctcgacatcgccatgggcggctcgaccaatacggtgctgcacctgctggccgtggcccacgaggccggggtggatttcacgatgcaggatatcgaccgcctttcgcgccgggtgcccgtactgtgcaaggtcgcccccaactcgcattaccatatccaggatgtcaaccgtgcgggcggcatcctctcgatcctgggcgaactcgcccgcggcggactgctcgacacctcggccgggagggtcgacgggcgcacgctcggccaggccatcgcggccttcgacctgcggagcgaaacagcgagcagcgaagccaaacagcgctacctgagcgccccggccggcctttacagccgggaactgggcacacaacggacttattacgacacaccggacaccgaccgcacggcaggctgcatccgcgatctggaacacgcctatttccgcgacggcgggctggccgtactgacgggcaacatcgcccgccggggctgcatcgtcaagacggccggcgtcgacgcgtcgctgtttgtcttccgcgggcgcgcccgcgtctacgaatcgcaggagcaggccatcggcggcatcctcggcggcgaggtgcaggccggcgacgttgttgtcatacgctatgaaggccccaagggcggccccgggatgcaggagatgctctaccccacgtcgtacctcaaatccagacacctcgacaaagcctgcgcgctgattaccgacggccgcttctcgggcggaacgtcggggttgtcgatcggtcacgtctcgcccgaagccgcttcgggcggggagatcgccgtcatccgcacgggcgacgagatcgagatcgacatcccgcggcgctcgatccgcctcatggccggcgacgacgaaatcgccgcgcgcatggctgcacagcagcatttccgccccgcggcacgcgaccgccgcatacccgcgtcgctaagggcctatgccaagctggtcagctcggccgacaaaggggccgtacgcatcgtcgaagaagaataaaaccggacaacaccatgaatacgaacacgacaaccagaaccgaaggacaacagcccggcccttgtatcacagggtcgcaggccctgctcgaatcgttcctgcgcgagggtgtggacacgcttttcgggtatcccggaggagccatcatccccgtttacgatgcgcttttcgactaccgcgaccggctgcgccacatccttgtccgccatgaacagggcgccgtacatgccgcgcagggctacgcccgcgtcagcggccgcgtaggggtttgcctggtcacctcgggcccgggggcgacgaacaccgtgaccggactggccgacgcgctgatggactccacgccgctggtactggtgaccggacaggtgggttcgtcgttgctgggcaccgacgccttccaggaaaccaacttcgtgggcatcacgcaggccgtaaccaaatggaactgccaggtcaagcgtaccgaagacattcccggggcgattgccaaggcgttctatatcgcccgttcggggcgtccgggccctgtggtggtggacatcaccaaggacgcccagtgcgggacggccccgttccgctacgagaggctgacgtccatccgcagctacgtccccgcacccgcgcccgccgaggagtgcatcgccgaggcggtacggctgatcgacgccgcacaacggccgctgctgatggcgggacagggcgtgatgctcggaaacgccgaagaagaattgcaggccttcctcgcaaagagcggcataccggtcgcctcgaccctgctggggctgtcggccgtgccgacctcctcgccgcagtatgtcggcatgctgggcatgcacggcaactacggccccaacatccgcaaccaggagtgcgacctgctcatcgccgtggggatgcgtttcgacgaccgcgtgacgggcaaccccaaatgtttcggggcgaatgccaaggtaatccacctggagatcgaccccgccgagatcgacaagatcgtacacgccgacgtggccgtcatcggcgacgtgaaacagacgctcccgctgctcacccaaaggatccgccccgccgcgcacaaggcctggatcgaagggttccgcgcctgcgacaaagtcgaatacgaggcggtcgtccgcaaggcgatccgcccggaaggcggccgcatccgcatgggcgaggtcgtagataccgtagcgcatgcctacgacaacgacgcggtgctggtgacagacgtcgggcagcagcagatgttcgcggcgcgctatttcgggttccgccgcagccgcagcctggtaacttcgggcggtctaggcacgatgggcttcgggcttccggccgccatcggcgccaaactgggcgcccccgaccgcgaggtatgcctcttcgcgggcgacggcgggctgcagatgaccatccaggagctggggacgatcttccagtcgcaggtcgccgtaaagatcgtattgctcaacaactcctatctgggcatggtacggcagtggcaggaactcttctacgaccgccgctactcgttcaccgaactggcgaaccccgacttcgggctgatcgcccgcggcaacggcatcgcctaccgctgcgtggagcggcgcgaggagctggccggggcggtggccgagatgaaagcctgcaaaggcacctacctgttggaggtgcgcgtcgaaagcgaagaaaacgtattcccgatggtgccggccggcgcccccgtgtcggcgatccggctcgaataaaccgaacgaggtatggaacaagagtatatcatcaccgtattttcggagaacaaggtcgggctgctgagccagatcacgacggtcttcacgtgccgcaatgtcaacatcgaaagcctgacgacttccgagtcggcgctcgcgggcatccataaattcacgatcgtcgtccgcaccggccccgaccgggtcgagaagctcgcgcggcaggtcgagaagaagatcgacgtgctcaaggtcttcgtctacacctcggacgaagtcgtgcagcaggagatcgccctttataaagtcacgcgcagccgcaacgtcgagaaactcgtacgcgagcacaatgtccgcatcctggagatcgacgacgactacatcgtcgtcgaaaaaaccggccataaggccgagacgcaggcactgttccgcctgctgcaacccttcggcgtgcagcagttcgtgcgcagcggcacggtggccatcatcaaatcgcggcgcgagctgctcaacgaatacctcgaagaactcgagaggaacagacaaagaacggattcattttaacttttaaaactcatacaactatggcacagatcaatttcggcggagtagaagaaaaggtcgttacccgcgaagagtttcccctggaaaaagcacgcgaagtcctcagggacgaaaccatcgccgtaatcggctacggcgtacaggggccggggcagtcgctcaacctcaaggacaacgggttcaacgtaatcgtcggacagcgcgaaggctcgaaaagctgggacaaggccgtcgccgacggctgggtaccgggcaagacgctcttcgggatcgaagaggccgcccggcgcgcaacgatcatccagtacctgctctccgacgccgggcagatcgccgtatggccgacgatcgagaaacacctcgcgccgggcaaggcgctctacttctcgcacggcttcggcatcacctacaaggagcgcacgggcatcgtgccgccggccgatgtagacgtgatcctggtcgccccgaaaggctcggggacttcgctgcgccgcatgttcatcgagggccgcggcctgaattcgagctacgccgtattccaggacgccacggggcgcgcattcgaacgcgtggtggcgctgggcatcggcgtaggttcgggctacctgttcgaaaccgacttcaagcgggaggtttactccgacctgacgggcgagcgcggcacactgatgggtgccatccagggtattttcgcggcccagtacgacacgctgcgcgcccacgggcacaccccttcggaggctttcaacgaaacggtcgaggagctgacccagtcgctcatgccgttggtggccgagaacggcatggactggatgtacgccaactgctcgaccacggcacaacgcggtgcgttggactggtggaaacgtttccgcgatgccaccaaacccgtcttcgaagagctttacggcgaagtggccgccggcaacgaggcgcagcgctcgatcgacctgaacagcaaacccgactaccgcgagaaactcaacgaggagctgcgcgagatgcgtgaaagcgagatgtggcagacaggcgccgtggtgcgcaagctccgcccggagaacaactgatcccccgggaggccttgcaatttttcagattgtttcgcgctccggcgggtcgtgtccgccgcctccggcaccgcttgtaaatccggccttccccgagcccccgccccggcggggacttgagaggcggcgacgcggcgggattcccgcagcgggacacaggcggccggcaattaacagttttgtaacgtaatatacaacatcaataaatctatgtgtggtttcgtaggactatttgacatccgccggaaatcggatgcgctgcgtgggcaggtactgaaaatgtcgaagcagatacggcaccggggccccgactggtcgggtgtctactgcggcgagcgggcgatcctttcgcacgagcggctttcgatcgtcgaccctcagtcgggcggtcaacccctgttcagctgcgacgggaaacaggtgctggccgtgaacggcgagatatacaaccatcaggagatccgcgccgagctggccggagaatacgattttcggacaggctcggactgcgaggtgatcctgccgctctaccgcaagctgggcgtcgggctgctggaaaagatcagcggcatcttcgccttcgcgctgtacgacatcgaaaaggacgaatacctgatcgcccgcgacccggtcggcgtcatcccgctctacatcggctgggacagcgacgagcaattttacgtcgcatcggaacagaaagccctcgaaggggtgtgcagcaccatccggccgttcctgcccgggcactactggtcgagccgcgaggggaaaatggtgcgctggtacaagcgcgactggttcgagtacgacgccgtgaaggacaacggtgccgacatacaggcgctgcgtgaggcgctggaatcggccgtcaagcggcagctcatgtcagacgtaccctacggcgtactgctgtcgggcggcctcgactcgtcgatcatctcggccgtcgccaagaaatacgccgaccggcgcgtcgaatcgaacgaccgcgaccgggcctggtggccgcagctccactcgttcgccatcgggctgaaaggagcgcccgacctggcggcggcacgcatggtcgccgaccatatcggcaccgtacaccacgaaatcaactacaccgtccaggaggggctggatgccgtgcgcgacgtgatctactatatcgagacctacgacgtgacgaccgtacgcgcctcgacgccgatgtacctgctggcgcgcgtcatcaagtcgatgggcatcaagatggtgctctcgggcgagggtgccgacgaggttttcggcggctacctctatttccacaaggcgcccgacgcccgtgccttccacgaggagaccgtgcgcaagatcagtaagctgcacctctacgactgcctgcgcgccaacaagtcgctctcggcatggggtgtcgaggggcgcgtgccgttcctcgacaaggagttcctcgacgtggcgatgcgcatcaacccggcggcgaaaatggccaaggacgggcatatcgaaaaatggctcctgcgcaaagcgttcgaggacatgctcccctccgagatcgtatggcgtcagaaagaacagttctccgacggcgtaggctacaactggatcgacacgctcaagcagctgaccgtagaggcggtctccgaccgcgagatggaacacgctgcggagcgtttcccgatcaacccgccccgcaacaaggaggagtactattaccgtacgatcttcgaggaacacttcccgtcgcatacggcagcacagtgcgtaccgtcggtaccgtcggtagcgtgcagcaccgccgaagcgctggcctgggacaaggcgttccgcgacatgaacgaaccgtcggggcgcgccgtgctgggcgtacacaacaccgacctaacacacaacacccaccgccccgaaaccgactgaacccggtaaggcccctgccgaagcaggggccttcctttatcggatcggaattcataaacggcatcgccccggccacagacacctgtgaccggagcgatttcttgtgccctgagtcgccggacagccccgcgcccggcatcagcgccgcggcttcttcgcgtcgggttggcggcgagagcggcggacggcaggagctacgggttttcgcgcagggacacgttttgcggcgggcttcccgtccccggggtctgccccgggtgcttcggaaacttccgcagccgggatattccccgcagcagatgcggggactgcggggacagcgcccgccgtccggcgcggcttcttgcgcaccgaccagccgaagtggccgatggcctcgcccaaggcgaaatattcgccgtgggagtaaacgatcgggcaggcgcgttcgaggcagaaacgccccgtagcagggtcgatataggcggcatcgacctgcacggcgaccacctcggccagaaacatatcgtgcgaaccgaggggcatcacctgccgcacgcggcactcgatgctcacgggcgcctcttcgacgatcggcgccgtgacctgcaaggccttcccgggcgtgagccccatttcgcggaatttgtcgtagtcgcgccccgaccgcaccccgcaccagtcggcggcgcgggccaggtcgcgggtcgtgaggttgatgacgaactcccccgtgcggcggattatttcgtaggagtggcgttcggggcgtaccgaaatgtagcacatcggcgggttggtgcataccgtgcccgtccacgccacggtcagcaggttatactcttcgggcgtagcgccacagctcaccagcacggccggcagcggatagatcagcgtcccgggtttccagctctccttcatcggcggcgtcagttagccttcgcaaagaaattgcggaagaatacgatctgaaagtcgatggcattgccccaataggcaccggtatgcccgccggggcggacatagaaatcgtgcatgatgccccggcgcagcaactcgtcgtggaaatcgttgtttacctcgaagaagaaatcgtcgtagccgcagtcgaagacgatcgccaggtcgccattcccgagctgcgggacgaggttgatgggcgtagcctcttcccaggcttcgggatgctccgtgatctcgcccagcaactgcgggatctcccagttctgcgggaaaggacgtatgtcgagcccgccgctcgtgctgcctgcggcaccgaacagccccttgtgctttatggcgagcgacatggccccgaaaccgcccatgctcaggcccgtgatcgcgcgtcccgagcggtcgcgggctacgggataacgcgcttcgacggcgggcagcaactcgcgtgtcatgaaggtttcgtagaggctcttctcgcgcaccttgctgtcgaggtaccaactgttccccacgccgggacagatgaaggcgatcctctctcggtcggcgattgcgggcagcgaaggcttgatcttcagccatgccgtctcatcgcccgagtagccgtgcagcaggtagaccaccgggcagggctcagcggcggatacgccctcgggcacgatcgccacgacgggtatgtcacgatccatcgagggactgtgcacggcaagcgtgtcaaccgtagccgcagaaacgacccgcaccgccagcaacagcaaaaaagtaaaaataaaaatccgtttcatggtatatgggtttagtgaaggcaaaaatacgaaaaaaacgtatctttgtcatatgctaacggaattcatccgatacctcagcgccgaacggcgttactccccgctcaccgtccgcaattacaaacacgacgtcgggcagttcctggcatggctggatttcgacgaggcgcgctccgacccgcgcagcatcaccgcagaccaggtgcgcgaatggatcatccaccgcacggaggaaggcaagatcggcgcggcgtcgatgaaccgcgaaatcgcctcgatccgcaccctcttccggtggctgctccgcacgggggccatcgaaaaagacatctgccggacgatcccctcgctcaagacctcgcgccgcctgccggctttcatccccgagagccgcatgacggacatcgtcagcaaatgcgaagaggcggacgggaatttcgaaacggcacgcaattcgctcgtcatcctgatgttctacgcctgcggcctgcgccttgccgagctggtcggcatcgaccgcgacgacttctcggccgactacgcctcgctgcgggtacggggcaagggagacaagcagcggatggtaccgatcctcgaattcgtacgcgaaaagattttaagttacctcgacctaattgcgaggcaaaatatttgcaattctgcggaaaaagcactatttttaacacacaaaggaaagcgcatatcgcggagcgtcgtttaccgcatggtacgggcggaactgacccgggcaggcgtacagggcaagaaaagcccccatgtgctccgccatacgtttgcgacgcacctgctgaacggcggagccgatatgcgcgagatccaggagcttctgggacacgcttcgttacaggccacgcaggtctatacgcacaacagcatcgccaggctccgggagatatacgcaaaggcccatccccgggaaaagggagggaagtgattaacttttataaactgtaaggctatgaacgtacagattcaatccgtgaaattcgacgccgacaaacggctggtcgaattcgtcgagaacaagatggacaaactcgaccgcttcgcagagcgttcgacgggtgccgaggtcattctcagactcgataaagactttgaaaagggaaacaagatagcaacggtcacactccacatgccgggcgaagacctggtggcatgccaccagtccagatcgttcgaggaatcggtggacgaggcgatcgacgccatcaagcgccagctggacaaattcaaaggcaaactggaaaagtaacccaccaaccaaccgataacctaaaacgaagccgcagccgcccctcatgaggcggctgcggtaattttccacccggcggtttgcggcgggcgcactccggctgacgggttcctgctgacgattcccgcccggcaacatcctgccggcaatttccgccccggctccttacccatcgctcggcgggcggttctgcaacgcaattccgttacgcccccccaaagactgcagacggacggcaccggcagctggaaacggaaaacggccgcacctgcgtgcggccgttcggaagccttgtagtggataggggattcgaacccctatgtcgtgcgtgagaggcacgtatcctaacccttagatgaatccaccgtgtcggttttgtggtgcaaagataacgccttctttgaaaactgcaaaattttcctgcaaaaactatgattttttttcataatgcacacagctacacgcattttagctatctttacacgaaatacaacacgtcccgacaaatgaaacgcatcaaaacagcaatcctgctcgcggcagcggccgtggcgattacggcctgcaacaggaagcccgtcgttccggaattcggcatgttgccgatcgacacgctgctcggcacacaagacaatggctgcaacatagaataccgctttgccacgatcggcaatgccggaaaatcggcagcgctggaggccatcgaaaaggcgaatatcgaatatttcttcgagttggaggagttcgccggtacggcacgcgaggccgcggactcggccatcctgcaggtcgctgcggagatcgtactgcccgaaggaatgtcgcagggcatgggcgcctacgaaatctccgtcgaaagcgaaggctccgtgcaggacacgctcgttacctactcgatctcccggtggagtttcacgggcggggcgcacggcatgtacggtgtcgaataccatacctactcgatcaccgacgggtacgaactttcgctgcccgacctgttcactgccccgcaattgctcggcatggagaaactgctccgcgagaaactctacacccaatacgggacggacaacgacgaagggctggccgaacagggcttcttcccggaatacatcgccctgacggaaaatttccagatcactcccgaaggcatcaccttctattacaacccctacgcaatcggatgctatgcactcggagccgtcgaagtggcgataggccgcgaggaactggagcagttctgacatccgggcggaacgccgtcccggcacaaccgggctcacgcccctacattcccggaaccgcaccccgggacaataaaaaaaggccggagtctcacgactcagacctttttcttttgtcggggaaccacccccttcaaaaatgaggtacaatcggaggtattcgactttcggacgagcaccgcccttcgagtcttagtaacggattgccgctacaacctgccgatttcctcaaccaacctaaaactactaacctaaatgaaccttaaaacttcactgcaaagatacgtgtcatttttgaattatgcaaatattttacgaatatattaaatatatttaacaatttcgtaacattaggccgtcaaaaaggcttcaagatgcctttgaagaacattcgggctaaatgtcaaaagagacagcatatcttcggagactaaaaaaacaggggataaaaagcatattcaggcagaaaaatacgccgggcacacatgacaaaattctaaagtccgtaccaaccatccgtgacaaaaattccggaaaggcacaaaaaaaggaaacccggtattccgatggaataccacagtttcctcaccaacctaaaactactaacctaaatgaaccttaaaacttcgctgcaaagataaggtgaaaaaacatgccgcgcaagtttttattaaaaaaattttcgaattttttgatattttttaataagtcgcatacattcagttatctaataacatgtaaacctgcaagatagccgggtaccgccgatcccgggtgatcgaaaatattttttcatattctgcgcagtattcccctccggcgcacatttatataaaacggaacacgataaaaatggagtgcacataccctgagcggggataaatcactacctttgtacgatggacaagaagctacgcgttaccctgaacgtgagaatacagcatcccggcagcgggatgccgcggcaggaattttgcggccggttgcgtacggccgcagcgacaacgacgtctaaaaccctaatttaccaatgacggtatcactgatcatctccacctacaactggccgcgggccctctacctgtgcctggacagcgtaatgcaacaaacggccatgcccacggaaatcctgatcgccgacgacggctcgggtatcagcacccgcgatgtcgtccgccatttcgaggcggtgtcgcccgtccccatccggcacatctggcacgaggacaaggggttccgccttgccatgatccgcaacaaagccatcgcggcgagccgttgcgaatacatcatacagatcgacggcgacctgatcctccaacgtaacttcatccaggatcacatgatcttcgcacaacggggctgctacgtcaccgggtcgcgcggcatcatcaccgaaatgctcacccgcaaggtactcagcggggagatcacctcgctcacaccactgatgcggggcgtgcgcaacagcaacaacgccatccgcatcccgctcatggcattcctctaccggacgctgggtcccacccgcttcgtcaaaggctgcaacatggccttctggcgcaacgacctgatccgcgtcaacggttacgacgaatcgttctgcggctggggccgcgaagattccgaactggcgatccgcctcgacaacagcggcgtgcgccagcggtgcatgaagttccgcggcgtggtcttccacctccaccacggcaaatgcgagcgcaacagcctttcggccaacgaggaacgttaccagcaaaccatccgagaacaccgcacccgctgcgaaatcgggcttactcgccacttgggagaaacggatcagacccgcacccccaaacccgaggtgaaaaaccccgttcccgccagcgcaggccattgagccccggccggaaacatccggcccaggaaacggcatccataaacgtgagtgccgccccggtcggggcggcactcacgttttctatcggcggcggaatttttccagcaggggataataatgtaactgccggcgcagtttccatttgcgcaccaggttcaggggcttgcgtttcagccccgcatgcccccgcacgatataatcgtccacggcatcgagcacccgcgccgaacagcggcagtcgcggtgcggttcatggtgcatggtgtagctgcggatctcctccattaacccctcaggccgcgccagcgcacgctcgatggccgggccgacggcctccggcgtatcgacgtcgatcagatggggccccggatgcgaattgcggaacgtcacgaccggtttgtcgaggaacatgaattcgaggatgatcgacgagctgtcgcacaacatcacgtcggcctgctgcagaagcggcatcttgtcggaaccctcatagaatatgacgttctcgttctcctccgcaatacgtttatagccggctatgatcccggggtcagtcagcttgggatggaacgtgatgacccagtcccacggatgggttttggccagacggtcgatctccgccatcagatggggcgccgaacagacattgcgcgtgaaggtcggggggtaaagaatcaccggatggtcattctgcggtttacgctgcacttcgggcgagaaataggtgtcggctttgggccagccggtctcgtagacccggaagaagccgtatttcttttccagttccttgaaataaggcgtactgctcggcccctgcgtacaataaatgtcgaaccatccgcgcaccgtgaagtggtcgtcgacggcctcgatccgcttttggatcgcatagccgtggaaaagcgccaccttcacacccgggataaaatcggggatgtagttgcccggtgcaaaaaccgcgaccgggttataagcgaccgcctcccggattgtccccaaccgcacctcgccctcttcgagcacgacgggacacccctcttcgacaaaccaggccgcctcgcctccgcggcggcggatttcatgttccaaaggcctcaggattgaataggcataaggcaaagtaacgtacaacaggtatcttttcatcgttccaggtttaggttacaacactcagattcagcgtgtcagccgccgcttcaggctcttgccccagcgcatcagggtcgagacggcgagcaccccggggcgcatccaccgccgcctgtccatccgcagcagcaaccagtcgcaacggctgaaaaacccttccagctcggcgcggtagcgttccgcctccgcattgatcccgcgggcaaactccgtgtcgccggcccatgggttatggcttttgcgcaggtaaaccaggtaccagcgcattttattgagcagcaggtagaactccagccggtcgccaacaacatccctgtgcctcaccagctcggcatgcaccgcctcgctgaatttaacgcagtagccgatatcgagcggcgaacggttggccgacccgccgcgctgcacatatccgtaacccacataatcgacgaaccggacacgcggctgctgacagccgatctggatattgagcaggctgtcttcccccagccgcagcggataatgacgcagttccttttcgaacaacgcccggcgatagagccgtccccacacggtcacggaaatagcgtggtagagcgatgcaacaaggaaatccagcccctgcatgtccgacgtgcgcatttcgcgcttgggcgcttcgtaggtcttgcaaatacgtttgtaatcgcagcatacgatatcgtacccgccgttttccccgatggccgccaccagtttctccagcatgcgggaatcccagacgtcgtcgccgtcgagaaaacagatgtagtcgccctgcgcatgcctgatacccgtctcacgggccctggcagccccctggtttacagtacttatgacgacgatgcgcgcatcgcgctccgcgtggctgagcgccacggcctgcgaaccatccgtcgaaccgtcatcgacgacaatagcctcgaaatccccgtacgtttgccgtccgaccgaatcgaggcaggtatcgagatagttttccagattgtaaaccggaataatgaccgataccacgggctttgatttttccctttcctccatctatgcaatccaatttaccgctttcacgatccggctgccggctccgtcgtaaaaatccatgtttcagtataattttcctttatcgtgccagacgccgccgcaaactggtacgccagcgcaatcctgtcgtcagcatgacgacgaccgggcgcatggcccggtaacggtcgagctccagcaacagcatccgcgcccgcgaatagtacgccctcagctcgtcccggtaccggccggccgattcgcgcaggtcgtagacaaacgcctggttcccgacccacggactgcggcttttgcagacatagaccgaataccagcgtaccttattcagcaatgcatagaattcggcatgtccccgaagcgattcgccgtgccgttgtaactcccgttccacaatactacaaaataagcagcagtattcaaaatcgaagtttcggtgattggacgacgacggccgctgcacgtaatcatatcccacgtagtcgatgaaatggacgcggggaaggcggcaggcgatctggatgttgatcatcgtatcctgacccagtcgtaacggatagtggttgagcccgttatcgaaaagttcccgccgatagagtttgccccagagtgtcacccagatcgaatggcgaagcgtcgcctcgaggaactcgagcccttccatatcctccgtccgggattcacggtagatcgcctgataggtcttgcagacccgtttgaaattacagcatacgatatcgtacccgccattctgcccgatcgaggcggtcatctcctccaacatgcgcggttcccagaaatcgtcgccgtcgaggaaagcgatgtattttccccgggcccgggcaatacccgtttcgcgtgcccgcgcaacgccccggttcggggtgctcaccacgatgatccgcggatcgcgctccgcatagcgacgcagaagcccgggcgtaccatccgtggaaccgtcgtccacgacgatggcctcgaaattcccgagcgtctgcgtcaaaaccgattgcaggcacgtatcgagatacccttccagattgtaagcggggatgattacagaaacctcgggagagggtaacttgctttgagattcgttcatttattttatgtagtttgttactgcttctgcgatacgttcgccgtccagggcggcagagatgatgcccccggcataaccggcgccttcacccgcggggaagagccccgcggtttggggatgcatgagcgtcacggggtcgcgcggaacccggacgggcgacgaggtgcgcgactcgacgcccaccacgatggcttcgttcgtcacaaatccccgcatccgccgcccgaaggtggcgatcccccggcgcagcccctcgccgataaacgagggcatccactcgtcgagccgcgaagggataataccggggatataggaggtcttgggcaaggccgcgctggggcgtccggctacgaaatcggcgatgcgctgcgccggagcgacctgatgctcgccgccgtgctgccgggccagctcttcgaactgctgctggaacttcaacccggccagctcgccccattccgcacgcaggtgctcgaaatccgcgggccgcacttcggtcaccatgcccgaattggcatagggtgacgtgcggccgctgggcgacatgccgttgaccaccgactgcgcggcatcggtcatggccggaacgatgaacccgccggggcacatgcaaaacgagtagaccccgcggccggcctcctggctcaccagcgaataagccgccgccggaaggtattcgccccgcgtcgggcagtggtattggatcgagtcgatcaacgcctgcggatgctcgatacgcacgcccatggcaaaggccttcgcctcgacgcgcacgcccctgcggtaaagcagctcgtaaatatcgcgtgccgaatgtcccgtggccaaaaccacggccgccccttcgacaaacgtgtcgccgcaccgcacgccccggatacggccgttgcggatttcaagatccgtaacgcggctaccgaacacgaactggccgcccgagccaaggatcgtctgccggatattctgcatgatgcgcggcaacttgtcggttccgatatgcggatgggcttcatagaggatttcgggcgtggcgccatggaacaccagcgtctgcaacgccttgttataatcaccgcgcttcttgctgcgtgtgaagagtttgccgtccgaaaaagtccccgcaccgccctcgccgaaagcgtagttcgaatcgggatcgaccgccccgttgcggttgatccgcgcaatgtcgaccttgcgcgccgaaacgtcacggccccgctccaggataacaggcttcagccccagctcgatcagccgcagcgccgcgaaaagcccagccgggcccgatcccacgactacgacctcggtatgtcccgagacatcgggataatcgaaatgcacgggtgcgggctgcggctcccggtcgacatagacctccagcatcaggttgaccttcggttgccgctgccgggcatcgatcgagcgtttgacgaccctcaccaaggcaatatcgtgctccggcacacccagacgccgcgcggcaagcgaagtgtaatacttcgcgtcggcagcctgacggggcgttaaaacgagtgcgacattctgcggcataagcggataaattgcctacaaaagtaaataaaaaaggcttataatcacccgctccggattgtgaattgtgaatttttatatacctttgcatatagcaagcggatatggtgtaattggtagccacgtcagacttaggatctgatgccttaccggcgtgggggttcgagtccctttatccgcacaaaggagccttttttcgaggctccttttttgttgcctgtccggcgcaaaaagaggaaaaccaactgtatatcatcattttgcaaaggcttcgaccgattccccgaaccggaagcggaaagcagttcgcggcaaactcgcgggagcacgaaagggaacggagccgaaaaacgggccgttcagcgaaatttgctcccgaacacagatgcaatgcgttgtttttctgcgttttacaccgtaataattctctcttgcaggcgttttgttaaccccaaaatttcaacgtcatgagacaagagacatttgccattcttttcctgatgcggaaagggcggcagaaaaagaacgggctcgcgcccatcttcgcacgcattacgaccggagggctccggcagaaggtctacacccagtgcgacagcaatcccgaaacgtggaaccagcacaaagaacgcgcgatgggaacgaacaagctggccattcaggtcaacgaacgactgaacgatttccgcgtaaaaatcatcgacatccgctccaaactgctggccgagggctatgcggccaatgccgcgcagatcaaacagcgctacctgaacccgacatgcaacacgatgatgctcattgcgggccttaccgactatgtgaagcggcggcaggccgaagtgggcgtgcgcatcacgcagcacacggcagacaaatacgagcggctgctgcgctacctcaaacagtatctcgcccaacgcggcaaagccgaggacattcccgtcgaacggatgaactacaagtttctggacggcttcaacctcttcctgcaaaccgcccaccgctgccgccacaacggggcggtcgccgtgatggacagcctgcgcaactttgtcctctactgcctgcgcaacgagtggattacgaaaaatccgttccgctactacaaactcaaagaggacgaggtgcaggccaaagagcaccttacggcgcatgaactggaactgctgacccgcaaggagctcgaccgccggttggcccgcatccgcgacgttttcgtcttctgctgcctgacggggctggcattcgccgacgccgaccacctgcggcgcgagcatctctcgcaggacgacgaggggcgctggtggattcacaagccccgcgagaagacctccgtgatgagccgcatcccgctgctcccgggcacgctcgaaatcctgtgccgctacgagcacgacgaagtatgcgtcgcacgctcacgggtgctccccacgccgagcaaccagaagatgaacgcctacatgaaggagatcgcggccgtgtgcggcatcgacaaggtgctgaccacccactgcgcacgccacaccttcgcctgcatggccgtcgagtacggcatgccgatcgacgtgctggccaagattctcggccactcgaacaccaacatgacgcgccattacgccaaattctccgagacagtcatcggccgtgagatggaggcgttcggcgagcggctggcatcggctacttgatacctgaaaggattcggccaaaagcgcccctcggatgaggggcgccgacgcctatcgctggctctcttcaatcagagagttgcgcagcagatccagaaaccgtgtcagccgcaacttgcggttgatgactccacggcggcattggatgggattgttgatgcggacgttgaacatccacgagaacagctcgaccaactgttccacattggcacgggtaccatcgatacgccgccccacgccggcagcatgcaacgccgcaatcagctccatgagatccgtcggcgtgaacggctcggccagatagagcgccgagcggggtttttcgggttcccgcaaccggttcatgaccgcagaatgctcgatacgcagatgaaccatccgcatctcaaattccagatgtgagacggctccttcccaaagcgcgacaagcgccgccggacgcggatcgtgcattattacgggattacatgacaggaattgcgttcagggacaacagacaaatgtccacgggggcaaatatgccagtcggcagaaaacgtaaatcatcactcaaatatcaaagatttttatttcagattgatacatttaaaacattaaatttcaataaatcttgctaaaacatgcaattgtctgaatgcttatattgcagttctcgtagaaatattctaaaaaaagataggatggttttagccatcctatcccagtgagcaatctcgtaattttgaactttttattttaatgttttaacacattatagataagagattttcactcgaaattatttgtcggttgacaaatgccttccacactttgaagcgttactggtctgaccgttattagcgtttcaaccacatcttcttgtccttaccttacacttaatgccgaagcggcacgaatattacagattatagcattcgcctcatttccaaagaaaactcggcacgggatgttcgggcattgcgcacgtcatccggaatgatcgtccgggaatatacgctggtttcggccggctcggttcgggtggtcatcgtcagggtgttcccgccattcgtcaactcgaaatcgtagccgttgccccagctctcgccgtcgtcgtacactccggtcagccgggatccgtcgatcgaataacgcccggtgtatttggtgtagttcgatgtttcgaccttctgataaagtccgaatgtcgctgccgaagtgaattctacgtatacctcaaatccttcgggagcattctctgaccaagaagtaaggcgccattcgcctacgatttccgactgaatgttgggggcatcgtcgtcatccgaacagcttgcggcgaaaatgccgagcagggagaaaacgagcagatgataaagatgttttttcattgcaagcactgtttttataaccaacctccgtttgctgcgccggccgaacgggcgatgacggcgaattccttggtgatgaccatgccgcccatcacgacgcccgttccaggtttcgtaccgccggctatcgccgaaaccttgattttggccgatccgggtttcgtgcatttgatcatcagttttccattatacattttgggagccgccttgatgccaagcttttccatgtccttggccgacatctggatatcagtataggtaaggtcttcggcaccctgtccgaaatgctgcgtcagcggaatgagctgcacctcgcccaatgcgacctgcagacaaggcgttccttcaatctgcatgagcagctgataggcatcggtaatgccggtgcccattttgccgcggtaaatcgacacgtcggcgatcgtagctttcgagccttcgcccagccgggagtcgatttcattgaccgaggtgagcagcatggtcttgaattcgtcgagcgagtatctcttccctttctccagggcataggagaggccgagtgcggctacgcccgagacgtgcgggcaggccatcgaggttccctgcatgtagccgtaatccgctccgttgctcgtttcggagcagagcgtcgaaaggacgccggctttctccccaccgctcaaaccgcttgtttcgccgccgggagccgcgatattacagccggaaccgtagttggtataattggctggcaggtagtcgggcgagaacgaggtgacggagatataatcacgatagcctgccggatagccggacatggctgtcgattcgttgccggcggaaaaaatgatcagtccgccgtcgagggcctcgcagttcttctgggcggcgaagtactgaagcgcctcgtaatccatcggcgattgtttgatgaacatgttgtccgacgtgtatattccagccttaatgccccacgagcactggaggatggaggcaccgtgatccgcggcgtattttacggcacggctcgacacgagggcgtcacccgtcaggtctcccgagaagatctggcacgacatgagacgcacaccgtctcccttgcccgtacctccggccacgccgcagacgccgatgccgttgttattgacggcggctaccgtgcccgcaacgtgcgttccgtgtcccgaatcgcccttctgaccccatgaaatgggaccgtcggcagcgaagttccatccgtgaatgtcctggttcttgtattcgggcgaagggttcggattgatccacatgttggccgccagatccggatgagtgtatttcaccccttcgtccacgatggcgacgatgacttcgggattacctgccgtgagcttccatgcgtcggccacattgatgtcggctccggccaccgatgtagtggcaacggcctggtcagcattgttgatgtaatgccactgccagaaaagattcgggtcgttgaaatccgctgtaaccaaagcgcgggtctggccgttcgccgttgcttggaacggataggttttgcagtcggaagcccggtagagacgggtgcggaactgtactttcgagatttcggcgacacccgcgagtctctccgccgccttgtcgagatcctcctctgatgcgaaccggagcacataccatctgtgaagccctgccgcacgggtgcgggcctcgtgttcgccggcttcggggaagacgcgctccagcgaggtgacatgcaggtcgttcaggatgtcatcgacggattcgatgcccgaacgggtcagcgccgaacgggtcttggccgcattcaacgcattctgttcgagactgggaatggcttcttcgccgaattttacgatgagcgaaccggccacggcgtcgtccgacgtattgcagattttgcccgaagtctcgatttcgggagcggaatccccgcggttcggtatctcctgcatgggatccgtcgagcaggcggccagcagcagggaggcgaaaatcaggagtttcgttttgttatgcatatatcatgctgatttttgagtccggcaggttgtttttggcttgaaaaaaagggagaggccggcacttgccggacgaccggcctctcccgatccgatattacttgagcgtgatttcggcagcggccgttttccggaagcggagttccgatcccgaaccgttcgcacgctgcacagcgtcgctgaatccgaccgtagcccttacaactttcgcttcaggagccgatgcgggcaggaatcctttcgcatagtcggtcggtacggttttgacggaaccgcgttctgtagaaacggagaattcgagccgttcgacgtaattccgcggctgccggagctctgcggccattcggcgcaattctgcgatccgctctgcggccagttcgggaatgccgcccatatccttggcgggatcgacgagcaacatgtccgtaaggatcgaatagggggtcgtcgtactcaacgtatacagataacggaacgtggctccctgctcgacatagttcggagtgggcacgaaatagatataaccgtcggccacggcgcctccgatgaacggataattgaccgcatagagcgattcgggatcctcctccgagacgcagccggcgatgatgtcctcgccgttgatgacaccgatcgggtcttgcgaaagcatcggagagatcgccccggttattcctgcgagcggagctgccgaaggcacatagaccgcaggaatctgaccgccttcgtcgaatgtgagaccggtaagcccagtaatggtcagcagatcgaccgaactgactgccgtcgggtcgtcttcaatggttaccgtaccgatcttccggcgcatctgcttttcatccatgacgttgatggcataatagttccattcggtcgaaatgagatactccttcgagggttgttctttctgcggcaggaaatccgagtagaggaactcgctctccaatcccgggttgtatttgccggtagtcttgatggatgccgtgacgagtttgcggacatatccgttgtaagccagtccggcgaacgtatactccgtatcgccgttcagccccgtgagcatgatgctgtaatgtccgccgttgatggcatcgagctgctctttggtgaaatccttgcccatctgctggaggaaagccgtcatgtccagtccctggatggctttcgtcttgaagacaccgtatttgacggattctatttcctcgccgtaggcccagaatttcgctgcattgtccgtcgtaatgccttgtcccgcgaattcgttcgtggcttcgagcccgatgttgagaatgacggaaaccttgtcctcgtcgcccttggcgatatatccgaacgaaatggaggcgtagccctgcattttcagattctgcgacgccgtttcgccgccctccggattcgcctcttcgtccgaaccgtagatgcagcctacaagcgtgtacttgccggtgccgccttccagatcctgaacggaaatcgtccccgaagcagtgatcgtcttgatgagttccgcggcgatcttgccatcggccatctcctgtgccttgaggctcgcctcgccgtcgctcaaattgcccgtgaagatcgcatagcggaactctcgggtgtcctcggagagggtggcgccgatttcgacgacaccgtctgcgggttcgcttttggtgagggccaccgagtaatcgtagaccctggctccgggaagcatgatccgctgcagaccgtttgcgttggcatagaagaattttccggcatattcaccttcgctcggttcgagcacgataccctgcgccgggaaggtaatcacgccgttattgagcgtgccatattgtccggctgattcgtccatggcgaaattttccggtgtctgcgatgcgatgtaccactcacccatatcggaaaagagggtcagaccggtcgattggtagggataatagaccttgttcggatccgaggcatcgacataggtccagacgttgcggttctcgtggtttacctgtcctccggcgaagatgttcatcagctccggagtgtaggctttcatgcggtaatagcccttcttgtccgaacgctcgtagatttcgagttcgatttcggggttcggattagcattggggttgtctatcgacgcgaagttgcccagaatgtcgtcgcggtagcggcctttggtctcaccggtcttttcgtcggtgaccaattcccatttggccagcacgagcgatatcgaaaggttcaccttatcggcaccgtagatcgaagcgtagcgcggatcttcgatgttgatatcgcaggtgtaggtcgtgcccatttgggccttggggaaactgatcgtaaaggtcgtctcgtcctctccggcatcgaatgcgatcggctcgacgacgaaaatatcctcgacgttggacttcacgacgaccggaacgacgatcggatccacggtgttgcgccgtttgaccgtataggtcgcttcggtctgggttcccggttcgaactccagatcggttcgggtagcctgcttcttcgggaagtagacaccgtagcaatcgggattctccgcggttccctgcgtatagttcacgtcgtcctcgcagccggcaaggacaagaagtgccagcaggaacggtaatatatgcttgaatgtcttcacggtaatttgcttttagatttgacagcttgatcgcagatggtcatcacccgttccacggcttgaccgtttgcgaaggatcgggattgttctgcgtggcgatgacggggttgttctgcgtctcaccgcgcgagatcacgaagttccagtagggtgcacggccttccgtattcagccggtacgaggcaggagagttggttcccacatagccccgtcgggtggacatgtcgagccgcttcatgtcgaacatgacgatgccttcgccccagaactcgatgcgcttctgaagcatcagctcgttggtgaaattttcaaccgacgacgacatgttcgtacagtcgtaacctccgcccacaatgcggtagttgttcatgaactcattgagtagccgaattccttcgccaagattttcatgcgccttggcctcggcctcgatgaagtacatctcctcgacgcgcatgtagggatggtctgcggctccgccgaccttgaaatcctcataagcgccctgcgccggacggaacttgatgttcgcgtaatcgggcagttcattgaagtattccttcccctctttgcggcagcttttgtagtcgtaggactccttctccgggtctttgcggtcgggatcgagccacgaatggcggcggaagtcgcgcaggtcgatactgttgtaaaggttgctgttgatgcagcggcaggcgtcgtttccgtaggcgctccacgcattctccgtgctcatgtgcgccgtgaagcagaacaggttggcaacgctttcgctcggcagggcgaggccccagatccaggcattgttcgccgtggcgctgttgaagccgttcgaggggtcttcccactgctcctgcgtcaggggcgtacagccgctggcgttaatggccaagcgggcgtactcggcggcggaaacataggcttcggcgtcgttcttggccgtaccgcgctcaagccaggcccgggctttcaggccgtagaccagcgccggactgatcgtatacttgtcgggagcagtaaagccgctcaatagttcttcggccttgtccaggtcggggaagatcacttgatcgtagatgtcgtcgaccttggcacgggggttgttcttggcctcggcctcggtagtctcgggcagtacgatgggcacgcccagcccgagaaccccgggcgcttcagtgtaattgttctccttgaactcgtacagacgcaccagatcgaggtagaacatggcccgataggcgtaggcgaagcccagataggacttctgcgtggcgtcgagcgtcgcgaaatccgaggcgtcgatctgtttgatgacgttgttggccgccatgatccacgcatagtagttgttccacgtgagcgcacccacggcatagtcggcgccgagcgcttcgttggttccccactgtgcgaaccagtcgtagccgatattgccgccaatggcgacgtcgcccgtcatggattccgtggcgatatggatggccggcagggcaaaatcccaggcttggccttcgcttgcatagcctgcggaaccggcctgtacgagcgaggccggaatgccttctatcagcgtttcgagggtgacctgatcctcggtagctatttcataggggtcggcttctttgatgcagctgcttgccagcaaagctgccgccagcgtcgcgagcgttatgtttgtcgcttttttcatatgcatgtcgtttgtcgtaaagtgtttgaggccgattagaattgaatgttgatgccgcccgaaatcgtccttacaggcgaataggtggcctggctcgtcgatcccgaataagagtagcggggatcgaatccctgacgtttggaccagtaccagacattctcgcaggcaaggtagacgcgcaccttctcgattccgaccttcttggtgaaattcgacggcagcgtgtagccgaagttgatgttctgtaggttcaggtagctggcgtccgtaaggaaacgatcagacataccgttctgatccttgtcttcatactgcaggcgcgggatgttcgacgacgcattgtccgccgaccatgcattgaggatgtccttgtgccagttcatacccgtcgtcttgttggccggcgagtacatcgccgcggagtatcccgagtcgtaagccagaccgccgatctggtaggtgaaggccacgctcaggtcgaagccccggaaattgacactcgtgccgaaaccgccgtagagatcgggaatcgggtcgccgcagagatagtccgacgccttggcatattcagtcgtcgtaacgcgcttgcccgtcgggttgcccttgtcgtcggtttcgttcatgtaccacatcgaaaggccctcgtccgaaacaccggcatatttcctcatgtagaaagtgtacatcggaagcccttctccgaagaaagtggagccgctcacgtaaccggagtagccatcgacctgtttggtccgtcgttcagaaggcagcatggtgatcttgttgcgcaggtgcgtcatgttgaggttgatgtcccactggacatgctcccgtcggatcggcgtaaagttcagctcgatttcgacgccgctgttgcgcatgtcgcccacgttggcgtagtaggacgaatagcccagcgacggagctaccgggaacgacagcagcatgtcggtcgtcttgcggaggaaatattcgacgcctccggaaaccgtaccgcgcaggaagctgaactccacaccggcgttgaagttggagttggtctcccaggtgatgttctcggatcctttggcgttgaagacggtcgagacctttccgttggcgttttcgatcgtgtaggtgttcgtgtagcggaagttaccgatgttgtcgttaccctgcgagccgatcgaggccttcagcttgagattatcgagccattcataggtgctctccatgaaattttctttcgaaatgatccatgcgccgcccagcgaccagaagttgccccagcgatggtcggggtggaagcgcgaagaagcgtcgcggcgataggaggccgaggcgaaatatttgcctgcgtaatcgtacatgacacgggcgaaataaccctcgttgttgtactcaacccggtaagagccggctccctgtttgtcgatgatcgccccggcaagctcgtcgttttcctgcgtcagcatattgcttttcgtggccgacagcgtgtaaatgcggttctggtaggactcgtggcccagcatcacgttgatgttgtgcgagcctatctgcttggtgtagttgagaatctgctgtaggttgaggtcgaaattccgttgatggcccttcgagaccatgcctttttcgctggcgaactgtccgaaccagggattcgtaaccgaggtggagcgggtttcgtcgagcgaaacgccggcgttgaacgtgaatttgaaatccttgaggaaggtgacgtcgatatatcccgtaccgttgaaagcattgccttcggcttcctgtttgttgagacgcgaatccgagagggcgttgctgttggggaagagcgaacgctccataccggcattgtcgccgttgccgtagtcgtagagcttgatgccgtcctcgttgtacatgacattaccctcgccgtcgcggatgtagagcggatagatcggaccgacggccgtcgtataagcgaaaacgttgcccgacgagttaccggcgccgctgtcgtcgatctggttgtagcggaaatgcgtgtagttggcattggcgccgaacttgagccacttcttggcctgatagtccacacgcagacgggccgtataacgatccatgtccgagttgtaggcgataccttcgttgttcaaatagccgaacgatccgtagatcgaggcgttcccggtctggccggagatcgaagcgttgtactcctgacgcagggacgagcggaaagccgcatcggtccagtcgtcgggacggatgtagtactccttgccctcatagacgagacggcggccgagagtcgcagcgggattgaccttaccgttgatgccgatgaactcctgcccggaaggaaccgtatagaccatatagcccagacctccgtcattcgcattggccgtcaaattcgtattggcgcgcagatgggcctcgccgacactcattcccgaattgacatagtagtttttcagcgcactgtaatgcagttcgtaaaattgcgccgggttggtaatgtacgcataatcctggacggcgcgcgaattgacgccccacttggcgtcgattgtcacgtgagcctcctgcgacttggcctttttggtggtgatcatcactacgccgttggcgccgcgggcgccgtacagcgagttcgaggcggcgtccttcaacacagtcatcgattcgatgtcactcgggttgaggttgttcaggtctcccgagtaaggcatgccgtccacgatccagagcggatcgttgccggcgttgagcgaactgaaaccgcggatgcggatcgtcggactctctcccggctgtcccgaggtgttggtcagctgcacgcccgcgacctttccggccagagcctgcgctacgttcgactgctgcgacttggcgatgtcgtccgatttgatgacggtcgccgaaccggtgaaagcctccttttttgccgtaccgaacgccacgacgatcacgtcgtcgatagcctgtgtgttctctttcagcacgacgtcgatccgggtttgcgttcccaccttgatcgtgtgggactgataacccatgaacgatacgaccagcacattgtccggtgcggctttgatcgaaaagctgccgtccgcaccggaggtcgtacccttcgtagtgccttcgaccagaatggtggcgccgacgatgccggcccccgcatgatctttgaccgaacccgtaatttcccgttcctgcgcatgggcggacaagaacaggccgagaacagccatcaatgatagaaagatttttttggtcataaatgcgccattttaacgctggtaaaaaaatgattgtagaaaatttgccgtcttcgtgtcccggcgcggagccgaaacactcctcctccccttccggaagcccggagggggggggatgtcatccgcctgtccggtcaccgaaccggccggatcgcagcctattcgtagaaatcgtctgcaaggtcgttcggcttcgagcccgaatacttggcagccttgccccggaattcgatgatcaaggtgtttccggttccggtcggatcagggttccatgtactgaatactccccaatcgaccatcgagaatttgaagatccactccttgccctcctgcttgacggttactgccgccttctcgggacaccgcatgcagtacttagccttgtcggaatatccgtacccgttatatgaggacagatacatatactggaacttgaggttccatttgcaattcgtgccttccgcaggcaggtcgatctctccttcatggtcgaggtagctgtccggcaggaaaaacatcggagtagtattatccgcatcgatactctcggtgaaagcattccggaaatagaagcaatatcccgataccttctcgccggtataactatcctgataagccgggtcatgccgcacctccatcgccgtaacgggccaatacagcatgtctttgttatccttgtccaggaatttgatatagggctcgaacggtttgacgggtttcagtgtttcttcatccattgcgtcggccgtcgcagccgtcggcacaccgtagtattcggcttcgaccccgatgccgtttttcagcgtcagatttacccgcagatagatctccttgccgccagcgggattgggatgggtctcgatcgtaccggtcagtcccgcatcctcgccgtagtaggtctgataggtcttgtggtcgtagagccggaaccagtaatcggaggtctgcgccgcgacgtcgatcacgccgtcgaacttggccgccagcacccgcacatacgcagcccaatgacctttggcgagatcggccggagctgcggccgtttcggcatcgcccaaagcgaatacgtagctgccgacctgcggctcctgcgagaagagcgtggcgatcggggcctcggctgcggccgcagcctcgcctccggctgccggctccgtcaccttgatcgtattggtggccgcatagcctccggcaaacgtgccttcgtaggcggcacgcaggcgcttcccgtctttcgaagcgtcaagcgcgacgatgagcccctcgattgtgccgaatttatccgtcaggtacttcgccgtcagcgttccgttcgtcccggcgcccgttgcgaattcgccgcagcgaatctgcaccttcgcgggatcagccgtcgcgaggtcgatttccgccgttccgaacagctcctcggcgagcagaatctccacgcccgcagccccctcctcgggagcggtcaggccctcttgctcgtagaggcagaagcggcggttgccttcgcggacattgcgccactcgacgacgcttccgacggcggcgatccgattgtcgatctcgtattggttcgtcagttcgacgtcacgctcctccgcacaggtattctggtaacgggcgatcagcgtcttgccgctcttcaattcgacataggtatagagattgagccgggtctccgtcaccagatcggcggagagctctacgctcgcgacgtcattcatcgtcgtctttttcaccgaaatatccttgtattcgatttcgaacggatcggaggccgtgttcacggtgcccttggggctctccaccatcacgcgcagataatcgtcggcctgtttcatctgctcggcattgatcagcccctcggtcggcgagagataaaaggtgtggttgccgtcttcttcagcaacatagattgccgacttgatgccgatgagatcgcctccgtcgtactggatttgatcggtcagagttacgggaggcttcttcccggggtcgggatcgtcgttgggatcgtcgtcatcgcatgcacccagcatggctgccgatgcgagcaacgcgcacgccagcgcgcgcaatctgtaatgggtcgagtttttcataacgattgtttttaatagcgcggggtttccccgaaccccgcgctatccggtttcactttgtcattcggtcattccggactttcggaacataacgtccggcagtttttcggccagacggctcatcgagaccttcggagccggcaggcggcggagcagtctgggcggttcgagatgatccttctcggccgcagcacctcccgtttggcttacgacagaaccttcccacgttccgcgcacatgatgcttgcgcacgcagatgccgtcgatctcgaatcggtaccagttctccttgccttcgccctcgaccttagtgatcgtaacctgaccgccgtaaagcagtgcatgtgcatccatgtattcgaagatcttgttgtcatctccccatgtcgtgtaagactggtgcatccatcggctgccgctcaaggcgccgttcagcatgatgccccgcatcatgacaccgggcttgatgaatgccggccagcgctgttcggtcacctcgtaggttcccggagtgatctcgttctccttacccggctcggtggcgagttccagacggatgatgtcgccgcccggctcgcgatccacgaagtcctcaagactgtcccctaccgattcgataccgatattgatgaattgcaggccgcagttgtaggtgctgaccggcttgtagccgatgccctggatatagatttggtcggaggtatagtaatgcgcctttttgatcttcgacagatccatgtcatagtcgcgctcgagcgtcgaggtgccgtcgtcgtcgggcttgtcgtcggatgcgtcggtaatcggaatgactccggtgtacgagcccttgagcgtaaagccgtccttcgaggtgaggttgaactcgatcttgtataccggctcttctttgccgtcttcgccttgggtcgtaccggcgtcctcgatctttatggtgccctcctttccgtaggagaattgtccgaaagaggttccgtcgtccaactggacataagtgccgagagggaataccattgcgtccatcggaatctccacggcgggcatccacgttccccattggaacgaggtattgggcagatagtcgtgaggtttgatcgcagcttccttcggattgctgaacagatcattaaatacgacgagtgctgcggcgagaccgccctgccccttctccgtatcgtaggtttcgtcgtaaatattgatctgcatcataccggtacctgcttcgagcatgttgccgtaataggtcgcggtggcgctgaatccgaccacttccacgtcgcgtccgatctgcggcaggtagaagccgccgtcctctggctggtcgacgatctgaagctgtccctcgtagacgatgctcttttcggaaccgtccgtatcgacgaaacggagcgaaacgctccagacgtcgccttcgcgggtgactttcaacggctctcccgaaaccaacgacaactgggttttattgccttcggcgtcgatatactgaacgccggtatattgggccgtgaacgtgtgatcctcgttgagctggctggccatatattcgccctcgggaagcgtataggcatcttcgcccggaaccgcatagaggtcggccacgaaaaggtaaccctcctctttgagcgtcacccgccctttggatacggtatattcggcatccgtaaaggccatataatagttgtgcgactccacgcccttgaccgggccgaggtaccacgacagcggaactttatccagcaacaccttgtctgcgtcatctccctcctccgcagcgtcggaattcttgcacagtccgtaataggcgaccgtcagcgtttttccgccggtttcgattgcggccgaaatgcgggcgacgcgggccgagaggaactcgaccgagagatccgctttcgaggcttctccgacgttcgaggagttcacgtcgatctccccataagcgattccgttgccggcagccgtaagatcgacggctccggaaggttgtttgacggtgatcttcacggcatcgtcggcgatcagcatgccatccacatccacaagccctgccgtcggcgaaagatagatcgtatagacggaggccgcttccgaagcatctgccttttcgccgtttccgggagtctcgaccgtgtagacggcggatttgatttcccgcacgacaccgttgcagatcagggcattcccgctttctggcatatcggggttgccggatggagtggaatcgtcgtccgaacatgaattcagtacggacgctcctgccatgcagagcatggccagaaagaataggtacaactttttcataggatgagatttaatgaaccggcttcccggtttggctttcggatgtgataagcataatgaaatgccatacttaaaacagtcgatacaatctacataatgaaaccctggacggattccaaaaaattacttattcgagtttcgggattttatcgacttggcacgagaacggtgctaaggaaaaatcccccccccctcgcgatttgacgaggaaagaggattctctctgttgcaaaaataataaaaagattttatcctaattaatttttcgcaaaaaaatcatcagcaattacgctccaaatgcataaaaaagtcttgcaaaatgcgcattttaagaacagattcgcacttcagaccgacggcgaaatcgggcagatcgaccgcttcgaaactgctccgccaaaccaaaaacaaggatggaataaaatatactatatataaatataatctctttccagatgagtggatataccacgcccgcgtcctgcaaacctcacattaccttatcccgatagtcggggtgaaatatacacagtgacaaccgtctggctgccacatccgagcaccacaccctccgagctgaaatcaatcgttgttattccagcttggccaacagttgccggacgaatgcttcgtcggcatcggtcagggtgtattcgggaacgccggcgcacccgcccatcgagacctgcggattacggaagcgcataccgctttcgcgttcccggcgggcgctgaagtgcagggcatcgacccctgtggcggccagcaggcgggcgttcgacggattgacgccgcttccggccatgatttcgatgcggccggccgcctgcgccgccaaggctcgcagcgtcccgacaccctcctgcgccgtattgcggcctccggaggtgagcacccggcggcatccggtgcggatgaccgcttcgagcgcctgccggggatcgcgcgtcatgtcgaacgcgcggtggaacgtcacctccatcccctcagcctcgcggacaagctgcgccgtgcgcgtctcgtccacctctccgtcgggggtcagcacgccgaggaccaccccgtcggctccgcaggcacgggcgaagcgaatctcttcggccatcagcgccgtttcggcatccgtatagcaaaaatccccgccccgagggcgtatcatcacgctcagccgcaggcccagtagactccgggcgtagcggatcagcccggcggaaggggtcgtacccccttcgaagggcgcggcacaaagctcaatgcgcgtgacgcctgtccgccgggctatatcgcacgcatcgcaggtataggcgcaaagttcagtcgtcataaattccggtcataattggtgtatggtgtgcaaaagacggtcgccgaggccaatcgtatagccgtgggattcgaacacgacacggttgaacgtatcgccgatcagaaagaccggaagcgaaacgttccccggcagctgcatcgcttcgagaatccgcctgcgaaccgagccgtcgcggtcgatgccaaaggtgacggtcgccggcagcggggccgcgggcgacgccgtgtatttccggtacgccccctcgtcggggaagagcaggatcagcgagcgtccccacgcttcaagctccgcggctttggccgcgatatccttcagcgcatgatctgtaggctcctgtccgacgcacagcaatccgatcacgaaataaccacgtcccgcagtcgtgaggaccgacgtttcggctcccgtcgcggcgtcagtgaatttcgactccgaatcgaaactcccgatcacgcgaaccgcctccgaattgtcgcgcatcgtcaggttcgtttcggtcgtactgtccggacggacgttgaagaacgacacgttccccagcacgctgccgctggcgagccggctgcccgtcacaagcatataataaccggtttccagatcggcgggagcccggaacagctcgctccaccgctcgaaatcaggatagttcagcagggagaacgactgcccgtcgaagcgcgaaagggagaagtgccggaaatactccggatcgtcgagacgcggaatcggcgcatagttcaattgcagccgcccggtctccagttcccggttcccggccgcgtcgaaatcgacgggcacatccttcccggcatggcggtagaagaggttgcccgtcacgcggtcgatccacgccgggatgccgagcgaacgagccgcggcaacgaagaagatagcccgcgagagtttgtcggccgtccggctacgccacacgccttcgggcgagatggtcgtggagacggtgcagagttccggacacagggtcaggctgtcgcggcaccacgccaccagacgctgcgggtcacggcggaacgcggcggcatcggcggccggaatttcccgctgcaggaacgaccggtagggcgtgagcatctcatcggccacacgcggggccagcacggtcgcggcgtcggcattcttgtccgtattataaagatgatccgcgagcaccgccgacggcgtgtcgcgcagatccttttccgacagcgtggcgagcagttgcagcgcccgcccggtgcatcctttccggctcgcgccgcgcaggaaatccataatttcggcgtgattgcctctcgaagcggcgataaatccggccacatcgtccggcttcatgccgacagaacgtgcaaactccgcaacggcgggtttcgccgggaacgtggcgatataggcgttgcggatggagtcttcgcggttgaagcgacggtcgttctccgcacgctgagcggccgtcacttccggcaaattcgcgctctcggtcggaggaacgatgtcgatgggaaaggagaattcgtcgccgatcgcatgctccagcaccaccgtcgcctccgtctccctcccgaaagaaaccttccgaaccccaaaccggccatcacagacagccgtgacaagcatatcgcccagacccgccgacagcgacgcccgcccccggacgtcggtcgttttgcgcgatacggtgtagaactcggcgtaattgtaaagtttgaactccacggtcgcaccctccacgggactgcccgccgtgtcggtgaccgtcacggtgagcggggcgcacgcggcatagttcgagatcacattgatctcggtgtagttggccgtggttttcatcacctcctccgaaccgtcgtaatagccgaagaccttggtatgcatcagcatcccgcggctggccggggcgttgaaccaccccaggtcgagcaccggttccggctcgcaggccccgaggaaatgccaccgtccgtcggcccaggcctctacccaggcgtggttgtcgtcggtgtgcgcccagcggggcgtgtagacctgccgggccgggatgcccaccgaccgcagggccgcaacgagcagcgtggactcctcgccgcagcggccgtaagccgtgcgcacggtggccagcggcgaactagttcgcgcatccgacggctggtagttggccttctcgtgacaccagtggttcacttcgaggatggcgtcatacatcgacagcccctcgacgcggggtttgagttcatcgtgaaatacccggcgcgaatcgtcgagacactcgttgttgacccgcacgggcagcacgaaatgccggaacaactcgtcggagacgctcctgccccaaggcatctcctgccggacagacagcgcacagcgcacgttttccagataaaaatcgcccagatagtcggtaatgtcccccacgggcatataggcatagagaaacgtcattgcatcgcgttcctgcggcgtcatcggttcgtcgaatatcccgaacagatcgccccgggggagcagctcctgtttgtggcggaaatcggtctccacgcgccgcatgaaaccctcgttgccggccggggagcacgccgacaacacgcccgtgagcataagcaggccggcgaatagctgtgtcgtttttttcatcgtaaagtgagttctatgattcggtcggtatcctcgggaacatgctccagattcaggacgatcccttttccccggagcgtgtcgaacttcacccgctcgccgttgttcaggcaccgggcttccccgactttttccgcaagcggcaggtacagcgcatcgtcctgcaaatcgagcacatgcacgtaaagtttgtcgcccttgcgcgtcgtcacgccccagtcgtggggcgggatgtcgccgccgcgggttccgtagatgctttcgccgtaccgggcgagccattcgcccatctcccgcagccgttcgacggccgtcgcaggcagttttccgtcgggttggggaccgatgttgagcagcaggtttccgttgcggcccgcagcccgcacgaggtagtggatcagcgtcttcgacgatttgtagtcgaggtcggtgatcttgtagccccacatgccgttcatcgtctggcacgtttcgagcggcaggcggccgatctcctgccccgaaagtccggcggtgttctcgcccggaaggtcgcgttcgaaaatctggatgtcctcgccttcgaacggaaccaggtggtggttgttacccaccagacaggccggcctgatggcatggatatggtcgtacagcccgcggagtttccagtcgaaatccgggttctgatcctgatcccacaccccgtcgaaccacacggcgcccaccgaaccgtaacccgtcagcagttccgtgagctggcgtttcataaaatcgtagtaacgctcgtagctgatcgccgtgccggaacgccccgtcccaagccccgtccgcccgcgcgggcagtcgtcgcggtaccagtcgatcagtgagtaatataggtgcagttttatcccctgacgggagcactcatcggagagcgcctttacgatatcctgtttatacggcgtggcgtccacgatgtcgtagtccgtctgcgcggtgtcccacatcgaaaagccgtcgtggtggcgcgtcgtgaagcagacgtaccccgcacccgaggatttgatggccgagacccactccgcggcatcgaaatcatgtggataaaacgcattggccagcttggcgtactcctgataattgatattgcggttggtcatagtccattcgcccgtgccgagcagcgagtagagcccccaatgaaggaaaatgccgaatttggcatcctgaaactccgtccgagcccgaaggttctcgggtgacgggacataaggatcaaccacctgtgccgatatcgttcggcagacagcagtgcaaagcaatgtaaaaaacagtttttttatcatctgcgagtaaaaatttagcccgggtatttacaatgcttatctacctttctttttttcaaagaagaggcaaattctatattaaatgaatatccaaagatagcacaaaaactcatcaaagcatatcaaaaccaaaaattttaatatgctttaaagtcaagtattctgtaaaatacctcttttagcgtcgattaaaaggctactctgccaacgcatactgaggcagttgcaccgacacctatacttggcagaacaacatgaatttttttgacgatcccctttacgaatcccataaccaagcaaagctgatagatcataactgacaacactctaacgttattcgctctacgatttctgtagtctggaattttcttcgtatctttaagaaaccgtaaaaactatttgagccatgaaattctttatcgacacggccaatctggaacaaatccgcaaggcgcacgaactgggcgtcctggacggcgtaacgaccaacccatcgctgatggccaaagagaacatccggggtacggaaaactgcaaccgtcattatgttgaaatctgcaacatcgtcgaaggggacgtgagcgcagaggtcatagccacagacttcgaaggaatggtgcgagagggtgaggcgctggcggcgctgcatccccgcatcgtcgtgaaactgccctgcacggccgcaggaatccgggccgtaaaatattttgccgccaaggatatccggacgaactgcacgctggtattctccgtggggcaggcgttgttggcggcaaaggccggagcgacctacgtgtctccgttcgtgggacgtctcgacgacatctccgaagacggcgtggcattggtagcccacatcgtgaaggtctaccgcacctatggttacaaaacgcaggtgctggccgcttcgatccgtcatacgcagcatattatccagtgcctcgatgcgggagccgatgtggcgacatgcccccttgcggcaatcgaagggttgctcagacatccgatgacgaacagcgggctggagaagttcctcgcagaccatgcacggctgaatacctgaacggaaaccgaactgcgacatttccggatgacatctatacgcttgaatgtacaaaatgacaaaagtcctatatacgaacataggacttttgttataaatattatagtcggccagaaaatcactctataaacagttcgtcttgcctgacgacatgctacagcgtcaacatactgcgcacgactctgctttttgagggttgcaaaataatttcggcagagtcggccgccaagatgaacaacgaatcaatacactataattcagcacaatatacaatcacagacaaaagtcaacgaggtaacgctttggataccgaaacctcgtttacaattacgttttttactctataagcgatatacttcttatctgaaaagcaacataatatcctatgaatcaaacatcttcccacccgcgaaagatccttcatacagtaagtatcagtcttcatatcaaaaaaatgtcacctcctctttcgaaatcgttgcatctgccgctgctgttcttcataggcctgcgtgtcggtcaggtccaatagcgtatcgacaatgccagaaataggattggcgatatggttttgtatttcgtgttacggtgctgtgtgttgttctggaacctgcttgtcgtttttcggtgccggatagagttcattgaaaacatttgccgaaaactcttttcccagtaccgacctgcgggcaacgatgccgtcgttatggtcaatgaaagtcacaccatagattctgccgaccgggttaatgcggaaaatcgtgtcgataccgtcagccttcaacagctgccggaactcgtcccgtgtattgtgtgggctcatggcattccggacactctgccgcagccggttgagcgccccgtccagtttcagttcgcttttcgaccgctcgtaatatttttgaagggccttgtagccgacatcccggccgatacgactcgacttgaatggcgtgccgataccgtatccgtcgtcggtcagggttccgtaaactattccggcataatttcgcccatcgacggttcccgtgcactcctcggctgagacgttgaagcgctccagcagcgtacggaactctccgtaggacgagcagttgtaattgcgcaggcacgacctcacgacagacgatatcagctgtttgacattgccctcggaataattcaccttctgcaggccctccctgtccgtcaattcatgtcccttgacactcggatgcagatcgtattttcgttctaattcccgcaatacggacatggattggtcgtattcatgcgaatcgttgattttccgcccctgctcatcgacccgcagcgacacgatatggagatgctctctggaaatgtccttgtgtttgaaaacgatatagggctggttgccataacccatacgttccatgtactcctgcgcgatgtcccggaactgtccgtcggtcagtctgtcttccggcgaagggttcagcgagacttggaaaaccgtattggtcgtccttctgttagcttcgaggtagggccggaagctatccatgaaggcatcgacatccatccgtccatatttgtcgaacggctccaacatcttctgtcaaaggagcacttcggcttcatccttatccactttctccttgttgtagtacaaggccccgccgggcgaggagcccgatcttatattcgcaaccattccttagcctgttttgcgaggttgagaatttcgatgctcagggttttcaattcgcgtgtccgttgttccaacagggcgatctgatgcggaatcgcaacgttggagaagtgcgcattgacagcctttacaatctgattataattgttggcgagtttctgaaactggaaataaaaatcgttcagccgggcgacgaactgcaccttcgacagatcacgtctgatgacgacgaactcctcggcgaagatgcgtttgacgataaaatggctgcggttatgctccgatccggctttgcagagcagctcattgaagcggatgttttgctcttcattaagccgaaacgagtatttataactcggcgttcggggcttcttttcagtcttgtcagtcagtttttgattgttatccatggtatcggttaaaaaggcgttcgactcgggagaacgcccggcctcgcagagcgagcgtttttgtcggacaaaccccagtttgtcggacaaaaacacagctcactcgcctcaagtgaggcgaaaaatccgcgccggagaatctctgaccgaagttttgaaaatcctccgttacggcttccggggccgggtctgctcccagtgcaatattataaccgtttcggggcaaaaaaaagctctcggtgcggactggagcggtcgtgagcggacatcggaaccgggctggaaaatgaagatgtatattgcggcagaaagaattattcggataaacaaacggatgattaagtcgatatttatcggggtcgttacccaatcaaacagacgattcgataaggaagcggagaaatacagaattaaaaaaataagtatataaataaatccatatatgtacgatagtttatcgaagcagacatcgatagaaaacattacccatataaataattcttaacatattcaaatgatggaacctgtaaacatttcaatctgcaatcagaaaggcggcattggaaaatccacattcacggtattgcgagccagctacctgcattacactttggggcatgacgttcttgtcgtggactgcgactatccgcaagggtcgatccatgcccagcgcgaacgcgaactgacggtcgtgaagcacagcgactactacaagctgatgatggtacgccagttcaagactacgggtcggaaattgtggcccttgctgaagtgtatgcctcccgaggctcccgaagaggtggagcgcatccggcaaaacggttatctgccgcgcatagttctctacgacctgccgggaaccgtaaatgccgggggcgtgatccggatactttcctccttagatgccgtcttcattcccctgaaggccgacaaactcgtcatggagagttcccttacgttcgcacgcggaatagagcatggattcgttcaggacaaggacacctcattgcaggccgcccatcttttctggacgatgatcgaccgtcgggagcgtactcctctttacgatcagtatgaggcgatcattcataaactcggattgtcgctcatggcgacgcatgttccctaccgttcgaaattcaacaaggaactgctgcccgacggctcgagtatctgtcgttcgacacttctggctccggagcgcatcttcgcccgcgaagcgcagatcgaggcactgcggcagaaatcctcaaaatccttaaaatacgataattatggccaagaaaccgaaaatcgaaatcgacgaagacctcatgcgccagatgatagccgggcaggcgcctcttacctcgaaagtcgtccggcgaatccccgacgacgaaccggaagatactcacgatgcgctccgggagacactgcatgcagaagaacaatcgccaccttcggacgacgggtctgaatcgcggcatcggcgaatgatccccgcacccgattacgaacggacttttctcgctccggcaaactttgacaacagggcctcgctgtatgtcggtacggcaaccaagcgcaaacttctggaaatattcaaaagaatcggcggggagcgtctgaccgcaacagcctatatagacaatattctgcggtatcatatcgaagttttccgcgaggagataaaccgcatctataaaaaacgcaatccccaaaatatcgtttaacaatccaaaaactttcgaatcgtgtattacgatcttttttccgagccgcacctgttcggtattccgcccctcacggcactgcttcctgcatcaatttttattcggaggcttccggctttttccttacggcaagccgccatgacgacctcatccgttctccggcctgcggtcgcaactgaaacacctgccattaggattccttcggcggcagcctgtcttaaaaccatgacgaaagcagccacctccgggcaaggcattgccggcactgcgcatgtaaaatccggcggtgcggcggcaaaggcgccgaaattccggcgtcggaggactgccgttcccgatttcgaacagaccttcatgaccctaatggagatcaggcagcgtgcggcactttatgtcagcatcggaaccaaacgtaaaattctggaagtcgtaaagataatcggcggggagtatatgaccgcaacttcttacgtcgatcatatcctgcggcagcatctcgaattgtataaagacgatatcaaccgcattcacaaagagcaaaacacaaaagaacttttataatgatgaacatgctcgcaatccttatcagcctgctatgtgccggcttcgtgctctcccgagagctcttattcaaacattccggcctgcggcgttggaaagatcacaagcaggtgccgcccgtcgctcgtccgccgctcggtgcattcccgaagcccgagattctcgtgtctaaatcctatcggtgcggactggagcggactggagcggacatcggcaccgctccggcaggcggaaatgctatatttgccccggcttcggaagagaagtccgcgatgccggggtggaacactcttgtcgtgcagcccccgatcggcgaagacggcgaacttgcggagcccgaagcacctgacgacacaccggcccgtccgcagcttccgactctccccgccagagcagaactccgcgatgcggaggttcatgcgatgctcggagagctggacttcggagagtgcgccgtcatgggcaacgccacgaccgaggagcggcaggccatcgccaacttcgacatccgggcctttgcctgacacgtaaacgagagacgacatgaaatggaataacgaatacggctaacgcttttccacagcaggaaatacgatgtatccagtcgcagaatgcccccaaagcaggctgcggcctttttcacacccttaaccaaactacctgttttatgaaaaaaagagcaattttcacgattctgtccctgtgctcctcactcgcatcctttgcgcagggcaacggcatggccggcatcagcgaggccacaaacatggtaacgtcctacttcgacccgcttacgaagctgatcttcgccgtagcggcgatcctctgactggtcggcggcgtgcgcgtctactcgaaattctcgtcgggcgatccggatgcctccaaatccgctacggcgctgtttctctcgtgcgtctttctggtgatcgtcggcacggtcttacgttcgttcttcctctaagcgatggccgaataccaagtgaacaagggcgtgggccgtcaggtcgaatttcagggtctcacggcacagtacctcgtactgttcgtcgcggggcttctggacgtcttcgtctgctttgccggaatgtacatgagcggcatcccgcagggcttctgcctcctcttcgccctcgcggccggtcttgccgtcacgggcggcaccttctatctgaaccgccgtttcgatccccacgggcttcaaaaactcatgacctcgcgccgccacccggggcgcattgtccaccgccgggcagtcgggcggctgttgcgttttcgtcgaaccgtaaaatcataatcctatgcgcggaacattgaaaacctcgacgctggaatcgaaattccctttgctgcgcgtcgagaacaactgcatcatctccaagttcgccgacatgtcagcataacagatacccgtaaagcacgagaagaggaacatgtcccgattaaaatcctggcttttgtaacgcaggcgggttgtcatcatgcgatgcagttcttcttcggtcaggaaactccgatccggattcagagccgtatagctatataatgcaaatggattacgtggcatccagccgttgttaaaggcaatcctgacgacatatttcaggcattttagatacccgcaaaccgtcattagtttaaggccccgatcggatttcagatagacgtggaactattcgataaaagattgttccaactcggacaaaggcatatcgcttacatgatactccttttgcatgaaaacacgcaaatggtcgatagtattgcggtatcgcttccaaactccataacaacgatctataccgatgcgcttttgataatcgcaggtaaatttttcaaacgcttccaacagcatacggtatttatctccgatgcccagatatgcattcttgaccttctcggccgagacgaatgaatcctgatcactgatggactgatagtgtttattgatctgggcacggatattatccagatggcggttaatgcggtcggcctcaacgctcttgcctttactcctttttagatagaatagaaccttaaatttggtaaatttccaaataacttcgaaaaatatactcaacacggtttcgctgtcacctctatttcaagtcttttttatatttccaaccatatccatatgcactcttctgacgtccagcgagagcatttttcacattatcggcccgtgtaacattaaaataggagattatttcatcgaatgaatgaaattctttcgcaacattaccattatcatctattgcaacaataatatttgcttccgcatattcatgaagtacctgttctgcaatatcggaaccattttcttctaagaatgtttgaaattccgtctgagtttcttcttctatatcaaatttaaccaaattaagagtttcctctattgcaaaccatctcgctcgtcatcaagatcattcccgtccaatttcttctatattaaatgtgtttggaaagcaaaataaatctcgattaaaacatcttttcttaacgaagtctttttcttcctcacttagaggcaatttggtttcccatattttgtcgtatacggagttataaatagccattctttcatttataaacgcttcgtaaagttcgcctattttggcttttataatctttacttcttttgtaaggtaatgtgtatgtgaatgtccccaagtctgcttattatagccatactgaggatcataagctttgtaggtatttataagttgtgtttcggcgtaattcaacatatcgacaagtctctcaatatcattactctcatattgttgaactatctcaaatttacattttttaaaagtcgaatacgctctccagaatccgccatttgtcggatcagtcacgggactgatatgttccctatgccttatttgagtatctcgtctagtctgtccaatatataccttcccatccggaaaagtgtacttataaatgtatcctttcattattgtagcacagttcggataatatttaattaataaattaaatatatcagcattataaatgccgaattcaataactcgctcgtcagaataggccacatcattttgagcaattcacatcgaacaggcgagaaatacacctaactcaatgccatcaaatattcaaagctacttgagcgttccacaacatcatgccttagcaaatgataccgccaaggtttacccccatttttcaaggtatactccgttgcattcttgcaatattcctcggcagctttcttttttgcctgcacatcttcatcggaaatatctttaagggcttttgtttctatcatgtaaatacattccgatgtttcgactatgaaatccggttcatagcgtttggctccatttgcccaatatatgttgaattggttaggtgctggtcgcaaccacctcaatacatcattatccgactccagcacattcgcaaaatcgagctcggttttgctgtcgaacttacactccgtataatatgatttcaagaaaccggtaaatatgaatttacgcacaaagcttggttttacagaatctctgaaatcaattcgtccaaatccgtctaattctgtcaaatgctgatcgactattccagaaaaaggcaatacattcggtttcaggtatcccaacggcgttatcacaaaatgcctctgcatctggtcaaaaatagagttggcgattgcaactttaaattgatttacaacttttgctaaatcagtctcgttatcaacattcttctctatggcttcgacagcctgtccggccaaatgatagaggagttctgagttttcgtcatagtcgatttcttcgtgatcgatcaacgcattcacaatctgattaacaggagtatcaaatttccttcctgttatcacttgcaacacttccatcgatttctctccagcacctacacttattcgaataatctcatctttcagtgcaggcagatcaaatcccattcgcgtatcaagatcaaaccacttgaattcagctttatatgcctccttttgaatggtcatacgtggaatttctataatattgtctataaatttctttacaacaacctccacaactgaatccacttctgcaagcaacggttttgcctcttcatcagcaaaaagcggattagtctccttcgcctttttaattatctcattccgcgtaagaaccttaatcgcatctattaccttcgggttggacaactccttagccgagcgcaccgaactgttcatcttgggaatcaccgtccaaacagctcgttgagcatccattacagcctttgcattctttttctcgacctccgtttttgcctcttcgatggttttcttctcctggaaatcaattatggtagcagccgtaaccactttaccgggctcgggagttaaatcctcatcatcaagttcaacataagagaccttactcaataccgagttcggatcattagctttggcgataacggcttcaaaattttcatgcgcaattaccgtcaacttatcaatatcggcatatcccgtacgtttcccaccatatggcaagcgtagacctcgacctatctgctgttcaaccaatataggcgcatcggccgctcgtaaaggcacaatggtatacagattggttacatcccaaccctctttaagcatatttacatgaataacgatctctatcttattgtccggcttctccagcgaaacaaatagcttatctatctcctcatctttcttggtcgagctgtctatttgaagcactttacctgcatacctcccgtcaaacatttcgttctgtattctattgaatgtttcagtggcatgttgaatacttttgcaaacgatcaaaataaagggttttaccagaggctgattattatttttggcatatatctccaaatgcagtttcgtatgttcatggacactcactgcatcttcgattttaagtatatccaactcctcatcggtcatattgccccggctgaaattccttcgcttggcaatggtcggtatcttcacatatttcccatcggctaacgcttgagccagattatattcatagacaatattcttaaacgattttcctttttcatcggtaggcgtagccgtcatttcgagacccaatataggacgcaattcattgatggctttcttcgaagcatcggcatgataccggtgcgcttcatccataaggataaccaagtcatccaacgaagagaggtaatcgaaatatgactgccccaaatattccgataggcggcgcatcttgggagctccctttttcccaccttctttactctcggtattaaacttcgatatattgaagatgcttatttgtatctgattatctgaaaacaggttacgggccttgttgtaattatctccggttataattaaaggctcgttatgcacaaactccgatatccccttaaatacatatttttcatatgaagggtcgccaaaatcgcgcatcaacttctcgtaaagcgtgagatttggtgccaaaatgaagaaatgcctgatgccttttgccagatagagataggcaatacaagcccccatcaaccgggtctttccgataccggttgctatcgagaatgcaaacgatggaaaatcgcgttcaaaatccttgcagtatgggcagacttcctttacacgttgtaattgctcttttagataaacctcataagctaccgcttcggcctccttatccgattgtcgttcgggtttcgacaaagaaagtttgtctacaaggcgagttagcacatcgagtgcttcggccagcggttcccgaagcgacaggcgttgttttatcgtgtttgcaatagtattcataccgatagattaaaatagttcctattgtccctcaatcgtttctttggccacctcgctatctgtagcgtattcgaactcgtcctccatcggcccctcttcctcgtcgtcgatgtggggcaggtcgatgatgttgagcgaatagtcgtcgtgggcaaattcgcagcgccccagcagcatctgcggaatcttctttatagaaatgttagaaaatgcctgcttgcactccttttggaacgacgtacaacatatcaataagctctcgccttcggtcattgtctcacgtatggcggcaagtccctccaccgtcatgaactgcgtcgtagtgtagatgaagtcgctctccgacgaatagccctgcttccaatagacatcggtcgagggagcataggtaaatccctcctgcttggccattgccgccgccagcatatcggcattgtactccttgttgattaccaggttcccaaacttgtcctctttgagcaggctcggtgccagttcatagaatttgaagccgtttccgcccttccagttctgcgctttggagattccgcccagatcggtaccgtcagtcaccatcttcagacggggaacgcagtgcgtataggcgtgctgccccaactcgaccccgatatagcgacgacccatcttctgtgccacggcggccgtggttcccgacccgaggaaactgtccagcaccaggtcgccttcttcagttactaaactaatacatctttgaataagtttctctggctttttcccttttttaaaagttacgtttccttcttttgcaataccttcccacgcaatatctgtccatatatctgttaatggcatagatgcgcaaatttctccatttatcttacatatatttttattgtaaaaagctaattgctgtccatttattatatacacatcatccttatcttctcgtttaagtttgaagattttatctctatggattagcgattcagcttttatatctaatattttctgacctgctccagaatcactgatagctgtatatctacaaattctatgagcatttcttatgataaattcattatatttttttattagactttctggatttaggcttcttgttttttgtgtttcgctgaatacctgagcaacaggtttaaatatccagtcttcataagatgcatctatattggtaatatatttattatatgcataatcaggatttcgtttagctctcaattgattttctcgaagcctttttctatcctttacataatataaaatatattcggaggccacaaacatcccaggattgactgtactaaacgcagaaggggaacgagcatcaatggttattctgttcatgaagttttcccgatgaaaaatttcatcaagaattactttacaatagtcagcctcattatcatcaagatgtacaaagatcgccccgtcatctctcaatagattgtaaagaatagcaaatctttcatacatcatatttagccaaatcgagtgttcaattccgtcatcgtatcctatttcctgcccatctgcattaattcttgctccggtattaaagggcggatcgatatagatacatttgacggcacccgtatagttctgttcaagggctttgagggcaagcaggttgtcgccatggatgagcatattgccgttccacgatttgccattgggcagggtgcccgtctcgaccgtaccatacgaatagtcgggattctcaatgagaattcgcggttcaatcggctcgcgcgaatcatcctttccaatccacgtcagttccagtttctgcaatttcttatcttgtgccattgttatcggttaatattttgttaattctttttttctcttgttcaatatattgtaatgatgagtctctcatttatatatcatctgctatagctgacctatcaatggcgattaaaactaattgcttagacagcttgattagcaagacaaggtgttacgattttacactctacttgattttttatttgaggcgaaagtttagctaaaatcaatccttcttgaatcatttcataattgttattcaagaaaatcgctacgacttgtatatcttggatcattaacatatattccttatatgctttatacttttgcttgtttaaataacgaacattcttgttatgtcttataggcaataagaaatctaaaaaagtattggttcgatccaaactatcaattgcgtttttgattttagacgctatatcatcttcttgaaatataaacacattgcaaatctctcgtatattatttgaatcgatattatttacacaagcggatcttaccttgcaaccacggtctctcctgttcgtagttcaatattttgagctgaagctgtcattttttcattaacggcttgattatcgcgacgagttttttcgttatcttcgtgattgtgttgcagttgcttgtatagtacatacaatgttatcaaactggcgattactaaaccaatataacttccataaaacgacagccaatctgaactgcctccgacaatcggcgagaaggcgggtataaagataataaaattcagcaaaacgggagcacccaatctgattaagattgcccaccaatattctttgaggaacgccttgaacaaggcccactttttttgaggttcgctctcatatgattctccatttaatggtaaacagttcagtttgctgaaccttctgttgcagcatcttttcaatacggcttaaaagtagctcttttttttcatcgatttcatcttgagcattaaaaagattctgtcgcttctcgatacgcttacgttccatctccttgatggctctttgagcttttaccttctcttccagtcggccgatctttttggcttccgatttccgaaggcgtatctcctgatccaaatccgagatttcgcgctccaaagcgagcttcatatcgccggcccagttatccagtttctccatctcttcatcgaaaaagcggttgtttctgtctgaggaagaagaaagaatatcatggttcagctcttcaaccttatcgcacaaacaatcggcagttgtaatgtctactccggtttgtgacagcagacgtgccggaagcaggagcatccgttcggcaatttcgggatagacccaatcgccgctatcggtaaggcaggcaataaccagatggtcctccggctcaaaagaatcgatggatatcttctctacccgcatggtaccgctttggcctacgaggtcgtcaagcagcttggttcgccctgccgtgtgcgtataatcaaactcgatatatgccggcgtgtgaagtggctcccgatacttggccaaaatgtccttggccaaaggactgcttatacgataaggtcgcacttgctcgtcttcacactctttcgacaaagtatagatcgacccgtcgatatgaagcgtgaaggcatagcgatcttcatcgaatgtggcctctccctccaacgcatgccgcgttagaagccaaagacgtttttcaaactggtcgagatttttccgactttgagccagattgtctctcaacttctccttgaccgattcatcgaaattttccaataaagccgagcgggcttttatcatcttctcggatatttgctcctgcaattctgactgcaacctgtcaaatgcagcctctatctcatcagtcgttcgacattcgtcgtatatttgtgctatgcgtttttcaaaatcgacaccattgcctatgctgcccaaaatctcatcactggcaccaaaaataccattgaagagctggaacttctgatccaacagttcatacacacgtatatcggccgcattacttttattgaggaagttcacaactacaacatcgaatttctgtccatatcggtggcatcgacctattcgctgttcgatccgctgtggattccatggcatatcatagttcactatcaaagagcagaattgcaaattgataccctcggcggcagcttcggtagcaatcatgatagtggcttcatccttaaaataatcaacaatagccgcccgcctgtcggccgtaagggatcccgtaaccttgggcgtgcctttatacttcttcagccatgcctgatagatagccgtcgattctttatcggtattagtcccgttaaatcgaacaaccttacccttatatcctctcttttcgagatgtccataaagaaactcttgcgtacgttttgactccgtaaagataagtgccttggaggcagcacctaaatgctttaactgctcaaaacctttatccaacgcgacaaacagatgttcagccttactattctttttaattttctcggccagatctctaaattgctccagctcggatatttctttctttatgccttcaatatcggccggaggcaactcctcgatatcttcttcaatctcttcattatccacccactcatcgttgtcttcttcgtattcttcaatgacgagattcttgagtaacacattatcgttttttgcgataatatcctgcaaccgattgataagagagcagaatgttccatatatggcatatgttgaagatgcaagcagtttccttaatatcaaagtcataagctgacgctgactattaggtaaagcatacagtttcggtttattcaaataatcagtcaccatatcgtagagacgttgttcgttctctgtcgggaagaattcctctactatggcaatccgtttggtatacttgatatattccaaaacctgtcgtctgagggtgcgcttgcaaacgggttgtagtcgacgtctcaattccatgaactcttcatcggtcaaactatgaccaaattggctcttgaaactttttatatccccaaacacataatcgtcgataatagaaaccaaaccatataattccagaatagagttttgcaatggagttgccgtcatcaatatcttctttctggattctatagcctctttaatggtattggcaatccggttttgcggtttatatacattacgcagcctgtgcgcctcgtctataataaccagatcccagttcgtactctttatataagcggctttggactttgcaaattgcaaggaagaaataactatattctccgtatcaaacggattaaaagcgccattttctatggaggcattaaaggactttgtctccataatcacagatggcaggtagaatttctccaacagctcactcgaccattgttttcgcaagttagccggacatataaccagcaatcgccttttatgctcggaccaatgttgtgataagataataccggcctcaatagtctttcccaaaccaacctcgtcggcaagtatagcccctttggataaaggcgacttaaatgcaaacaaagccgcctcaacctgatgcggagtgagatccacctgcgcatcttgcaaagaggcagtaagcttgtttatatcgtttgccggcaatcttcgggtcaagaaacctgctatatatacggcctgataatctgttatattacagcacattccgacttactgaaagctatattgcccagctccttagacctaacatctaccggtctggaacttttcccaatttttatccagtcctccttaaagttaggattggtcaatatataaacataaccatcactcattcccataattattcagtccttaataaatcatctacttttacctcaagacatttagctatctgaataagcatttccaccttaggttgtgtagtattgcccccccttagacacaatagcagaatcttttcctaattgctcagaaagccatttgttggttctacttttttcggcaagaataactttgattcgatttaaaaactatacactccataagatcaattattctcatctacaaatatagcaaaagctcttgaatgaaaaaaacttatatctctaccggtcaaaatattgataatacaaacattttccccaattatatactttaatgtaccaaattgtacataatttagggtgatactctattttttaattctctgatacttagcatcaaatatcgtagcgggaaatagtttggataatatatcttattaccctgctaatttccgccacgaggggtaacaaaaagaaaccacctcgcaaaaaatgcgaggtggtttcttctgaaatagcaataaaattctatggtatagctacaatggcattgataacttgcgttattggatctccgtactcgaaatcagcaaacaaaagtccgacacattcataaatgctttaattgtttttattgatcagattcaccacaacctttgtcattacatccttctcttccgtgcggctctcggcaatcatcagcgtcagggcgaccagtgtattgttatccaaaaggcgcgaaccgtcagcacggtaaagaatccgattgttttccaagaaccaaaggaataggaaagccgcgatgcgtttgttgccatcactgaacgaatggtttttaaccgtcagatagagcagatagccgccttttcctcaacgctcggatagaggtcccgcccgccgaaagtctggtaaattgcgcccatcgtgcttttgaacgattcgtccttctcgtgggcgaacagctcgctgccaccgaacttatcccgtaacacctgcaatgccgccatcgcattctcataggtcgcatgaaacggttcctctgccgtagtcgccgtaacctccaactgctgataatcgtagcggtcgagcgtatcgagaccgtaagtatagtccgtaatcacgcgcagcaatccgaccgcctcggatttcgtcacctcttttgcagacagaactttggagagcaaacgaacggtttgctttagcgcctccaactgctcgatcttcgcttggctgttgacagcataaccctttataaggtactctttcagcactttgttcgcccaaatgcggaactgcgtggcatttttggagttgacgcgataccccaccgataaaatcatatcgagattatatgtatcaattcgtcgtttcaccgtgcgctttccctcctgacgaaccatttccattttggaaacagttgccgcgcgctccagctctccgctttggaaaatattgcggatatgtttggaaatcgctggaatttccgttccgaacaattgtgcaatctgcgcctgcgtcagccacacgctgtcgtcctccatacgaacatccaagcgggtctcgccgtcggccgtctggtatatgataatttctcctctgtccatacgaacaaatatagaaaaatccgcctgcatctccaaaagtcttcgcatttggatttatcgcccgaaatcgctatctttgtactgtcatgcaaggagatacggcggccgcgcaggcaaaacgggcaggcgggcgcaagaccgtgcaaaatgacggtaggcgacgcgggaataaagcatagaaaaccgttgcaaaccgttgatatacattaggcttacaaatgtgcaggagcacctttatccgcacgttgaagtctcctttcggagacttttttgtggacacaatgttacaaataagcacattttaagctgattgtcagtatattatactcgaaagcacaattctctaccaaagcaaaagtggttccgataaaagcacgttccgcacctaccgattcggattctttcatcgcaacgtttattatattgacaaattgtagcgggccgaagcgggcttaaaatttggcacgaagccgggaatcggttatctttacttcgaattgtaaacattatgattatgcaggacatgataaacggacggtgcggctggtgcggaaccgacgagctgtatgtgaaataccatgaccaggagtgggggaaattggtgaccgacgacaagacgttgttcgaatttcttgtcctggagagtgcccaggccgggttgagctggataacgatactcagaaagcgtgaggggtatcgcaaggccttttgcaacttcgacgccgtgcaggtggcgcaaatgaccgactacgacgtcgaacggctgatgcggttcgacggcattgtaaggaatcggttgaaaatcaaatccacaatcacaaacgcaaggctattcctcgccttacaggaagagttcggcagtttctacaactacaccctgtcattctttcccgaccggaagccgattaccaacacctttgggtcgttgagcgagattccgacatcatcgcccgaatccgacgccatgagcaaagacatgaaaaaacggggattcaaattcttcggcagcacgatttgttacgcccacctgcaggcgtcaggatttatcgacgatcacctaacggactgcatttgccgaaaaagataaacttctttcaattaacattccttcacggaaatgcaaagtatattgaagaacagcacaattcccaaaatatatttgtataatcatacgctttagattacttttgaaaaagaaagtcgcttatcaaaatccatggcagtaatgaaatattatataaatcttttttctcctaatacggcaacagcttttacaaattctaatcgagatgttaccggctttagaatatcgcgcaaatcatatgtcaaaaaccaaggcatcaaatctggagacatatttatttgttattgcactaaaattcagcgatttattggcatccttgaggtaataagcgctccatatgaagacaattctccgatctttatcgaagaaaacgatccgttttgcctacgcttcaaggtcaaaccgcttgtctggcttcctttcgaactcgcaattccgatacacgaagatttagtatggaatacattatcaataacaaaagatttgccgaaagacagtactaaatggacatataaagttttttccagtcctttacgctgggacaatgccgatggtaaatttttagtcgatttgctaaaacgacaagcaaagcaacaaactatttatcctctttccgagaaagacgcaaaaaagatcaaagcatcgaaaatacgtattatttccggaaaggaaaccattgtttctgttcctgacgacgatgcaatccaagagaaggatcagccacaaaccgagcaaagagaatctataaaagtccaggctaaactggcgaaaattggagaaatattcgggttcaaaatttggttgccgaaggcagatagaaaccgagttacagaattctggcatccgaaagagagtactctcttagacgaacttcccataatttttgatgagacgaccttaaaaacgatcaaaaatattgacgtgctatggatacaacgaagatctattgtgcgcgcgttcgaagttgagggaacaacatctatttactctggtatccttaggatggcagatctcctctctttacaaccaatgttagacatcaaaatccatattgttgcatcggaagaacgacgagaagccgtattggaacaaattacacgcccagtattcgctgttatggaacgagggcctttagctgatatttgttcatacatatcatatagttctatcgacgagattctaaaagaaaaacgcctatcctacatgacagatgatattcttaaagaatttgaagagtggagccaagaataatttacatctaggaaacttaaaaaattattatccaaccttgtaaagaaatggagcaggcaggaactgcgattcctgcctgctccattttttaacaccccgcctcagcgcatcagcagcttataccccactccccgcacgttcaccaactggatcgacgggtcggccgcgaggcggtggcgcaggcgggtgatgaagacatgcaggctgcgggcgttgaaaaacgaatcgtcgccccagatattcaccagcagggttttcatcggcacgatctcgcccgcattccggcagaggtattgcagcacttcggattcgcgggccgaaagttccgtcaccacgccgtcgcacgagagccgctggcgctcggcgtcgaaacgcatacgccccagttcgaacacacgttccgtacgcgctttcccgacgcccgcacgcccggcaagcgccctgacccgcacgatcagctcgctcatggcaaagggcttgcgcaggtaatcgttgcccccggtctcgaatccctgcaccacgtcctcggccgccgagcgcgccgaaaggaaaagcacaggcaccccgggcgcctcgcggcgcagacgcccgacgaaggtgaacccgtccatacaaggcatcatgacatccgacacgaccacatcggggcgcgacccgcggaacgcccgcaacccggcctcgccgtcgtaggccaccgtcacctcgaaccccttttcggaaagggtatcggcgatgatccccgcgagggtttgctcgtcctctacgagcagcagcctgatcttatcgcccatcgtccggaattatcagggtgaaggtcgtaccgcgcccctcggtgctctccaccgcgaccgagccgccgtgtttggcggcgattagcccgacgtagtacaacccgaggccgaagcccttgacattgtgaatgtcgcccgtaggcacgcggtaaaacttatcgaagatatgcgcctgcgcggcacgcggaatgccgatgccgtcgtcggcgacgcgcaagacgacccggccaccgtcccgcccggccgaaatgcggatatgcacctcctcgccggaatatttcaaggcattgtcgaccaggttgtccagggcatgcgagaggtggaagcggtcggcgaaggcagtcagcccttcgggtgaaacatccaccgtgacccgtgcgggtttggccgcctgcatccggaacttctcggccagcgccccgagcatcccggccaggaggatccgctcgcggcggagcgtgaaatcctcgcgttcctcgcgtgacatggtgaggatgcgctcgaccatctccgacaaagccgtcagctggctgcggatcacacccagatacttcgcacgccgcgccccatcgtcggccgccccgaaattctccagcgcgtcgttggccgcataggccacggcaatcggggtcttcagttcatgggtgatattgtgcgtgaaatccatcctcatctcctcgagcgtcttctgccggaacagcgtccgcaacaggtagatgaccacgaacgcgacgacgagcagcatgagcaccgaggtgaggatgatgccgaacagctcgcgcagcagttcccggtgggggttttcgatcttcacccggaaaagcagcttgtcatccgtggtgacgcgcgaggtgaacaccttcgggttccgtatctgcggagcatccttctgcgaggcgatgaccgcctcctcccgcgccgcacccgctggccgcgccgccaggctgtcgagccggatttcggtaacatccccgtcgtcaccgccccggatcacgtcgacactgtgtggcaggccgatgccggaatctgccaggtaacgcgtcagcagggagtcgtagcgggacaggttgaactggagcgccgtgaacgaaggcatgcgcacctcctggtagatataacgggtcttgtcgccgcggcgcagggcgatattcgtccgcagcgtgtcgaccttcgaccggatggaaagcaccttgccggccgccccaaggcttttcacagagatcgtgtcgatcatatccagcttaacggagtcgatattgcccgtcgtcacgaccgacgtccgggtctgcgacgtccggcgccggttgcccatcagcaggtcgtcgtacgccgcgcggttcatagcgagggtcaccttacgcgaaaactcctccgctcggtcggcatacatccgccacaagctccacgcctgcacgaaggccagcgccagcagggcgccgatcgcgcagaacgagatatttctgaaacggttcttatccacggccgaggggtttataccacaaaaatacgaataaaaacactcctgccgccggcgttaacattatttaacacttcttaacgcggcgttaaccatcgcccttcgtttttcggggtaatattgcaccgtaaaccaacacaccgaagccatgaaaacaaaactcaccttccttatcatcgccgctgcgctggccgccgcaaccgcaggacgggcgcagaccgtcatctcctactcgaccgacggcggggcacaggccctcgaaacgggcagcgtacggcagaccgtgctggacaccgccacgctcgaagtgagctaccgcatggagtggctgcggcgccccgacagagagaagccgatgcaggatctgctgctgttgcaggccggcgggaaggttacgaaattcttctcctacaagacgctccagcgggactcgctgctgcgcatcaccccggccgagcaggtgctggccaacgtgggcaacttcaaggggggcctggaggccgtcgtattccagaactaccccgcaggcgagatgacctgcaccgacaagatctcacgggacaacatgctctacaccgagccgctgcccgaaatcgagtggacgctccgcgacgggacgcgcgaggtcatcggttacgactgccgccgtgcgacctgccgcttccgcgggcgcgattacgaagcctggtacaccgaggagctcccgctcgccaccggcccctggaaattccacgggctgcccggactgatcctggccgtgaacgacacgggcgacgacgggggcatcatccgcttcgaggcgaccgggatccgccgcgccgaagttccggtgacgatggccgacctgaactacctgacgacctcacgcaaaaaattcatggccaccgagcgcaaattcatgaccgacccgatcggctacatgcaggccaattcgaacatcaggatcacggtaaggaacgaggacgggacgccgcgcgagggtgccgacctgctccgcgaatacaatccgctggaaacagaatagccccacggcgcgatgaagtacctgctgaccctgctttggttgctgggcgcaatcgccgcccaggcccaggagtacacgggccacgtggccgacaaggaggacggggcgcccgtcgccggggccatcgtcacggcgcgggactccctgggcaagccgctgggttacacgacgacctcggcctcgggcgatttcgtgctcaggccgcgcgggggcgggacaaccgcgcagctcgacttctcgacgatgggctaccgccggcaatcgattccggcggatgccggacggatgctcgtgctgctgacgcccgaggcgaccggcatccgcgaggtgacgatccgcgccccgcggctgagcttccggggcgacaccgtaagctacaacgtgtcgcgcttcaccgaggcgcaagaccgctcgatcgccgacgtactgcgcaagatgccgggcatcgaggtggcgaaatcgggcgagatacgctacaacggccagccgatcaacaacttttacatcgaagggctggacatgctcgacggccgttacggacaggcgaccaacaacatcgcgccgcaggacgtggcgagcgtcgaagtgatggagaaccaccagccgatcaaggcgctcaaggacatcgtattcagcgaccgcgcagccatcaacctccggctgaagccgcatgccaaagcccgatggacggggacgctgcgcggcagcggaggctggtcgccggcgttgtggaacggcgcgctcttcgccatgcgcatcggtgcccgggggcagtcgatggtcaacctcaaaaccgacaacacggggcaaaacccctcggccgagaccgaacggctttcggtcgaggacatcctcaacggcggagccaacgactacaatcccgccgcacacctttcggtcggcacttcgtccgcgccgctcgacgatacacgcacgcgcttcaaccgctcgcacatggccagtctgaacaacctgcgcaaactctccgaggactaccagctcagcagctcgctcacttggggttacgaccgcctggcctcggatcgcgccgcccggcaaagctggtacctggcggacggcacgcgcgtggacaccgagcaggagtcggccgcttcgtgccggcaacagctttcggcacgcatcgcactgaaagccaacaccgagcggttctacatgcaggaaaaactcgaagcttcgctggcatggaacgacatccgtgccgtgctctcgggcagctaccccaaccgccagcatgccgacgccccggcctacagcatcgaaaacgacctgaaatatatccggcgcaccggcacacgttcgctcaccgtcacctcctacctgaaataccttacccgccctcagtcgctcgatgtggtgcgcgaaacgggcagccagcggcagacgatcgccgaccgcgctttttacatgaaccacaacgcggcattcggcacgcaggccgggcagttcgccttcgccttcaaaggcggagtttcggcactcttccgggggctcgtaacagacctcacgggcaccgggctcgggacaggcaccgcgaacgacctttcggccggctacgcgggcgtctacctccagcctagcatcacctaccgctcgcagcggctgcggctgacgctcgacctgccggcaggttaccgccgctatgggctgcacgacaggatcgacggcagccgaaacccggcggacatcttcacctggaagccccgcttcgcggtgaaatggagccctacgggacacctgtcgctttcggcatcgggtacggtcggccgcgacgcggcggacgacagccgcacaggcaacggcgccgtcctgcgcaactaccgttcggtgctctgcggcgtaaacgaataccggcaggcgctgcaacgcagcctctcggcaggcatcgcctacaagaacccgatcggcgggttcttcgccaacctgctcgcggtacgttcgtggaacgacctgccgttcctgcctgcgcagcgcttcgacggcgactatatcgtaaactactacgtgcgcagctcgaaccgcgtgcggtcatggtacctgtcgggcgacgtcagccagaatatcgacgccctcaacggtcaggcaggcctgaacgtcggctacaacctcagcggcacggaactgctgctggaaaaggtgccgacctcctatgaaaattccaccctgaccgtcgcgccgcgtttcaacttccggttcgccgcctgggtaaacaccgaataccggctggaataccgctatacgacactctccatccgcggccgggagcccgacgggcggcacgatttcaaccagcggctgaccgtaaacctcgtaccgtcgaagaaatgggtgatccaattcacggcggagcactattactcgcagctttcggccgaccggagcaagcacctgctactggccgacgcatcgctgcgctggaaaataaacgggaaatgggaagctacggcgaccgccgcaaaccttttcggccgtgaagaatatgcctatacgaccttcgacggagtaagctcgggctcctaccgctatgccatccgcccgcgcaatatcctgctgggcgcaagctggaaattctgacaaccgccgcacgacgcaacgcccgggcaaaacagtccggggcttccggatcagaaattacgccccgtgtcccaccacaggcgcgtccccccatggtcttcgccgccgagttccgcgacgagcgccgcatactgctcgggatcggacgtcgccagcgcagccgggaacggcagccggcggatcatcgtttcggtatctatataacccttgctgtggttcaggcgtacggggaacaggcgcggatatcccgtccgccgctgttcggcccaggcctcgcacccttcgggatacatggcaatccatttctgggtaatgatccgctcgagcttcagttcgtcgtccgccgtcgcgtcccagcggggcgacacgcggcaccgggcggcaatgtcgttccccgggtctaccggatcgtggtagtcggccgccatggcgtcgctctccagatagtgttcggccccggacagctgccattgcgcgaacgatgccgcaacgccgttgcggtaacagagctccgcatcttcgtccgtccagccgcgcaatgccgcttcggcacgcaggaaccacacctcggccgccgtcatcaggacggcatcggtatccgtatccaccgtaaggcgggaaaatgccgcgtaataattatgcgagaaccccgttccctgacggattccatggtattgccccttcaggacgaccatcccgtcgcccgcatcgccggcaatgaccaggtcgctgccgcagggcttgaaaaatttctccagccgcggatccccgtacccggtcaggacggattccatcgaagcgttcatggccgcctcgttccagttcaggttgatctcgcccagcggattggaataggtacccgaagtcttcacggcggcattctccatactggtctcgatcacccctccggccgcctgcgccgccttccggaattccgcacgggccttttcgggcgcggcaacggagatacgcacggcaaggcgcatgcgcagggagttggcaaaacggagccaggccgcatagcttccgtcgagcagcaggtcgaacctggaaaactcgccggcctcgggctgccccccgccccaggccgccaggatgtccgccgcctcgtccaggtcgtcgaagaagcagccgtagacctgctgctggctgtcgggcacgtattcgctgccgcggtcggcgaaatggctgtatatcaccggcccgtagtagtccgtcacgcggtgcatggccaggactttaagtatcttggctatggcatagaacggcggcatcttctcgcgtgccgtctgctccagccggtaaatctggggcatgacataggagtaggtgaactgccacatggcgctgttccagccgtcctgcaagttgtaatcggagttgtggctgccgccctgcagcggtttgggatcgtgcatatagcccgagaacatatccgcattgaggttctgcgtcatctggaacggccagttcttgcccttgccgaaatcgtagttgaaataaatcccctgctgaacgatctgcaggcggtatccgaagccgttgtcgtcagcctcgagctccccgtccgaaatccccgagaggtcgtcgttcagttcccggaaattccccgtgcaggccccccaaaaggttgtgcagaatgcggcgaacagatatatgtaaaagcgcttcatgattctcagaactccagttttatgttgaagccgatgctccgtacggtcggcatgccgtagacgtcgatcccctggttgtcgttgcccgtcgaaaggacgagatcgggatcgaacggcgcggcattgtagataaagaagaggttgcgggccaccagcgacacggtcatgccgctgaatacccgcgtacggcgcatcagacgctgcggcaatgcataggacaccgccagttcgcggagccggatgttcgtcgcatcgtacatgtaatactcggtcacacctgcgcggccgccgaccagtttgtaaaaacccttcacgtcgtcgatccgctgcccttcgagcatcacgcagccccggtcgcgggcatcggccgttgcggccgacaccccgtaggaatccaggtcggccatcgtctgcgacaggagccgtccgccatagcggcagtccagcagcacggacagcgacatgcccttataggagaacgtgttgccccaggagagcgagaacacgggattggcattgccgaccttcaccgtattgccgtcgcccacggtgcggggcaacccggcggaatcgccttcggcctcgtagacgatcctccccgttgcgtcgcgctcgaacgcccgcccgtaaatatcgccgatcgaacctccctcgacgagtttcatggcataggacgatgaaaaactcgacgggccgtagacatattcgcgcagctcgtcatggagttttatcacgcggttcctgttatgtgcgaagttcaccgtcgactgccacgtcagcgcacctccgtagaccgggtaggcgttcagcgacacctcgacgccctggttctcgatattgcccgcattctcgtaacggtaggcatacgcctcgcccgaaagggccggaagcttgaagaactggttgtgcgtattggtcttgtagtaggtcaggttgacgcccagcctgtcgtcgaggaacctccattccaaccccgcttcgagggcgttggtcatctccggcttgaggtcggtgccgggggcggcgtcagcggcattgatgccccctccggccgtgacgtgcgatttgggattggtgatgaacatggggatgtcgttccccacgcggctccatgtcaggcgaaccttggcgaacgaaatccaccggggcagttcgaacatcttgccgatcacccacgatgcgccagccgaataatagaagaacccgctgccttcgtgcgaggtgtaggcgagcgtcgatgcccagtcgttgcgtcccgtgacttcgaaattgaggcttccggcatacttgaacgacgccgtggcgaaaagcgactgcgtctggcgccgcgcatcgatctgttcgtcgacataggccgaaccgttcatgacgatattggcgacgttgaacacgttggggaaatagagcgacgccgtcttggaatctatacgcagcgaattgaccgtccggtcgttcagccccgcacctgcggtcgcgctgaactcccagtccggggagaggcgtttgtcgaacatcgccagcagttcgccgttgaacagggtttccgagtagctgctctcgatatagcgcccgttggcaccggccagcgcaggcgccgtcgaagcatagaatctctgccgcaccttgtcattcacatagtccacattgccgcgcgccttgagccgcagccagccgttcaccttccagtcggccgtaaacgaggccatgacccggttgcgcaggctcctgctgcggatgcggttgacgatccagtaggggttctgctcgaaatcgtcgctcggggcgatccagtcctggacattgagtttgcggccggcgtcatagacctcgaaatgctcccggtaaggcgtgatatccaccccgcgggggaagcggtaaagcccgaccagcgggttcatgtagaaaccgcccggcacgggtttgtcctcgaccacctggcgcataaaactgatattcccgtcgagcttgagccgttgccggaaaagcccggtcgtggtgcgcaggttgaagttatggcgcatcaggcggttcgaacccgtgattccccgctcggccgtattggcataggaaaaatagttctgcacctgttccgacccggaggaaaccgagaccgcattcatcgccgtgatccccgtccggaaaaagtcgcccgcattgtcgtaggtcttcatccgcgcacgggcgccccagctttccaccccgccgctcaccccgtagcggttctggaacgcaggcaggctgaagggggactggagcgtaaggttcgaagtgaacgtcacgggttgctgtttgcgggcattgccctttttggtcgtaatgaggatcacgccgttggcggcctgactgccgtacaaggcggcggccggggcacccttgaggatcgagacgctctcgatatcctcggcattgagattcgagatgccgtcgccgccgtcgcggttcccggcatcggccacaccgcctatggccgagtaggcctgctcgggggtcgaattgagaatgggcataccgtcgaccacatagagcggctggttgtcgctggcgaccgaccgcacgccgcggatgcttaccttggccgaagcgcccgcacccgacgagttcttgttcacctgcacgccggccgacttgcccgaaagcgacaggatcatattgggatccttcaccccagtgagctgcgaccccttgattttatcggccgaataggtcaggtcggcatagttgcgttcgagccccagcgccgtcacgatcacctcggcgatcgccttcacatcctcctgcaacacgatttcgaattcggtacgggttcccgtcccgatactctggtcgatataccccagacacgagacatcgagcacggcaccgggcaggacggcgatcgagaattcgccttcggaaagggtcgcgaccccgttcgaggtaccccgttcgacaatggtagccccggcgacgggatcgcccgattcatcggcgacacggccgttgacaaccaccttccggggcggggactgggcatgcgccgccatgtccggcaacaggcacaggcaggcaagcagggccgccacgcacttccatcccctgtgcagcggccacaattttctcagacaatacgtaaaaggcatcactattatggaacaattaagtacaaaattataaaaattggcatataaatcgtataataaatggaaattttagcaactattccgactatccggcattcaaaacagcccggaatccccctttgcacaacaaaatgcagcggggcatttccaggatgccctccggatgccggcgaagatttcggggattatggtaacccaaaccggaatccgtataaccgcaattccgcaggaaacggtatctttgcaccgtacaaccagtgggaaacgatatgtccagcacgaaaataagacgcataatgggaatcatgacaggaatcatactcgccgccgcgatcgccggcctgataaccctcaacctcccggccttcggacgcctgccgcggggcagccggctcgaacgcatcctgcaatcgccgaactaccgcgacgggcagttccgcaacctggaagcaagcccgatgatgacgggcgacaaaagccgcctgcggggcctgctcgaattcctgttccgaaaaaaggaggggctgcgccccgacgcggccgtcccggccctcaagaccgacctgcgcgcactggatcgggacagcaacctgctggtgtggttcgggcactcctcctacctgctccaggccgaagggcggcgtgtgctcgtcgaccccgtattccgggccgccgcaccgttctccgtcctcaacaggcctttcaagggcaccgacatctaccgtcccggcgacatgcccgacgtggatttgctcgtcatcacgcatgaccactgggatcacctcgactaccgtacggtcaccgaactcaaatcccggatcgggaaggtcgtctgcccactcggcgtcggggagcatttcgaatactggggtttcgacccggagaaaatcatcgaactcgactggcacgaaacggctgcgctcggcgacgggttcgcggtgcactgcctgccgtcgcggcacttttcgggacgcggactcaatcccaaccggacgttgtgggcctcgttcctgctggaaacctcggcacggcaggtctacatgggcggagacggcggttacggcaagcatttcgcgcagatcggccggcagttccccggcattgacctggcgatcctcgaaaacggacagtacaacgaagcatggaaatacatccacacgatgcccgaccaactttcccgggcggccaaagagctgggtgcccagcaggtcatgaccgtccaccactccaagttcgccctcgccaaacaccgctgggacgaaccgctggcgaccgaagcggcactggccgcagacaccgcactgcatgtactgcgccccgagatcggcgaagtagtcccgttgcggaatgcacccgcagccgtccccgtaccctgagcccggcaaccggagcccggcattccggccggtaacgggcattcctatttcccggccgcccgcagggcagaacgcccagccccgcagacaggcgcccgcctgccgcgaaaggaatatacggcgtacatcccagaccaaccgtccgccgatcgaaccgtcgggaactctggtatgtaaattgctttaaggaagggaaaatccgtatgctatggaaaatttctcaaccctgatcgaaaattcgaaacgcgccgtgcactattggtggctgctgcttatcatcggcatcgccctgttcgtagtcggcatcctcgtattcgtctaccccacacaaagttacctgggcatgtcgctcctgttcgggtggctgatgctgatttcgggcatcctcgaagtcgtactctcgtcagtcaacaaacatttcatcaccggacgcggctggatgctggcgggcggcatcatcgagatcgtgctgggcatcatcctgatcttcaacgtcgcgctttcggccgctacgctcccgatattcctcgggttctggctcatgctgcgtgcgttcggtgccatcgggctcggcagcgacatgggcgccatgcagatcgccgggtcgggctggactattttcagcggcatcctgctgctgctctgttcgctctggatccttttccagccgctcgtattcggcaccacggccgtcatcgtatgggtcggcatttcgctgctctttgccggggtcgccgcctgctcgctctcactccagctccaccgggcgcaccgctgcctcggcgaccgctaaagcggccacgacatatcacccaaaagcccctgccgcggcaggggctttttcgcacccggccctgcaaaatcctgaaacaccaaggggaacagcgcgccgatcgccgcccgaaaacacccctccccgaccgccccgataaacaaaggggaatttcttcgaccagagatagaccgcaaaaaactttctttttgcgatcttttttttattcttattttattatttttgcatctagcagcaaaaaaccaacccaaaaagaaatccatgaaaacatcaatcccccggacattgctgacagccattcccgcactggccgcagccggatgtacggaaaatccggctccgcgtcccaacgtgatcttcatcctgatggacgacgcaggctacggcgacttcggttgctacggacagcaaaagatcgagactcccaacatcgacgcgttgagcgaatgcggcgtccgcttcacggacatgtactctgcggcaccgctctcttcgccggcacgctgcggcctgctgacggggcggcacgccggccatgcgcagatccgcgccaacgacgagatggaatggcggggcgacgtctggaaccacgaggcgatgctgcgcgattcgacgctcgaaggacaggccccgctagaagccggcactccgacgctcggctcggtcatgcagcaggccggatacaccacggccatgatcggcaaatggggcgtcggaggccccgcgacggaggggacgcccaataaaatgggctttggcacctattacggctgcatttgccagcggcaggcgcacacctactacccgcccttcctgtggcagaacgaccggcgcgtctacctcgacaacgaactgctgccgccgggcacgctgctcgacgcaggagccgacccctacgacccgcgcagctacgacaaatacacgcagcgcacatacagccccgatgccatgtacgaccaggtgctcgggttcgtgaatgcaaataaggagcgaccgttcttcttgatgtggacgacgccgatcccccacagcccgatgcaggcgcccgatgccgacgtacagtactacgtgcgtaaattcggcgacgaacagcccatcgagggcaagggttatttcccctcgcggtggccgcgggcgacctatgccgcgatgatcacctacttcgaccgccagataggcgggctggtcgccgaactcaaacggctcggcatctgggaaaatacggtgatcgtcctgacgagcgacaacggcccggcgtcgaactcctgctcgtcgagcgagtggttcgacagcgcccacccgttccgcagcggcaagggctggggcaagtcgtcgttgcgcgagggcggtatccggatgcccttcatcgtggcgtggggcggcaaactccgcccgcaggtgagcgaccatgtcggttatttccccgatgtgatgccgaccctttgcgaattggccggggtcgagccccccgcgaccgacggcatttcgttcctgccgaccctcgaagggcgcagacaaccgcagcacgaatatctctattgggagttccccggcagcaaaggctgggtagccgtccgctggggcgaatggaaaggtttgctgcgccgcgtgaaagaagggaacgaccgctttgaattattcaacctgagagacgacccgcgcgaagaacacgaccttgccgcacagcatcccgagatcatcgaccggatgtggcaattcgtttcggcttcgcataccgaacccgctaatccgaaattcaggatggagatcggccgcaaataagaccggtataaaaattccgggaacacgggcagggccgcgtgaaaaagcaccgtcgaggtgctttttcattcgtagcggagacgaactgtcgcccggatggagttgccatgcccgccacccgggatccataggcttacaaggcaggaagacaccgtctaccggccgctgcccgggcaggatgaaacccgcattacgagtagcggacgtttgtaaccccggccgcagccgtggcgcgggcgaggtattcctgcaggatcagcgcatggttcccggccgcattcttcgaagcgtacagcagcgtgaccgtatccttaccggcgatccggcggacgaagtcgcgcacggccggcgaggagcgcaattccccggtatacctgcggcggaactcctcccaccgctctgcaggggcggcatggaaccatgcacgcagcccgggggtcggggcgatctccttggcccacacgtcatagcggagcgcctccttgcggatgccccgcggccacaatttatcgaccagcacccggtaaccgtcctccggagcctcggattcgtaaacccgcttgatacgtatccgtgtcataacgatcggtttttacccggacgtcgcaaaaaacattccggacaggatttccgcaaagcccgcaccggatgcagggcattaaaatgaagggcgcctcccggcgcccttccccatcaaaaattaacccttaaaaattatctccatttcggaaaacctccgagaggtaatggtgtaaaaagaaaagatctgcgtcaccctggacaacctcccgcatcataagatcttcgtcatcagagatgccttcgtctgaaacctcgtttttgtcaatatcctccataggcatctaatattttgctttgtactaactaaacgcccgccccatggaaatattgtgcggaatcagcataaaaccatatttttttctttgatcatccgtcgcaggttgataagcgcatagcgcatacgccccaacgcggtatttatactcacgtcggtttgttccgcgatatccttgaaactcagaccggaaaagtaacgcatcatcaccacctcgcgctgttccggaggcagcagctcgaccaaagcacgcacgtcgcgctcgatctgctcgctgaccatcgcgtcctccacgttccgttcggcgaaacgcagcgaccccagtacgtcataacccgcctcagcctcggtgacggtcttgttctgccgctgagcgcggaagtggtcgatcacctgattatgcgcaatacgaagtatccacgagagaaatttcccgttgtccgtataacggccgtcgtcgataacccgcacggctttgatgaatgtttcctgaaagatgtcctcggcaacgtcacggtctttgaccatcatattgatgtagtcccgcacacggcggctgtggcgttcgatgagcttggatatggcaccctggtcacctgaaaggtaatgattaagcaatacctggtcacttaatgcttgtacgttcatactcttttctcctaattatagttataaagagtagaatttttcccgataggctatccttttaatgttgtatgtgcgtcagtttcgtgtgttcgggcttttgaaacgatggtttccggagcctttacgatggcaagataaatacttttttccgaaaaaccaaatttctttctactccgccggggaaatcccggctgtttttccggttgctgaatttacaaattccgtgccggaatcggccgcagccgtatcccgttagttatcagcaaaaaaagcggaataacaagaaaaaaaatcgcggacaggagatacattttccggggccgtcaggggcaggaaggcgggtcgccgcccgggattccggcttcggcgggacatttcacgggttccacatggatcgagatgatcgtcccctggccgaaacgcgcccgcaggcggcgttcgatatcgaccgtcagctcgtgcgaacgggcgacgctcatcgccccgtccaccctaacatgcacttcgacggcaatcgcggccccgatacggcgcgttcgcaggttgtgcggctcccccacctcgggatcggccgtaacgattcccaaaatctcctgctccgtctcgtcgggcaacgaacgctcgagcaattccccgagccccgtgcggatcaggtcgaaagcaaccttgaagataaagactgcgacgaccaacgctgcgatgggatcggcgatgcgccaccgctgcccgaggaaataggcacatccgatgcccgccagcgtccccagcgacgaaagggcgtcgctgcggtgatgccaggcattggcgaccatgctcgggctttcgacccgacgcccctcacgcaccgtatatcggtataatatctccttgatgacgatcgacaccaccgccgcggccagagccacggcgcccgggcggggcaactccccgccatcgacgacgatgcggatggcgcggatgctgctgagcaggataccggcgccaacggccgccagcgccaggctgatgatgatcgtagccagcgtctcgtatttcccgtgcccgtagtcgtgcccgtcgtccctgggtttggcggagatcttcgcgaaggcgatcaccaccacgtcggtagccatgtcggaacaggagtgcaccgcgtcggcgaccatcgccccgcttcggcccacgatccccgccgcgaacttcatcgccgtgaggacgaggttgaccacgaacccgacgaaggtcacgcggtaaatcacgcgcttgcgtgcttcggcttcacaggacatggcactattcgaaatttgcaggataagaagacaattggtatgccagcgccttcgccatccggtaatgcccctcggcattgggatggagacggtcgctctgcgcatcgtggaaataacgggcatgggaatccgcattgggataaagcccgcagatgctgttcaggtcgatgacggggacggcccagacgttcgcagcctctttgaccgcatccacataggcatccgcatagaggccgaggctgttgggataggattcgtcgggctggatgttgttgtccccgaaacgggcatatccccggtggatgggggtcagcaggatcacctgcttgtccgggaaattcgccttcaggtaggacattgcgatattgatacggccacggaaagtatccccgtccatcgacaacgtcctcctcgtccggagctccgaccggaggccggacacctcgacaggtacctcaccggtcgtataccacgtccccagaggcgtcccggaattgtaatcgttcgtcccggcaaagatcaggatcgcgtcgatgtcatcgccgcgctcggccctgagtctttcgcactgccccggcacgtcccgccactgctggccgttgatcccgtagacgaacggcacgaggtcgagcatctcctgcaaatactgccaatagttcttcgtcgtaccgacatgcgccttgtcggtgatcgaatcgcccatgaaagcgactttccgtcccttccactgtgtacccgcaaccggcagcggatgatccccgtccccggcataagccgggcacacggcggcacagaagcccagcagccacaccgcgcacaaacatacagaatatcgcatacgtccaatcgtttatagtattaccggggcacgccccacaaaataacggaagcccacccacttcgggggaagggcacaaaaaagggcgaacggactgcctcggcacccattcgcccgttaccggcggaaacgcccgtccgaatccggccctaataactgcgggcgaagagcacccggcggtgcgacggcttgcccgagaagacgcacgtgccctcctcgtcgggcgcatcgaacggaatgcaccggatcgtagccttcgtggcatccttgatcgccacttcggtttcgaccgtcccgtcccaatgcgcgagcacgaaaccgccctttttgtcgagcacctccttgaactcctcccacgtgtcgaccctggtaatcatcgactcgcggtaggccagcgccttgctgaaaatattttgctggatttcggacatcagcccttcgatgcgctccacgagcccttcctgcgggacggtctccttttcgagcgtgtcccggcgcaccaattcgatcgtaccgttctccatatcgcgcggccccatcgccagacgcacggggacgcccttcagttcgtactccgcgaacttgaagcccgagcgcacgttatcgcggtcatcgatcttcacgctgatacctttggctttgagctgctccgcaatggccccgaagcgggcacggatttcggtcagctggtcttcgcccttgtagatgggcaccatcaccacctggatcggcgccagtttcggcggcagcacgaggccgttgttgtccgaatgggccatgatgagcgcacccatcagtcgggtcgaaacgccccacgaggtcgcccacacatattcgagcttgccctctttgttgacatactgcacgtcgaacgccttggcgaaattctgtcccagaaaatgcgacgtaccgctctgcaaggccttgccgtcctgcatcaacgcctcgatggtcagcgtatcctcggcgcccgcaaaccgctcgttgggcgatttgtggcctacgatgacaggaaccgacatccactcttcggcgaatttctggtatacgtggatcatcttttctgcctcctcgatagcctcctcgcgcgtggcatgcgccgtatggccctcctgccacaggaactcggcggtacgcaggaacaggcgcgtacgcatctcccagcgcacgacgttcgcccactggttgcagaggatcggaaggtcgcggtacgactggatccagtttttataggtgttccagatgatggtctccgacgtgggacgcacgatcagctcctcttcgagcttagcatcggggtctaccacgacgcccttgccttcgggatcgttcttaaggcggtagtgcgtcaccacggcgcactccttggcaaagccctcgacatggtgcgcctccttcgaaaagaaggacttggggatgaacagcgggaaataggcgttctgatgccccgtatccttaaacatcttgtccagcgcatcgtgcatcttctcccagatggcatagccgtagggtttgatgaccatacatccgcgtacggccgagttttcggccagcccggccttcacgaccaggtcgttgtaccattgcgagtagttctcgtccgacttcgtgaggtctttgagttcctttgccatatatctttgttttttattttgtatcagcctgcaaatataataaaaaaataaaggttcgtcacacggacgaacctttatattggcaggcaaagcctcagaagcggaagccgagcgtcatcgagatataatgacgcgtctgtttggtgtcgtacaggccgctgtaagtcttcatcccgccgccgttctggtatttgctgaagaaaagctcgtagggcgtctgtttctcggtcacgttctggtaggccacgtccagcaccgtattacgcccgaggttgatcccgaggccgcccgtaatgtagtagctctcgtagacgctcggcgaattgtaatattgctgcctgtccttgaacatcgaatcggtataaccgccgcccaggcgcacggcaaagatcggcaggggacgcacttcgacgcctgcccgcagggtattcgtacctttgtaattattcttgaactcggccttgtacgcttcggggtggaaatcggcgccttcgggcacgttcttcacgcggatgccgttgtaccactcgcgctcgtagtcgaccgacacgatggccaggttgccgaacgtgtacgaagcgccgaacaacaaccgcgaaggcgacacgaaatcccagctgttgccgccgatatcgtcctgccgcggcgtagaatcgaaattgtactggtcgtcttccgtcttattgttgatcaggtgcgattcgatgtccgcgcggtagctgcggtcgagccagtagtaggtcggagtgtggaacgccacacccacgcgcaggccggccacggggcgcacgatgacacccagtttgaaatccacgccgctgccgtcgatcttcgattcctgatagaggctcatgtaatcgagctgcgcattgagcggggtaccgttcttatcgaccgcaggggtcgcatggccgttggcatcgaaataaccgtactcttcctgataggtcatgcccaccttcttgtagacgctgcgtatgccgatcgtggctccgacatagacgacgttgttgaaattggcccccatcgaaacggcgaattcgttgatcgagccctggctcacgacatccatcgagtgcaccaccgaagcgttacggccgatgcagtcgggcacccactgcccgcctacgtcgctgatcagatagccgttatagccaaggatggccggccagtaccagggattgtaattgtagcccagattaccgtccttatccgggaaaatcccatcctgcccgagctgctgcccgaagacatcggcgatggtcggcatcagctggtcgggcttcgaagggtcgtaacgcgactccgaggagaacgaatagcgggtattgaaatccgcgatacggttcatgccgataccgagcgtaaggctcgtgagcgggctggccggactctcgaaaacattgagcgccacaccgacgttggcaaaagcgaagcgggtcttgttattgcccacccacgacggcgcgccctgcgtttggccatgggcgaccgacagcagcggcgtgagcgagaactcgttgcggcggtacatgcccaatccggccgggttgatcgacatcgacgaaaggtcggcgcccagcgaagtgaaagccccgcccatccccatcacgcgcgccgtaccgaacggatgcgatcgggaaagcgcggcgaaatcggtagacatcatcaggtcattgttgtacgtcagtcccccgaattcgaggttctgggcctgcaacggcgctgcggccacacaggccgcaagcaatatcatgatcttacgtttcatacactatctctgttttatcgttgactaacgcccgccgtaaccgcggcttccgcccgatgaactgccgccgcgcgaaccgccaccaccactataaccgcctcccgacgaaccgccgcgcgacccgccgaagctgctgccgctgttataactgctgctgcgcgacccgctgtcgtaggacgaacgccccgagttgctgttgttgcggttgttattccacgagttgttgttccaggagttattgttgttattgcggttgctgccgccgttgtaaaccgaactgttgcggttgttgcgtccgccgctctggtaatacgtcctgccgctgcccgagttgcccccgcgcgaagtggtcgtaccggtacggtagcccgaattgttggttccgcggtaacggctgcccgaagcgacattccccgggacatagcgcgaggggcgcccgccgccgtcgaggcggtaattatgcggcctgtatgcccagtgatgtccgccgtgccatccgggcccccaacccgggccccatcccggacgccatcccggcccccaccacgggtcgtaccagggattgtaccagccgttgaagccgaagctccagccccagctgccgaacgagaacgacgggccccatgctccccagtagggacgtgtccagccgtaataccacgggtctacataaaccgatccgccccatgtcccgaacatcgaagtgatgtacttgggttccacccagacctggtcaccggaaatgatgatgttgtagaatgccgggtcgtaggccgtagcataggtgaaactgccgccatagcggaaattatagtaactcgacggcatcctgtatgtcggcgactcgaagcccctcaggcgccgtgcataggcgctttcgtacgtatcggctacgatatcctcgtaggggttcgaactgtattcgtaatattggttctccgcagcggcggcctgcgcctccgcgatacgcgcctcccattcggcccggcgggcctcggcggcggccttttcggcttcggccttcgcctgttgtttccgggcgatggcggtcttatcgtgcagcgagtacaaatcgtcgttggcgtatcccgacgatgcgtaataggccgacgaacagccggccagccccgcagacaggacaagggttccgattaaaattttcaactttttcatagcgcacagtgtgtttgcgttagttcctcttccatcagtaaacgaaaaccgtaccgaatttagtatcgtttctcatctatataaatggacaggcggcaccgatactgcattcttcctccagatacaaagataggaattatttgggaaaagcacgaaaagagccggatatagccgctttttccctaccggaagaaaaaattttcgcacgaaaatgccgagaaacaaaaaatatgtctatatttgcagtcccaaacggaaggttttttccgtgcggaatgtactggagagatgccggagtggtcgatcgggccgcactcgaaatgcggtgtacgggcaactgtaccgggggttcgaatccctctctctccgcaacaaacgctgaaaatcagcagattgcaaaacaaacacccagttttacacccaagaatgtaaagtcggtgtttttgttttatttaagataatacaaccactacataataaaagagtagcgatattaaaagaatccgatgagaaaagactaatatttatctatccattcagtttgatttttcaggactttacatcgtcctgaaagtatttgttattgtattccaacgtcaggagtggattataatacaagttttttgtgtggatagaatttcgttttgcttaatgtacgaaagtacttatctataaacgcatgaaatattagcacaatgaatcattggaaatcaactttggccgtgataggaataggccaactcatatctattttaacaagtacgattgttggcttctccattattttttggattagcaacgaatttaaatccccgacagctttatctctggctattttagctggatttttaccacaatttgtattaggcttgtttgccggggtctatgttgacagatggaatcgaaagaaaacgatgttttattcggacttgttcatcgcgttctgtaccctatgtctttttattgtgataaccaagggttataaagacctttcttttttttatctattgactgcttgtcgttcaataggcagtacgtttcatgcacctgctttacaggcaagcatccctctactggttcccaagcaccatcttgtcagggtatcaggtttgtaccattccattcaatccttcagtgaggtgatagctcccgttgtaggggcaagcctcgttgtttggcttcccatacagtatattctgctcatagatgtgatcggagctgttgctgcttgtctgaccttactttgtgtccagattccttctcttcaaaaaacgaaagttcttccagatttcaaaaaagaactgacggaatgttggcataccttgcggcgtacaatgggcattttgcctttattcgtatgctttacgctggtgacttttgtccttatgcctgtttttacgttatttccttttatgacgcttctgcatttcaacggaaacattttgcaaatgggagttgtggaaatgggttggggctcaggggcattgttgggcggtttagtacttgcctgtaaggctttgaaaagcaagcaaacattagtgatgcatacggcttatgtgatattgggattgtatctgattagcgccagttatttaccatcaagcgcatttataggttttgtttgcctaacatttacaggaggcatagcctattccatttaccatgcgcttttcatcgctattattcagcagaacttggcttcggacatgcttggacggactttttctctcatctttagtttgagtacctttccatcaatgctgggtatcgtagcttcaggatattgggtggaagcatggggtatcacatccgtctttatgatcagcggatgggttatctttctgattggagtgggtgcaaattttatttcttcaatcaagcagttggataattacgcatagtattatttattaaagaattattatatgacaaagaaagaacacactacgattacagagttatttcaagttttggacttgttggaaagcctggacatgcagttttggttggatggaggctggggagtggatgtcttgtacggacagcaaacccgcttgcatagagatattgacattgattttgatgccaattatacagaccaactccttgatcttttgcaggagagaggatatcaaattgaaacaaattggttgcccacccgtgtggaactgtatagcaaagaattaggctatattgatatccatccttttgtcttgaatgcggacggcacttccaaacaagccgacttggatggaggctggtatgaatttcaaccggactattttggaacagcagtctttgaaggcagaagcatcccttgcatttctgcaaaagggcaacaagtattccattcgggctacgatttaagagagaaggatattcacgatttatctataattaaacaatgtataacaacaatgagcctaacaattagataagaacaagaaaatgacagaaaaacaaattgtctggtatatcttacttacagaagtaaagatagacagtgacacccagtctgtcacatccctgagtgtagctccattggcagtcttgccggaattccagcgtaagggaattgggggggggatgttgattcagtaagcccatcagagggcagcacttttgggttacggcacagcagtcgtattggggcataaagagtattatcctcgatttggctatcgcaaggctatcgatttaggaattgaatttcctttcgaagtctctcatgaatattgcatggtggctgaattaatacctggagctactgagaatgtgaaaggtatggtttgttatccaactgactttaaatagtttaacaagtaaaattcattatataactcggactgggtatttcaatttcccagtccgtattctgatagtacttattcaattggaagattgtgttgcttcaagaatgaaagtttatcccaataccctctttgaaagacgattttgttatcttttacatgaaaaaatccgcatccacgaagtccaagagagtctttccattccatgatagcccattcgccatcttcaaaaatattttccaccatacaaaccattttagcagtggcaaattcattcacaaacattttgtagattgattctttacctattattggttcgtttgcgacttgatgatttactgcattagtagcatacagctctgctatatgataagcatctgctttgttaaagcaatctatccatttttccaaaacttctttaggcttcattttttataaattcttaggattttgattctgtaataaaaacaatctgtttggatgcatagatacttgattttattaataataggctattctatattctaaatcctctggatttttgctctctctgcaccgagttacgtagattctgctgtaacttttcccattgttccttaaaccattgtactatgggttgtcggtttatggtcagcataagcttaccactatccatcggatgtttctcaaccctaaaaatatcattcttgatgtcaaatttccacctgtgttcttcggaataaattttgccactacattgtatggattctttctttgtcaagaggttttctatcatgtctttggtaaacccgataacagcgcataatttttccattctcaacatctctttgaacatgggaaaccatttgtgggctttttcaagcaaggtgctcaatcgtgatatttccttgtctttggcttcaagttcttgattatgtattctttgaagattacgaatttgtctgctatgctgttcctgtatttgttgtatctgaatttttaattcatcagtagctttgtcccgtttggtaatttcctgatgtagctgctcgatgtgatgttccagttctttcagcttaccgcttccgaaaagagaacctacaccgcttgctatggcggtagcagcattggtggctgttttctttagtttgtccgtgcgtatctctgcttttacctgtttgagttcctgttcggcaaggcttacttgttgttccttgtgtcgcttggtttcctctatacgttgcagttcggctttctgcttctcaatgatgaaatcatttcgttccagatgctctttacctgtgacagcttttgcctgtccacgttccatcaggagaatatcggaagcaagggtctgcatggttgccatatcctcgtcattgagctttcggctctttccagtttcatggttcatccagtcgaatacgacatgagcatgataatttggtttgaaccatctgttaccgacttggaagctctccttgtcttctgcttccggctgaccgttcagccaatgcccttcgtctttatgcaggaaaatctgtagcggagtgatgccccagcgtctttggcactcttcaccgaatttgcgtacatcagccagtgtggtgtccggtctgataagcaatactccttcacggatgggtgagcatcccgccaccttgataatctttccattctttcccttgcgttccctttccttttcctgcatggcacgtccggtcttttccttgaccatttgcttgatattgtcataatgagttcgcagttcgggagtgccgaagtcgggatttatccactgttcgttatcggtggaaagttcgggaacgacatagattctggactccccgatattacgcatatactcggcagtccttcggttgtgtgcctcgctcgatgcgatgttgcaaggcttgatatgtatgcttgattttgttgccatagcttctttcctttgtttacaattgatttactttgctcgctttcgcagaggggttcttaggggtaacccataagcggagattgcaaagagagggtcactctttgctcggggttctcaggggtgaaacgccctgagtgggtcattagggcaaagccctaatcccctcgggagagcccacaactacgaaagcgaagcgtgtagttatagtgggctataaccggaagcctttcggtttcttggatagcgtatcattcctcttttcgacagattgcgcttgctctttcctatcggctattcgtttctgtaaatattcgttcagatctttacatccactgtagatttgcgaggcgtcacgtatataccgggtagcatcatactcctttcggatttgctgtattgcttccattcctgcacggtcattgtcaaagaaacagtggatgcgctcatagcttcccaacggatagagtgccttgggaacattggctacggaattaagaactatgtaatcctgtctgtcgaagtcgggtgattgcggacagctttccagccttaaagtaagaaaggaaaggtaatccataaatccctcaaaaacgtaacatgtactccttggttttcctgactgtctgatatgggatatttcttttggtgcgatacatcccttgaaatatcggttgcgaatttcatatccgcctgatatgttcggaaaggcaatggcgaaataccgtttgccgttgtgggtgaaacgggcttccttacattctcttttcgccagtgccgtgtttatccctctttcctgtaggtaggcaagcagggcaggagaagccagcagcacaatgtccaattgctgaaaactcggttcggaaaatgattgcttgccaaaagagaaagacacgggacgtatgtgtggtatctgttcttcgattttctgtagaagataaggcacatagtcggaacagtagagttcctgtgccagtgcgatgatatttccacctttgccgattgcgaaatcataccattggttgcgctcggtatttactttgaacgagggttctgtctcttcccgtaacggggatttgtaccataggttaataccttgctgcttgacgggagaatatcccaaactgtacagaaaatccgctatcctgatttgttttgctgtctgtatatccataataagatgagtgtttgaataatggttggaatatttatttctcttttcgcccgtacttttttatgaagtacggtctgtataatcacttcactttatcttcgtatatataggatacggtaataaagtgaagcgcttttctattccctacaaccgcttcgctttattcttaatatatagacctgccgaataaagtgaagtgattacaggttatacggtctaatagtgaaagtccggcttgaacgtgtatttcctgccgttctcctgtactatcatccgtttgttccggagcatggtgataagtgataccgctttttgatggttcagttttacacctaccgacatatatgacttgattaaggaggtttccagatccttgtagccgtattcctctttcagtccgaaagccgcttccagtgctatgcggtgctgctgttcgctaatatgtctgtaagggtcaaacttttcctcttccggtcttccgggtttcttcgcttcgggtctgtacccctctatgagttcaggcaatgcattgtcgttgatacggaaagcgaaaggctcgaaatccattgcacggatgtgcatggctgaaacattgcttatatccccgttgctcttgtccttttccaccagcagaacggtttccgccttgttgttcagctccgtaccgatatgccctcttgcgttttcatcgcctttgttctggtggagtatcgtatggatgtgtatctgcctgtcatccgtccactgcatcagtttggatataatgcgtgtcgattctcccggactgttgatgtcatataccatatcacggatgccgtctatgattacaagccctatgtccggtgtattatagatagcctgttcgacaatcctgatacgctgttcgggcgtgtatttcctcaaagcgagaaactccagatgttcattgtccctgtcatcaggaagaccagcaagccgtaaaatacgtttcatgactttcagacagtgataatggctttgttccgtgtccacataaagaatcttccttttttcttccggtagttccgcaacataccgcagtaccgtaccgtttttcaatgcggcggctacgatagccgatacattgaaagtctttttactcttggctttgccgatggatgcactgaaattgcccagtgtaccaatgaccgaaccttgcacttttagaatctcaggtgctttttcgtagattttcgacagactcaggcgtgaagcttgccaaaggattattgcctgttctgccgaaatctcctttatttctttcatatagtccataagcatacctcccattatttccgtcctcctgttttcttcccggcaagctcaagagccaattccgcatctacgataatcttgcgccctatctgggtaatcgccttgtctatcttaccgcttttctttatgcggttggcagtgggcagactgcacccgaacagtttggctataccgagtattccgtacacatacttcttttccgtgtctgtaacgggttgcggcaatgcttcggcctgacctgaagcgtgcttactcaggaatatgaattcttcgcctgtcatctgccagacgggttttgataataattcttggatatttgtcatcgtccaatctatttagtcgttaaacaatcagccctgcgcactggctgttatttctgttctcgaacgatgcaaaattaggtagggttatgagtggtaaggatggggacggtacaaactgaatatcattgtatcttattgaatatcagaaaataaaaataccactcaaaaattattttgagtggtaaaagtggaactttcgtaaagtatcaggatatattacggattatctgaatatatgttccatttccttggcgaaattttggttgctgtcactggggaaatctgaaacaggctccttgtacttggatttgtagtagctgtcgtcaatatccagcagtttcagtattctgtctttccatttgtccctgtcctgtttggagagtttctcgctcatcaggaatatcagatagcatacacgtattttctctctcggttttattttcagcttacagttgcaggggtgaagattcatattggcatagaaatccagtgcggaaatttcttcgaactgttctcctatgcacacctcatgaatgagcgaaagtaatttcatgctgaaatattcctgttgttcttctgtcgtttcctgctgactgattggctcgcttgatttattctcttgctttccgtcaggaatgtatttcttcaatatatccagaaaaaggcagctttgacggtatatgtccgcacaacagttcttcatgtattggaatgcctctgttcttgcagccttttgctgatcatagagtttgttcagtttggctttttccctgtcatattcagccttgcagcgttcatattctttctctgcctgtttttcctcttcggctgtatgctccctgtaaccaatggaatcatacctgttgttggcttcattcagcggcttgctcagacttcttgtaacatccagctgggcttcaatttcctgagaatacctttccatgtgctgatagcaagcacgttctatggctctgtcacttaacgggcgtatctcataagcctgtatgctcttttctatttcagttttcaggctgttgagtatcaaggtgtattgctctttttgcttgtcaagcaccagttcaaggatagcggcttcaaaggatttcatgtcattatactcctgatagaaatccgatatgaatttctgcctgtcaaaagaaaaagcgtaattatctatatagtctctgtatattctgttgagttctccatattggggaatcatcgtctgtatctttcctgccatatactttatattatgggttcttgtccttgtcaaggaataaggtcagttcttcttccacttcttctatactcggtagggcagatttcagattttcgggtactgccttgctcaattgatagtcgctgatacctatcggctggtcatatccagccaaggcatattgtgccacgacctcatccttacccctgcacagcaaaagaccgatggtcttgttatcattttctcccctcagtttatcatctacaacattgatatagaaatttaactgccctgcatattccggtttgaatggcgttgctttcaattccacgacaacataggcatggagcttgatattatataggatcaggtcggcgaaaaagtcactgtccccaatctggaaatgtttttgtctggcaacaaaagcaaagccgttacccatttccagcaagtaacgggttacatgctttaccaactgttcttctatatccctttcgtcagccttttcctttgctcctgccaagtcaaagatatacgggtcttttaacagataattggcaagatcgctttgaggtgccggaagtgtggcagtgaagttgtttaccttgttactcttgatttgtctgtcatacagattactttcaatctgcattttcagcacattactgctccaacccatttctacagattgtttcatataccaataccttacgcccaatggtagcggattattgagtatgaccatatggcttgcccaatttattcttgcaatcggtgacgccaagaataaatcttctatatcctctatttttattttatagatggttgctactgtttttgctacattctgaaattgcgcaggaacctcctgcgtaatttctaaagattgattatcagctgattgtatttgcgcagtaagctcctgcgtaaattgtccgctattgagcttaaggacttcattagtaatgttttgaatatttgggaccgacagtattgaatctgcttcaataaaactacgaagtacatttaacggatataaacgggcaaactggcacatataagtaagattacgttccgaatatcccttcttttcaggataattgaatctgattgcctgtgccaattttttgataattttaccaccccacccatgtaggtgttggtggtacagtatataattccccattttccagtaatggaacaacatctgggcattggctgcggtaatgagtcggacttgtgcctgttctatttccgaaccgacagcatggacaaaggcatcaaaatgacctttctttatattatgttcgttgttattttccatatcactaactattacttaacaaagataactctaataatggataatctgtgaaactgactgatacttttagagttggttaaacttgttcattgcattggccttaatatcgtctgctatgtcaatgtaaggcttcatggctttataatcactgtgccctgtccatttcattacaacctgtgcaggaataccgagagccagtgcattacagatgaatgtccttcttcctgcatgtgtgctgagtaatgcgtatttcggtgtaacttcatctatacgttcatttcctttgtagtaggtttcacgtataggttcgttaatttctgccagttctcccagttctttcagataatcattcattttctgattgctgataacaggcaatgccatgtggttttcaaaatggatgtccttgtatttttcaagtatggctttactgtacttgttcagttcaatactcagactatctgccgttttaacggtggtgacttctatatggtcggacttgacatcacttctctttaggttacgaacatctgaataacgcagactggtaaagcaacagaacaggaaaacatcccggacacgttccagatactgtttgtctttgggtatctgatagtcttttagtctgttcaactcttcccatgtcaggaagattaccttcttgggggtggttttcaatttcggtttgaacgtatcgtatgctatattctggtgatagtctttcttgaagctccatcgcaggaaccatttgaggaatcccatttgtttaccgatggtactgtttctcatgtcttttttgtcacgcaggaaattgatatactcgttcaatccgaactcatcgaaatattcaaaggtcacatcttccttgaactccttgaggtgatttttaacggctgcaaacttttcgtatgtggattcagtccagttattctgattgccgcattcttttacaaattcatcgaacacctcccaaaaacttatctgtgcttcttcctgctgttcttcgttggcattcttcatccgcaggttgaatgcatcctttagttgttgggtagttggcatggtttcctgtacctcaaactccttgaacacattttgaatttcggcatagtatttcagcagatcggcattgatttcagatgcactttgctttaatttgttggtacacccgttctttactcgctgcttgtcggaatcccatttggctacatcgatgcggtaacccgttgtaaactcaatgcgctggcttgcgtatatgacgcgcatacggatggggacattctccacaattggcacaccgttctttttccggctttccaatgcaaaaatgatgtttcgtttgatattcataattgggtgcgtttgaaattctacacccaaatatacacccaatatttggaatagcaaaagatattcagaaagatttagatttactatgtattccaaattgtgtgtgattatcagtaatttgcaattttatgatatttcttgaatgtataggttcgagagcctctctctccgccagcgaaaccctgcaaatatttaatttgcagggtttcgtgcgtttagtccagaggcattgaaaaacgatgcaatgcaggtcagccgcggcctgcccgccgtacctgattcggtaatgccatggattgggtgatgaaaacccaactgtctctcatcctccacccgtctctgctatattttttatcatattatgatacaaaccgttgaacctaagcgttaagagttcatccatttctggcaaatcatttgcacgcacgagccatagccgcgccttttgagtaccatcctcttcaaggcggacaccggacgtatcgatttcatccggacactttcgggacaataaaaaaatatggtaatgaataaaatttatttcatgctggcaatcctgctggcatcggtaaattcatccctggcccagaaatgggccgtcaagagcaacttgctctacgatgccaccgcgacgatcaacctgggtgtcgaagcggcgctcagcccccgcgtaacgctcgacatatcgggcaactacaatccgtgggagttcggcgacgcccggtggaaacattggctgatacaacccgaagtacgctactggctttgcgagagcttcaacggccactttttcggcctgcacgcccattacgccgaatacaatgcgggagggatcaatttcaacgccgacttccaccgcaaccgctatcagggacacctctacggtgcgggtttatcctacggttatcagtggctgatcggcaagcggtggaacctcgaagccaccgtcggcctggggtacgcccgtttgtgggatcggaaatatccgatcgccgaatgcggcgaagtgatccgcacccggtcacgcaactatttcgggccgacaaaaatcggcctcgcactcatctttatcatcaaataatacagcaggatatgaaacaccatacaaagcaacgcataaccggcttactggccgtatgcctgaccttcaccgcggcagtctacggtcgcgaggggaatccggccgcttacaggagcggcgaccggctttgcgtaagactcccgatcaccgccggcatcggcctcccggccaacggacaactgaccgtcacgccggtcgtcagcgacggcgaaaaccaaatacaactggctcccgtcgttttcacgggacgcatccgggagaaagtcaacgaacgccgggaacggctttacggcataccggctgttaccgaaggtgttttcagcaacacggtcatccgccgcagccggaaaaatccgtcggcaaatgcggttcttttcgaaggtgatattccttacgagccgtggatggcgggcggacgaatcgtcctttaccgcgacctggagggatgtgccggacaccggacggcccttccaccgctggtcgccgccgagatcgcccctgccgtacaaccacggctgtcgttcctcgttcccgcagacgaacccaaacgacacagcgaacagctcacggctgtcatacactttccgcagggccgttcggtgctgttgcgcgggttcgccgacaatagcagccaactggcgcgtatcgacagcctgactgcacgattgctgggaaacgacagcctttcggtagagaccgtctacctgaaaggatatgcctcgcccgaggacacctatccctataacacccgtctttccgcaaaccgcgtacggtcgatccgcaactacctgcaagagaacttcggactggacagtgcggtcttcatcaccgcgaccgagccggaggactgggacagcctgcggcgttgggtcgtcctgtccgacctgcccacgaggaacgaggtgttggccgtgatcgacaccgtgtccgatcccgatgcccgcgatgccggcatccggcaaatcgacaacggcgcaacctacctccggctgctgcgtgaagtttatccgcagctgcggcgcgtggattaccgcctcagttataccctgcccccgttcaccgtgggacaaagccgcgaactgatcgactcccgtcccgaatggctgagcctgggcgaaatgtgccggctggcggaatgctatcccgtcgactcacccgaaagagcctatgtctgtgcaaccgcgctggagttttaccccgacgatccgtacgcctgcaacaacatggcggcactggctctgcgctgcggcgacatacaaacggcccgtcaatgcctgaaccgctgcgccggggatccctgcacactgaacaacctcggcatcctgtgcctgatcgacggcgattcggagaaggcgcgctactgcttctcgctcgccgcggaatacggctccggggaggggacatacaacctggcgcatttcgacgaattgagttgcgaatggtaaaaacgacttcattttccaaataatactataaaaaataaaaccatgaaaaaaatctacaacttgctcttatttacggttcttgccgccggcctcgcagcttgctccagcgaccaagagaaaacggatgttgccggccctgccgccgggaacctgcaaatcatcatgcggacgccccaggcggcaggccgcgggccggtctaccgcaccggggacttccggatcctggtattcaaaaaaaccggcactgactatgtctatatgcaggacattccgctcgccggcatgaatttcgacggcacggcgctcaccggcacggttcagtttcccgccggcgactacaagttcctgccctcctacgggctggtaacgccgggcaactacacgtggccggacttcacggacgccaccctctccgatgcactctacgtgacccataccggggagaatttcccggcggcgttcatgctcaacacaccgctcgatgcggttcccgcctacacggtgtccctcgacggcccgaaacagacggtcagcgccacgctccgccgcgccgtttcgcgcgtggacgtgctcttcatccgcgcagagaaggatgccgcaacgggcgtctataccgaaaaagcgggcggcgacgttttcggccccgaaaaactggccggggtgaaactggcttataccggcgccaacagccgtctggggctttcgggcgagaaagtgtccggtcttaccgacgtgtcccacacgatcgacacccctgcggacgtggtcacgatgggcacgggcgaatcgacggtcgtcggtgccgacaaatacgatttcgagaacgtacagcccgccgacatcatctccggctccgcgcatctgaaaggcacctacctgatccccaatcccgacaatacggccgcgaccggattttcgatgcagctcacctcgggcgaaggatcggcacgcaccatcgccctgcgggacaagatacccgtcgaacgcaacaaggcgacactgatccggatttacgtattgggcgaaaacgtcttcaccacgggtgtcgatttcgaggtcgaggtcgataccgtctgggacggatcgaacttcgtggacggagaaatcgactgacaaaagccagggagacagaatcatgaataatcggattcatacgaccatcatcctggcagccgccgctttcgcagcctgttcggggtcggagcgagcagatatcgttccggccacgaaaacctcgcgtatcatgctggtgcgcgaaggggccgcggatgtctcggtttacgcctttcgccggcagggagcggttttccttttcgacacgctgtttcgcgaaggatggacacccgacggtaaactgtcggtacgcatgccgaacggccactacaaattcctgttcgccagcggggcggccgaccggatcgccctgcaacccgctccgttaacgcggcaaacttcatgggaagaggcggccttcgtcttgcgtaaaaacgcagtcgtgcccggcacctgtttcccggccgatgaactgttcctgcaatatcccgcatccgacgccaatacggtctacacgatcgacggcgcggcacaaaccgttcgcgcccggctcacgcgcgctgtttgccggatctcggtcaccgtcaaacgaggttaccacgacggcacgcgatacgtcgaggttccctatgccaaaccgcaatccgtgctcgaccagatcggccgcatcgaactctcggccgaccacacgggcctgcgcgtgaatcccggcggaagcagcggaacggccacggtgacggcgacactcacagcggcggattatgcggaacttaccgacgggggatttgtccggctcgaagggcctttcgtcattccgcccgccgacggcggggaggtcggcctggatatcacggtcgttcccgcggcgggagccgccctgcaaccggtgcagctgcgcctgacgggtaaagtcgaacgtaacaagcaactcgaaattacgctctggatcacgttggattaccccgttatcggagtagaaatacaaacggccccgatcaccgaggaacaggacggcgatacgggcatttgggaataaaagattgaacgtgatgaaaagaaaatacctatatcgaattttcggaatgctgtttttgcctgccctctccgcagcctgcgggctggaggcgcaggaggagatctttcccggcaataagttccgctacaccgaacttcgcctggagggcacgcttcccgtatcgggatacccaaccccgctctaccttttccgccgggcggcgcgaacgcaggacggatatgttttcgaccgcagttacacttcggtcgccgacggtgagacactgaaacttccgctcgccgagctgaaagcctacgactaccgttttctgatggtcgcccagcccggcgacgcgcaatggctgtcgctgtccacagcggccgggacacagttcgtcccgggggtcgcatgggaagacctgcggctgggatgcgcctcaggggcggctgcgccggacggttacagcggctatacggacttgagcggcgcggacattctccgcgacgggactatccgcctcacgctgacacgcatcgcagggcaggtgctcttcgacatctaccgtacgggaggctcgctcttagagcccgaaaacatcctatcgcccgatgtggagtcggtgatcgaccggatcgcacggatcgaaatctcctatgagaatccgaccaccgaactgcggttcgatgaaaacgggacgctggttcccgcagcgtatgcttcggaaccgctggtgcaaagcattctgccccagatgacggatttcaaggttccactcccccagacggacaagggactcggcatatacgacgacggggtgcgcggcagcctgcgtatgaaaggagctttcctgctgccgtccgattcgaaactgcgggtgaaactgctcttcacctactacgacacgacgcctgcctgcggcaacggccacacggatgtccattccgcagcctgtttcccgcagcggcagctgaccctcgcccttccggcggccgacgccgcgacggggcttccggtggctgcggactgcttcacggtcaaccgggcgggtctgcgctgcgaccggatcatcgacattccggtcggagggggcatcgaaacgaatttcgactggttgtgaaacggcaaaaaacgtacgattatgaaaaaactttcagtcttattcgtaatggcggccttcctgacgggcggctgctcggaaggggaacctttcgggcacccgtccgcggagagggaaaaacgcgtcgaagtcacgttccggctggaagccgtcggcacggacgtctcgctcgtacccatgacgcgcgccacctcctacacgcagtggttcaggaacacggcccggctgctgatcctgaaaaaggcggacacccgctggatcgtggacacgacgcaaaccgtcctgctcgacgcacagtcggggccatgggccgaactgaagatcgccggggatcttccgccgtgcccgttcaatctcgaactgcggccgggcgattaccggatcgtagccgtaatcaactgggggtcggccgactggaacaacgatctgattccggggaaagtcgtctccgatgaagccgacggctcgctgcgcacgccgccgctgctcacctacacgatctcgacgcactggatgaacaacggttaccggcagctgagccgcgaagtttttgtcgccatggccgatttcccggtgcccaaaagcggcgatctccattcggcaggcgttccgccggtaaccctgcgggccgaacggcgcgtggcgaagttccgcgtgctgctcaaagacaaaccttcgcccgtcaacggtttttcgttcgacaagacagctcataccgtccggatgcttttcacgtccaagaccaaaccttttgccgaaggcatcgacgcactcggagggatgtattacggcgatcccgggctctatgaactgccgtgctgcatgtcgacgatgggagatttccattcctcgggtacggagcgctaccagatgtgccaaaccaattcgacggtcttttcgcccttcgtcttcgccgacccggcctcggaactgcctatcgggatcgtggatatcgacatttccggcgccagcggcggatatacgtataaaaccgaccagacgttcgcacgcacgctcgccgcaagcaaaatctccggcatcgttttcgaaaccaccgacacctatgacgactcctcgtcgcaaatccggatcgaggtcgtcgaggcgacggacgacgcgggaaaccccgaaaacgcggcggcgctcttcgatcctttttacgagtggaacgcctcgtcctactaaaattacgaagtcatgaaaaaatcaccttacataccgttcgcgttcctgtgcctgctgtcggcaacgtcgtgcatcgaagagaaactcgacccgtgcccgccccagggaggaagcgtcacggtcgcgctccgggtcgagaaattccaggcccggccgccctaccgtccgtcggatttcgaacaggaattcgggaaacgcatccattcgctcgactatctgctctatgccggcgggcagctggtcgggcagggccgcgcggacgacctacataccgcctccggcggggattacctcttccgcatcgacacgcttccgttcgggacataccgcctggcgttcgtggcgaatgtcacgccgcgcatgatgacaggaacgatggacgctccggaggcacgttacatcgtttaccagggagaaaagaacggcgacgaccatttccgcgccgacgtgccgttcgaagtgacctgcccctgccgcaatgaattcgaagccgtacttcagcgcgtacacggcataacccgcttccggttcgagaatattcccgcccgaatcgcctccgtcgaagtggtgctcgacaacgtcggccaacgcatgccgctctgcggggaacccgacctggcgtgcgaggtttccaaacgcatccccgcagcgcagctgaggacacgccccgccgggtcgttcacgctcggcacgttctgcacgctgccgggcgtaaggacatcgtggcggctcagactctacggcgaggacgacgcaccgctctacgaccgggtagtcaccgacaccctgcggatcgaatgcaaccagttgatcgaccttacggcacgtttcgaagagggcgatttccggggagaaatcgagttctcggtcgacgtcgacacgacatgggacggagccaacgaaggcgggggcgaaatcatacgatgacacgcagcatgttccctgcccgcccatcccgtgcggccggggcgctgtgcttaccctggaaaagacacggcagaacgcccgccgacggccgcgaacggaattccggggcgcgacgctcctgcggcggattttatttcaacaggcagccgttcagcagctcgatcctcccgggcacatccgcgtccttcatccgccggatcagggcgaccagctgcatggaatcgatctccagccccatcgtgcgcagatagaccgcctttacgcctctcgattcgtaaaggcggtcgaaccgccagaaccaggccggccgtacgagctgcggcttgtagttgctctcgagcagcaaccgcacccagtattgtccccgaaaatagaaatcgtccgcgtaaaggatggcctcccattcgatctgcccgcggatcgtgaacatctcggtgatgccgtcttcggtaaggacgatatagggtcggcggtcgtacagcgagccgataccgtacaacagggtaaaacccgccgtcgccacgaaacaccagccaagaaccacatcgcggacacagtacaggataaggccgccggcaatccccgcaaggaacccggcgacggtaatacacaccgccttttttctggatttatgcactatcatcttcatcctcaatctgattttcatttggggatcgtgcaaattcttctccaaaggcatagaatttgaaagccgggataagaaaaaacccccgcattatgcgccgatgttaaaaaccggatggcaaaagaggaaacacaaataacaaatgtataattaaaaaacaaccggaaaatgttagattacgagatttggggaaacagcgtccagacatggatcgtctctctactcatcatagcaggagcgtttatcgtcgtgaaactgctgtccctgctgggcaggaaggttataaaaccctttatcggccgcacaagcaaccgggtggacgacatcatatactattccctggagtcgcccctgaaattcgccgtgatgctgctgggcatctggatcgccatccatcggctggtctacccggatcatctggtaaaatacgtcgacaacgcttacagcatactgatcatactggacataacctgggttctggcccgcctctccacggccctgctccagcaatattgggggcagcggtcggacggccatgcgctgaaaatgatgccggttgtcaggcggacgatcctggttctgatctggatcatcggtctggtaactgccctgagcaatgtaggggtcgacatcaatgcgttgtggggcacactgggtatcggcggtatcgccttcgccctggcggcgcaggataccgtgaagaatatcttcggcgcgttcaccatcttcacggacaagcccttcggcatcggcgacacgatcaacgtgaacggcttcgaagggacggtggtcgacgtgggcatgcgcagtacgcgaatcatgggttacgaccggcgcatcaccagttatccgaattacaaaattacggacgcctcgatcgtcaacatctcgtcggaaccgatgcgccgcgccatggttaaggtggggctgacctacgacaccggcgcagacaagatgaacgaggcgctggatattttgaggggcctcccggcgaaggtaaaggacgtttccgaaaatccgtcggacataacggcctacttttcggactacaccgattcggcgctggtcatcacattttactattacatcgaaaaacagggggatattctgaaagtgacttcggacatgaacctggccatactggccgccttcaataaggccggactcagtttcgccttcccgacacgcacgctgctcgtgcaacggggcggggaggacggcaaaaccgcgcacgaacccgcacccggcgacgccccgcaaacgcccaattcataaaatacgaccaccatggaaaatatcaaaaaccaccccgcacccgaccggttggattcgttcgacaaatatccgccgtactacggccaagacctcgaactggcgtatacgcccctacgctccgtctttacgctctgggcgcccaccgcgagcaaaacccggctcaatatctactcctcgggcgagggaggcaatccggaggagcagttggaaatggagccctcggacgacggaacctggcgcattgccatcgaacgcgacctgaatggctccttctataccttccagatagaaaaagaggggaaatggctggccgaaacacccggcatctgggcgaaggcggtcggcataaacggcgaccgggcggccgtgatcgactggaaccagaccaatccggaaggctgggaatcggatcgtgcgcccgaattgaaaatgtattccgacattattctctacgaactgcaccaccgcgatttcagcatcgccccggattcaggaatccgcaacaagggcaaatttctggccctgaccgaaaccggcaccaaaacccccgaaggcgaggcatccggtctggatcacctcaaggaactgggcgtaacgcatatacacatcctcccctccttcgactatgcgacggtggacgagacgaggctggcggacaagacctacaactggggatacgacccgaagaactacaacgttccggaaggcagttactccaccgacccggccaaccccgtgacgcgcatccgcgagttcaaggagatggtgaaaagcctgcatcggaacgggatgcgcgtcgtcctcgacgtggtctacaaccacacggcctcggtcgaccgttcgaacttcaaccttaccgtccccggttacttttaccgccagaatgccgacggttcctactcggacgcctcgggctgcggcaatgagacggcttcggaacgcgaaatggtacggcattacatcgtcgaatccgtcaaattctgggcgcaggagtaccatatcgacggattccggttcgacctgatgggaatacacgatatcgacacgatgaaccgcatccgggaagaactgaccaagatcgaccctacgatcttcatatacggcgaaggatggcttgcggccgactctcccctgcctccggaaaaacgggcggtacgggatcacgtcggcgaaatggagggcatcgccgttttctgcgacgatttccgcgacgccgtgcgcggcagcacgttcgacgaacaggccgccggttatgcctccgggaatatcgtcgggcattacgaacccgtaaaattcgggatcgccggcgccacgcagcatccgcaagtggattataatggactgttatacagctctgtgccatacgcatccgccccttcgcaggcagtcaatttcgtcgccagccacgacggttacacggtgatcgacaaactgagactttccgtcaagggcgaccatgccgacgacgagctgccgcctatcgacaaactggtacacaccattctgctcacggcacagggggttcctttcatccgcgccggcgaagagatgatgcaggacaaacagggggaaccgaacagtttccgttcgcccgacgccgtcaaccggatcgactgggccctgaaagccaaaaaccgggatatgttcgattatgtccgggggctgatcgcacttcggaaagcacatccggcattccggatcccgacggcagaggggctgcagcaggggcttcatttcctcgacacgggcgactccggagtgatcgcctatacgctgggagaatatgccaacggcgatgcgtggaaagagatcctggtggcctataacggcaaccgccaccaggccgagttccacattcccgaagcggattggatcgtagtctgccgcgacggccggatcgaccccgacagccgcgaccgcctgcccggcggcaacacccctatcgcagcctcctcggccattatcgcataccgcgaataatttccgggcagttcatcctcccgggtacagaatttgtattatcctgattgtcaaccaaaattaaaaaacatatgtatttcttatggtatttactcatcggcctggcggccggatggatcgccagcctgatcttcaaaggcagcggctccggattgctggtcaatctgatcgtcggccttgtcggcggcattctgggcggctggctcgtttcgctgttcggatgggtgccgacgggcacttgggggactttcctctcctccgttatcggcgccatcgtcctgctgtggatcgtatcgctgttcacacggcacaaaaccgttaaaacaatgtaattatggaaaagtattcgacaaaagagaacgaaacgtatcgggaacacgccgaaaaagcagttcacaaggcggaagaacacggccaaaaggccaggcacaatctgcaggaaaacatgcagaagctgaaggacgacgcccaggagaccgccatcgaggcggaaaacgaggcaaagacgggtgtccgcaaaatggccggcaaaatcgaagaagtcggcacgaaggtcaaaaatgcggccaaagagagcatgaccaaagccgcacacaaagtaaaggagacggccacacaggcctccaaccggatcaaggaaaaggtgcactgagcccggtggcccgacatcgaaaaagagaagtctgagacttctcttttttttgccgcaatatttcggggaaaggccgccaccgggaacctatgccggcatgagaatgcccggatcgccgggaactttgcgcatgaaatcgggctgcgcgggttcgcagaccatcatctgctccggatagggtttcagcaacgcggcgatctggctgtcggacagctcggggtgcagccagcactcctcgtcgccgtcatgcaggataaccggcatccggcaatccctgttgttgacgtggcgcatcatcggattcgcctcggtggttatgaccgaatacgtcattacgacctcgtccgaatcgcggtcgatccagcagtcgaaaacgcccgcaagggcgatgacaggccgatcctttaccgtcacgtagtagggagtcttctgtgcctgcccgtggtgccacccgaaaaatccgctcaccgggatcaggcacctccgccggcggatcggaacccggaacgaagcgttttcaaaaatagtttccgcacgcgcgacgaccgtctgattgcggatcgtcacggtctgggcggccttcccgatccaatacgggatcagcccccagcggaaatactgtatctgctcgtctctggtaactaccggatacgggaggtgcgaaaaggcacatacatggtatgcaggtcggaattttctgaccagatcggttttacggccgaaacgccgggccagttcttcggctccggcagcaagggagatatgataacacatggcacacgctggtttatcctgttacggcccgccgggccgacagcaaaaaaaagcagggagcacaactgcgggcactccctgcgattttcacactgcaaaagttatttcgttgccttcgtgaaattaccgtccttgtcgaaatcgagaaccgtcttgtccgaaagcgctactttgtagccgtcggccgtcgtctccatcatgacgattcgctgccccgggtaagtattgcctgcgtaggttttgaccttggcgggaatcacggacatcggaaccgaaccgttcttcatgataatctggctgcaatctccgctgccgccttcgaaggagacctggttgccgctgttgaaatagacggtgtatttgtcccacgacgcctcgcgatccatttccacagccttcactttttcgcccggaaagtttttctgaatgaattcctgcgaattcttcggcaacttaccgaaatccaccttctggggagcagcattcacggccaaagcgattgccgcggatgcgatgagtaaaagaatttttttcataatataaagaatttaagtgatgattgacatacggaatacttgcaaatgatattccattgaggttaaatttatcgaaaaaataatcttcatattgggaatcatatatttaatggatttgccgtacagtccggcatcctgagtccgaaccggccggcttttatcggcgcacggttattctacatctctatgcccgtaaaatatttgagcccgtagccgatcagaaaactgatcccggcgatgccgaaactcagaagcgccatttcaaaaaaacgctgcctgaaactttcgctgcgcaccacggcgtaatagtaattgaacagggctatcacggtcaatgcggccagaagcatgacgctcaatgccgtgacggcattcgaaaaaagcagatagggaattatcagaatggcgaccgtcacgaggtaggcggttccggtacagagggcggcccgcagcggatgtttctcccccgtagcgtccgatttggtcgaaaggtattcggaagcggccatcgaaagggccgcggcgataccggtgatgctgcccgtaagcgcaacgagccgcggttcgttcagcgcaagcgtgaacccggccagcgcccccgtgaattcgaccaaagcgtcgttcaggcccaataccaccgaactcatataggacagccgcattccgccggccaggttggtcagatcctccccgtggcgcttttcctccgaagcgatccgaatgaactcctcccgctcggcatacaaggaataactcgcctccgtgcctttttcacacagctccatctgccggacgacaaaagccggccccagcacccgcattatccacacataccagaaaacccgtttcggatcgggagtcatttcgcgtcccgtcctgcgcttcaggatcgcgcaatgccgtctttcgtcgtgcatgatacgcaccagggtctgccggcgaaccgggtctttttccagttcggccagccggcggtagacttcgcacaaggtggcctcgtcccgttgaaggttcaaaaggttttttgccgttgcatccatatttgcgtggttattccgcccaaagcctccagcaccgggagtggcggacgttacaatcccgaatccgcaaaaaatctgccgaaacagcgcccgaaccaccgcaggaagaaggttttaccccgacagacgaggttgaaaaaaaatccatccccgccttactgcgtgttttgcaggaatatccatcctcccgcttttccaatccatccaaaagtatttttcatggcataaatgatgcacggaactgcactgtaaagggtgccggacaacaaatacgagcacataccttaatataaaaaacacttatggtttaaccgattgttaactttatttaattatcaattccactatgaaaaaaaagtacttttgcaccgcattcgctgcggcgttgcttttcgcaggattcgcttttaccgcctgcgacgacgatgacgacaacagcgctcccggcacgaagccgacgatcaagttcgaaaacgtcatcccgacgaagaattacgtccagagcggcacgttcgccgccgtcgcccccgggaaaacgacgtcgttcaccttctacgccgccaaagggcagcgcctgatgttcgccgccatgtattccaattccaacgacctgttcttcgccccggagaatccgggcatccagctcttcaacgattcgggagtaccttataccggcatcattgccgatgccgtgaaactctgggacaacggaacccgcgtaaacgaacagcccggccccgatgtcaatcatccgggcgtagcccaggccggcgtagtgaccgaagtaaagggcacggactccgaaggacacaactatctggccgcatcgagtctgctccaggtgagtctgaccttcgatgccgcacagtcgctgttcacctgtacgatctccaatatttctgccggcacggcgaatgagaccccgttcttgggcggtgtattcgtcgtatcgaacctgctcgacggcgacctggtgatggacaaaccgttcttcagcgtcgaccagaaatcgggcgtggagctgaccaagctggccgaagcgggcaatgtcgatcccctcaaatcgcttgtcgccgaccagacgggaatcatcaccacgctgcacggtgccatcgtagtggtttacacgggcaacaccaacccgatctaccagttggggcagaaggatgcgcagctgggtctctcagcgctcgcacagcgcggcgatccggcgcagctgaaagcttcgctcgaaaaagtcccgcaggtacgcaagatctacacgcttacggacaccgtcctgccgggcaagagcatggaatgcacctatgaggctgcggccaacgaaaaagtggcgttcgcaacgatgttcggttattccaacgactggttctttgcaaacggccccgaactcaatgccctgaccaaaggcgaggtgacgaacaagaccgtcctgcttgacgacggcacggccgtaagccagtatcccggagccggcaacgcccagttcgtattcggcggaacccagatgcccgaggacaaagccatcagcgctgtgggcgacaccttcccggttcccgccgtggacgggatcgtcaagataacgatctattaaaggatcgtcttaagtatcaattacaaccggagcagttccctgctccggtttttaaaccagcaaaaccatgtcgaacaatcaaccgcaagaaggcaacgccactgttgccgtagaaaaaaagacgtccaaaattccctcgatggtctatctgtgtgccgggctgagcgcattggcagcctccgcctgcatgatgtgccgcggccggaaatccaccgcgctgctggtcgggcagtgggccgccccgctgctgatcatggggctttacaacaaggtcgtcaagaccgaagggcacgacggatccgcaaccgaaacacctatcaaaccgaatcactaaaatattacgattatgaataagaatgacaacatctacggcgagagccgtgagcagaaaaacgaaatgcagaacaattcgagaaccaacgccaacacgaacgatctggacagccggagcaacagcggcatgcacgccggcggtaaccaagggagttcctaccagcggcagcagccggagaattcgtcgcaatacggctccaagacgggttcgtactgggaagagaaaggttccgacagggaaccgagcgccgaaacccggatgaacggacagaatccggacaaaaggcactaattacgccggcaatgcggccggccgcaacgggacgtccgcagaaggcccgtccccgggaaagacgaccgggagcggaggcctctgcgacgaacctcccggaaaaaaccggcctccggcatgttcaacttaaaacaacgaatctatgttttaccactccaaagaactccagttcaaagcgcgggtatcgaaacccgatccccgcttcgcacggctgctgctcgaacaattcggcggcggcaacggcgagctgaaagctgcgatgcagtacttcgtgcaggccttcgcctgccacaatccctatccggacaagtacgatatgctgatggatatcgccaccgaagagctgggacacctcgaaatcgtcggggccacgatccagatgctcctcgcaggcgtaaacggcaacctcaaagatgcggccgagcgaaacgacgtcttcggcgaaggcatttcgaaggacgacttcatccattcggccttttcggtcaaccctcagttcggcgtgctgacgggcggcgggccgcgcctcaccgacagcaacggcgtcccctggcaaggctcctatgtcaatgccaacagcgacctgacggtcgacctgcgttcggacatcgccaccgaatcgcgcgccaagatcgtctacgaatacctgatgcagttcaccgacgacaaggacgtgctcgcaacactcaatttcctgatgacacgcgaagtagcgcatttccagcagttcgaggcggcactggacaccatccagcccaatttcccgcccggtgtgctgcaaagcgacccgcgttacagcaacatctactccaaccactcgatgggcgaggatgcccgcgggccgtggaacgaaggcgaaagcaccggcctgggcgaagagtggctgtatgtcgaaaatccgcgccagcaagtactcgaaaccgacgggctcaccgacctcgaaccgcagggcacgccccgcacggaggcttcggtgcgcagcgcggacaagaagctcagcaagcagcgcagcagcgaaatccgcaaggcgacaccggagaaaaacctccagtggagccagtacgattcgcaggatgccaaggcgccccggcgccagccggtcgggcaggattgacgcccccgccggcctgcaggtgagagcgccccggaatttccccggggcgttcatcctgtttagcatgtcctttgcaacgaaaacgcgtacacattaaacatatatcggctttatgaaaaacggagtaatgatgcagtatttcgaatggaatctgcccaacgacggtaaattatgggtgcacctgaaagaggatgccaaacacctgcacgacatcggcattacgtcggtctggataccgccggcttacaaggccgacgaacaacaggacgagggatacgccgtatacgacctctacgacttgggggagttcgaccagaaaggcaccgtccgcaccaagtacggcacgcggcacgaactggaagaagcggtcgcggcgctccacgagaacgggatagcagtctacctcgacacggtgatgaaccagaagacaggtgccgactataccgagaaattcatggcctgcgaggttgatcccgagaaccgcgagcaggtgatcggcgcgcccgtcgaagtcgaggggtggacgggatactcctttccgggacgcggcgacaaatattctcccttcaaatggcactggtaccacttctcgggaaccgaccaagtttacgagaccggcaaacgggccatctacctcatccagggcgaaggcaagaagtggagcgaaggcgtcgacggcgagaacgggaactacgatttcctgatcttcaacgacgtggacttcaaccatcccgaagtgaccgaagaaatgaaacgctggggcgtatggatcgcccaaacgctcgacgcggacggcatgcgcctcgacgcgctcaaacacatcaagaatgccttcatcgccgacttcatgcacaacgtccgggcttcgcggggcaaagagttctacgccgtcggtgagtactggagcggcgatttcgagtcgctggaggcctacctcgacgccgtagaccaccagatcgacctgttcgacgcgccgcttcacttcaaacttttcacggcatcgcagcagggccgcgacttcgacatgcggacgctgctcgacgacacgctcgtgcagaaataccccacgctggccgtgacgttcgtggacaaccacgactcgcagcgcggcagctcgctcgaatcgcaggtcaaatcgtggttcaaaccgctggcgtacggcctgatcctgctgatgaaagaggggtacccctgcgtcttctacggcgattattacagcatgaaaggcgaagggtcgccccaccgtcccatcctcgatattctgctcgatgcccgtcgctcccgcgccttcggcgaacagacggattatttcgaccatcccaatacggtaggtttcacccgctcgggcgacgcacaacatccggattccggcctggcactgctcctttccaacggcgaggacggcgaaaaagtgatgtccataggcgtaatgcatgccaacgaaacgtggcatgagatcaccggaagctacgacgacgaactgaccatcggcgacgacgggaaggcccttttcaaagtacacggaggcaaattagccgtttgggtacgaaaaaaggattgattcgcatagcatttcccggctgagcatcatccacttcgggctccggtaaatattccgtaaatattcggtatctattttgtgttgtcagctataccgtacatcccggcggggagatgcggtacaggctggctttcaaccgcatggcttcggcccttcggctggcgggcagcatttatgtctcacttaattctttaaaagtcatgaaagagtctaacaacaaaacctccggccatacacagtccggacaaagcaaatcggcggaaaagtcgtcgcgtacgaccacttcgcgcaccagctcggcgagccggggaaccgcaagcagccagtcgtccggttcagggtgcacttcgcgcagcaacaatcccgaaggccataaccagtacacgaaaaaatcgcaggacaatcgctaacaatgcaatttgttcttcgatagtgtgtcgcaagggactgcctaacatgttttaggcagtcccgttttcattcacccggccctgacgaaccctgcccggataaatattgcagatacggtttaaaatgacgatctttgccggggataaagaacggaacctcgcaaacacggttatggactggctgctcaacttaggatacctggggctgtttctcggcaccttcctggccggcacggtgctgccgctcagctcggacatactgcttgtcgggatgctcgcggcaaaagccgaccccctgatatgcctgcccgtggcggccgtcggaaattggctgggagcgatgacttcctactggctcggatggtatgccaagtgggaatggctcgaaaaatggttcaggataaagcccgacacgctccgcaggcagcaggaacgggtcgacaaatacggcgtatggcttgcgatggtcttttgggcccccttcatcggcatggtctgcatgatcgccctgggggtatacaaggtacgcccccggacgacggcactcctggcgctggccggctccttcctccggttttcattctggatactgctccagaccgtctggcagcaataacccggccggctgcgggcaaaccgccgcattgcacccacccagggacaggccgcccgtcccgccgaaggaaaaacggcaatttttggtaaaatctgaaaataattattacctttgcgaaccgaaaggagaggtgcaggagtggttgaactggcccgcctggaaagcgagtaaacccctaaagggtttcaggggttcgaatcccctcctctccgcaggatgatccgcctgaccgcaggatcgacagacaaagaccgaccggcaagtctgtgcttttataaaatcgcctctattacagatttctatcatctgtaatagaggcgatttctcatttcagacctgtcagactaccgatccgtccgacgtcgttcccgcacaaaacacatacggcagcctgaaatgaacagaaaaccctccgttccaaacgaacggataaacaatatattagcatcgcaaacaaaaacatccattatctacctaaattcagtttattatgaaaaaactatttctttgtttcgcactggtgggaatggcatcgacactatgtgcacaagaacgcggcgacatgctcgtttccggatcgctttcgtggagttcgtccagtacgaagaccaccgttatcaaacaagacggcgacaacaaagtatccaatcgggacttctcgctcggcctgaacgtcggtgcgacgatcgcattcaattactatttctgatacgtacgacaacagccggatgtttggccccattcccctgccgcccccggaagcggcaagggaataatcccgggtcgaagtcccgaaacaatgtaacaatttatcgaaagccgaaatcccaacgactcaaacaccccagaaatcataaacaaacggaaccgatgaaactaatcaatattgccagatccatattggtaatcggatacgtcatgcttgtatcgtgcagcagcgacgaaggtggagaaagcggcaatgggccgcaggcaaccggccaggaactcgaacggcaactcctggacacacattggaaactggccaaagaaatcaaagtagaagacggcactgaaaaagttctgaataacccctacgtattgaatacaataacattttcgggcgcaaccgaccgtgcatggcactacctgtacctgaacaacacccattcaggctggtggtggatcgacggggaaatgatccgttgccaatgggacacgggagaccccaagacgaacggagcatacagcatggccttcggcttcggacacagccgcatcggaaaaatgacggactcggaactggtaatgatagccgactacgacacgtatagcaactatttctattatgtgtcaacttccggaagcggatcggatccgggctccccggcagaaaagcccgatatcgggttttacgattttacggcgaccaaaacctcggtaaccgtaacctataagatttacaacaaggatgaagcgaaggtttcggacgccaagatatattacggcacctcctccaaccccacaacgggtaagaacgcctcggtaaacggcaccctcatcaaagcgacgatcagcggactgaaagccgggacaacctattacgtaaagtgccgggccacgggtgccggaggtacgacgacgagcgaaacgagccgggtcataaccacctattagaagatgggaaccaacattgccgaccaggaaatcctcgacagctctacattaaaagggaattggcaacgaccgttagtcgttgccaattccttttctgtgcactctgctccatcctgaaatccagccccgcggcggtcagcggatgaaatgcgtccacacccgttcttcgggctccggggccagacgggggccgacgccggccttcagcagttgcgccatgttcctcgccagcacccgcatcgtctgcaagccttcggcatcttcgcgtgcttcgcgcggcacccgtccgtgtacgctgttccaatattgcgacgacacgacgggcatattcgaaatcgtaaaatacttgttcaggcggtcgaacgtcgcactcgccccgccacggcggcagacagccacggcagcggcaggcttgtaggccagatcgcggccgcacgaataaaacacgcggtcgagcagcgcgcaaagcgaaccgttcggcccagcataatagaccggcgagccgaccacaaggccgtcggcctcggcaagcttctcccgcacggcggtatacacggcatcggaaaagacgcaatgccccagttccgcacatttcccgcaggcgatacaaccctgcatggccctcgtcccgatgtggacgatctccgccccgatgccttccgcttcgagcgtccgggcaacctcggacaaggcaataaaagtgttcccctccctgcgggggctgccgtttataagcaatactttcatagtggtaatgtttgtgttcgtgcaaatataggtttttttggcataacatacaccgctgcatgttccctgccggacgggactccccgcccggaatccgcccggcatatcgcaccctgcgcatcgggagaggggaggagctccacgggcagcaatccgcagccgggatgccccgggaaaaacagggcggcatcctgtgccgccctgtccgttgccctaatcctggaaagaggcccggtcgagccagtcgaggcgcgccgtcagccactccttcatcgcccgaacctcctgccggaacgcggttttcacctcgctgtccgccgctccctccggtttcaggttttgccacagccggttgtcttcgacgaccgaagcctcggcataggcggcctcgccgtccacctgcgccaggatgacggtgaggttggacttgaaatagccgatgcgttccttgactttccgcacgaaggccggatcctgcagcatccgctcgaaccacggcgattcgcggttccagtacccttcggggccgcgcccgtccgtaccattccacttcgtattgcccatgcagatgtcgaaatcccagatcggccccatgttcagcttcccgccgggcgcgatattcatatagcagctcgtatagagcgacgcgtcgttggtcttggtgatctcgctgatcacgtaccagtccacatacgtatcgacgttcaggtacttggcataccccgtttcgggatcggcgaaatccgcaccgtagagggcattctccgcttcgttgacgtaattcctgatccattcgtattgcgggctcccgggctccacgtcggggtctttgatattcatcaggatacgctccgtgcggaaataaacgtcgtccggatccaggcggtcgagctggtcggcctcgagcaggtatccctcgtcggtcacgttcacccggtcttcggagatcttcatgtgctcgcaaagctggtaggtgccgttgtaacggtcattgaggaaaacatcgacgaaatgggtggtcggcgtaaactccagacagctcaggcggccgatcgcataggccgtcgcattgcgtatcccgcaggcgttgtccatatagttggccagcagcacccacgacttgtccttgggttcgcccaacagggactgtttcttgtcgaatttcagccggtaaggtttcttcggcatgccccacgtactgttcccgcgccctttgatattgacatcgcccctgaaaacgcccgacggacggagcccgttgttatccacgatcttaagcgaagcggccacatattcctccttcgagacgaccggtatgccgccggtgtcgatatagaccacgggcagccccgtgaagctgaccaggctgaccctgtactcccgctcctcgccgcctttgctcctgaccgtcagcacgaccgggcccgaaaaatccacctcggtttctccgctggcgatctcctgcgaccccatataaaccccctcgccttcgaattcgaactcggggacgagcaccttgttctccaccacgaatgaagtcctgccggaaataatgccgtcaccgacctccagcaccacatcctgcggcaatttcgccgcattcgccgccgtccggaaccggaacgactcgatgacgggcgagagttcttccgcggccccctgcgtcaccgtaacggttttcaccgtcccgtccgcccccgtcaacgtgattagcgcctcgcgccccttgagggcgttgttgccatccacgccgaccttaaaggtctttccctcgcacggctcgttcaggacatccgcgcccagcacgtaacaccacccggcactgacccggaggcgccattgctgcgggcaggaaaccaccaggtcgagggtcgatttcccggccgggaaatcgagggtttccgtagataaccgtattccgggagaggggtcgtcgccctctccgcacgcctgcagggcaaagaacaccgccagcgcggcaacgatgccgatcagttttttcataattctaaatttgagattaagtcgaggcacaattgaaacccgtaaaaatcaaaactacacaaatataaccataattatgaaaaaacgcggcacatgtcagaaataataaacaagccgcagccgcctgtcgtcagaagcggctgcaaggcaccgccaccccttcgcaggattccggccgggccaggaaaaccgggcacaaaaaaaggggattctttcgaatctccctcactctcatgcccgacaatttatttgttgcagcatgcatcttcagctttctcggcacagcacgacttggtcgaatcgcacttctcggcgcagcaggatttggtcgagtcacatgcctcggcatcgcacttcgcgtcgcagccagcgcaagccgaagcttcggtcgcagcagcggcagccccgctctcagcagccttcttgttcgaattaccgcagcagcttaccattgctacggcagccatgacgacaacaaaagaaaaaatctttttcataagcgttaaaggtttaattattagttattctgtaacgtcgcaaagatatatattcgtaagaatattgcaaataaaaatttccgatattttcaaggcgtgcgtatgttgttggcaagcaggggcataggctgcacgcagaccgtgccaggcgccgaaaacggagcagggaatccaacctttcagttcaaaaggtctgccatagagaactcctcgctcttcacgaatgccttgggaaatgtcgatgcgatcttacccttcaggatgatggcctcctcggccgtcaggcagtttcccaccacgaccttgaaataaggattctcgtacaccgggtataccatgatcccgggataggtctccttgaaaagggcttccgcggcaaaggccccggcgcgggcatcctgcccgttgtcgaagaagatacagaccctgtaaccgcgcaaccgcaggcgctgccccacgcgcgaagcgtcgtcgacagccttctccgcatcgccgtactcggtgacggtgaccctggccgtgccgaacgcagcgtcggagaccaccggggcggccaggcgctccttgaaggcatcgagcgactgcgcccgcagcggagcgaaagccgccgcggcgaaaatcaccgctatgaaagtcgtcagtctgcgcattactcgtccagatagtttttcacgtcctgcaaggacagcccaaagatattcaaaaattccgacaacggcaccatctcttccgaattttttaccgaagccggccccccgcgcccctcgaccgcaaacgaaacggcgacctgcgaaatatcgtcctcgcggatttttttcaccatcacgtaataggccatcgggtcggtagttctcacgcgccacagcgacgtaaaacttccggtcgtccggcgcggcacctcgacacggccgtggaggatgatgctcatcacgcggctcccggcgtagaagagatcgaccttcgcacgctccagcaccagtttgtaccccgtgccgttcttcacgcgcactacggcctcggcgccgcccatccccttgcgttcgaccttttcgaccgcttccaggcggatattgcgccgggccttctcgaccgcccggcggcacgaaaccatcggcagcaccatcgccgtgagcaatatgcagtataaccatttcctcatcgctggccggtatatatctgcgcgatcccgaaactctggctccgggcccggcagccgcggaaccccgcccgctccatcatggacatgaactccgcgggcgcagggaactccccgaccgaggcaggcaggtattcgtaggcacgcttgtccttcgacaccatgccgccgatgcgcggcagtatcttataggtatagaactcgtacagcacccggaacagccggttgcggggacgcgagaactccagtataacgaccttgcccccgggttttattgtgcgggccatctcgcgcaggccggcctccaggtcgccgaagttgcgcacgccgaacgctacggtcaccacgtcgaccgaagcgtccgagactcgcaggtgctccgcgtcgccaacatcgagcacgacccgctcgtcgaggccgcgggcggcgaccttgcagcgcgccacgtcgagcatcttttccgagaggtcgacgcccagcacgtgcacgtcccgtatgcggcgtgccatctcgatcgccaggtcgcccgtaccggtcgccacgtccaggatacggtgcgggcggctgcggcacacgatgcgcaccacgcggcggcgccagatgcggtcgatgttcatcgagagcgtatggttcagcaggtcgtatttgggtgcgatgttgtcgaacatttcgcgcacctcctccttcttggtctgtccggtgttatagggtttcacggtcattcgtaacggattgattcgtcgggtttcacggtcgatactatataggtcggcaccacgagcagcgcgacgatcgccgccacggcaccggcattcagcgccagccaccagccccaccccagcgaaatagggacttcggagagcagatacccctcggagctgagccgcacgacatggaaataccgctgcacgaagcacagccccagccccacagcatttccccacgccaggccgcgcagggtgatgaacgacgcccgccacaggaacacctgccgcagctggccgttgcgcatgccgaaggccttgagcaggccgatcatccgcgtgcgttcgagcacgaggatcagcagcgccgaggtcatgttgaaaaaagccaccacgagcatgatgacgattatcacggcggcattcacgtcgtgcgccttgagccagtcgaagatgctggcataaagttccgtcacgctcgtgacagccaggttcgccgtggcgtcgtcctcgtcgtagaggagcgtatgccccagcctgcgggcgaaatcgtccgccccggccagatcgtcggtaaagacctcgtatcccgaaatctcgtccggcgcccagtccgagaggcgctgcacgttgcgcaggtcggtcaggatgaccgtgttgtccatctcgtccatccccgacgagtaaatccccgccaccttgaaccggtcgcggcgcggcgtgtcgccggcctcgacgaagagcatctccacgcggtcgcccacgccgagcatcagccggtcggccaggctgcgcgaaagcaagatgtccttcgtgcggatcgaatcccccacgcggggcaaatccccgtcgacaagccatccgcggaaggccgaccagtcgtaggccgtatccacccccttgagcatcacctcgcccacggcgtcggccgtacggacgatgccgcccttgacggcatacggagccatcgaagcgaatccccgggtcgagcggatcagcccttcggtgcgggcgctgcggcgcacgggctccgaatcgagcgtcccgacaccccgcacgtcggtcacgacggcatgcgccgcaaaggccgttaccttgcgtgccacctcgtacttgaaccccatgatcacggccatggccaggatcatcactgccacgctcaatgccacggaaatcacggcgatacgctccatcaccccgggtttgttatccggggtgtgctgcgccgtccggcgggcgatgaaaaaggcaaggttcacggctgctgaatttgctggaaaatttatgcaaagaaacacaattatttcgtatttttgtccgaaataacccaattaattggaagccccgcttcgtgcaggcgggatccgggggggggcacggacacggagcccggcagctccgggaacggccgaaggcaaaccgggcacccccaagggacagcttccgacatgggtcgacacaaacatattcacgttattcggatgaaaaaacaggctttggtcacaggggccacatcgggcatcggacgcgccacggcgctccggctcgcggcggaaggctacgacatcatagcgacggggcggcgtagcgaaaggctcgaatcgctccgccgcgaaatcgaggcggcaggcggccgctgcacgacgctcacgttcgacgtccgcagcgaagaggccgtgcgccgcaatctcgaaccgctcgggcgcgtcgacctgctggtcaacaacgccgggcttgcggccgggctcgaacacatcgacaagggggatccggccgactgggacgccatgatcgacaccaacgtcaaggggctgctctatgtcacgcgcgtcatcactcccaagatggtggccgcaggcggcgggcacgtcttcaacatcgggtcgatcgccggcacggaaccctacgagaacggcgccgtatactgcgcttcgaagcacgccgtgcacgccatctcgcaggccatgcgcgccgacctgctcgccaacggcatcaaggtgacggagatccgtccgggcatggtcgagacggagttctccgaggtgcgcttccacggcgacaaggagcgcgccgaccgggtttacgacggcgtcgagccgctcaccggcgaagacatcgccgaggcgatcgcatgggcggcacaattaccggcccatatgaccgttaatgaaatggtactgatgccctcgcagcaggcgggcgcatattacacacacagaaaaaactaaacgactatgacacacatgcttttcaccctgctccaggcaggatactacgccgaaccggcctccggtgcggcacactattcggcggcgacgatgggaatgttcgtcctgatcatcgtcatcggtatcgccggctatgccgtgcaggcacgcctgcaatcggtcttccgcaaatattcgaaggtacagttccccggcggcctcacgggcgccgaggtggccgagaagatgctccgcgacaacaacatccataacgtcaaggtgacgcacgtgggcggaaacctgaccgaccacttcaacccgcagacgatgaccgtcaacctgagcgacagcgtctattcgtcgacgagcgtcgcagcggcagccgtggcggcgcacgagtgcgggcacgccgtgcaacatgcccggggctacgcccccctgacgctgcgctcgcagttggtacccatcgtgcagttctcctcgaccgcagccacgtgggtcatcatcctcggactggtgatcctcgccacgacgcagaacgaactgctgtgctggatcggcgtggggctgatcgccatgtcggcggtcttctcgctggtgacgctgcccgtcgaatacaacgcctcggcacgcgcgctggaatggctgcaggtcagccgcacgatgcagggcgcacagctcgcgcaagcccgggaagccctctcatgggcagcgcgcacctacctcgtagcagctctcagcgccatcgcctcggtgctttactacgtcttcctgatcctcgggcgacgcgactaaacggccgatgaatacccccgaaaaagactactcccaccggggatggatcgcggccctggcgctgatcgcagtgcttggggccgtgagttttatccccccgcaaagcctcggcggcgtcaagctccgccgggccaacatcctgtcggacatcctgtcgttcgaggacgccgcggcggaagccgccgaaccggcgctcttcgacgaggacgatttccacgtcgacatggcacaggtcgcccggcgcatcgaggccgagcgcatcgaagcggacacagcgccccgccccgtgcaaaccatcttcgaatggctgctgcggcaagacagctccggccgcagggcggtagtccccgacacggtgcggctcaacccggcgctcgtggcgatcgagcagttcgccccggccgattcgggacgtctcagggcattctacgacacgctgctctatgcccgccgtccggtgcgcatcgccgtactgggcgactcgttcatcgagggcgacatcctcacggccgacctgcgcgagaagctgcaacaggcctacggcgggggcggcgcgggcttcgccccgatggcatcgcccctgacggccttccggcgcacgatcaaaacccagtcgaaaggctggacggcatacaacatcatgcagcgcaaagcggcaccccagaacctgcgcgggcacttcttcgtctcgggctgggtgtgccagccctcggagggcgcctccacgcggtgggaaaacaccgactaccggcagcggctcgactcctgcaccgcggcacgggtgttcttcatcagccccggcgacagccgcatcgaactgacgctcaacgattcgctccgccgcgaattcgaggtcgaaggagccgccgccgtccggcaggtcacggtcacggcgccccatatccgttcgctggcattcaaggtgaactccgggacggaagggttcatcggctacggcgccgtcttcgaagccgacggcgtcgtggtcgacaactactcggtgcgcagcaacaacgggcaggcgatgttctggacaaacccgtcggtcaatgcgcagatcaacgcccacgcgggttacgacctggtaatcctgcaatacgggctcaacatcatgcagacgggggtacacaactacaccaactacgcccgacagatcgagaaaatggtcgtctacgtacagcagtgcttccccacggcggccgtgctggtactgggcgtgagcgaccgttcggtgaagaccgacgcaggcttcgaacccatggatgccatcccctacatgctcgactaccagcgcggagctgcggaaaacacgggcgcggcattctggcccacgtgcgatgccatgcgttcgctgggcggcatggaacagttcgtcgccaacggctgggccggcaaggactacacgcacatcaactacgccggcgggcgccgcgtggcctggtcgctcgtcgatgcgatcaacgccggggcgtacgaagcccatgccgccgctgaagccgcacgcatccgccgccaggccgagcaggccgtactcgacagcaccaggctgctgaagatcgaccgggagatgctgcccgtccgtgcaatcgaaaacctcaatgcaccccggaaatgacactccccgcaacggacggcatcatggaaaaactgcaggcgctgctctcgtacgacgcctcttcgccgctgattttcagcagcgggttgttcctgttcctcttcgccgggttcatgctcatatacaatgccttccgccgtgcgccgatggcccgcatcgtctatgtcatcctcttttcgctctatttctactacaaatcgagcggcatctatttcctgctgctcatcttcgccgccacgagcgacttcctcatagcgcagggcatctaccgcgtgcggagccgcaccgcgaaacggtggctcgtcgtactgagcgtcatggtgaacctcgggatgctgggatatttcaaatacaccaactttctggtcgacatcgccaaccagatgttcgggcaggggttcctccaattccagaacatcttcctgccggtcggcatctcgttcttcgtgttccagtcgatgagctacacgatcgacatctaccgcgggcagctcaaaccgctcggcaactggtgcgactacctgttctacctctcgttcttcccccagctggtcgcaggcccgatcgtccgggcccgggacttcatcccccagatccgccgcaacccggtcgtcgtgacgcgcgaaatgttcggcacgggagtcttcctgatccttacgggactcttcaaaaaggcgatcatttcggactacatctcgctcaatttcgtcgaccgcatcttcgacgagccgctgctctattcgggcttcgagtgcctggcgggcatctacggctatgccttgcagatctactgcgatttctcgggctattccgacatggcgatcggcatcgccctgctgctgggcttccgctttcccaagaacttcgacgccccgtacaagtcggccaccatcaccgaattctggcgcaggtggcatatctcgctctcctcgtggctgcgcgattacctctacatctcgctgggcggcaaccgcaaaggcaaactgcgcacctacggcaacctgctcgtcacgatggtgctgggtgggttgtggcacggtgcggcgatccgtttcatcctctggggcacgctgcatggcgtagcgctggcgctgcataaactgtggatggccgtcgtcccgggggccaaggccaccggggcgcagatgcactggtggagccgtgcggcgggcgtcttcttcacgttcaacctcgtctgcctgggctggctgatgttccgcgccgagtcgatgcagaccgtcgaactgatgctgcaccagatcttctccaacttcaacgtcccgatgatcccgcaggtcatcgcgggctacgcgggtgtcttcgccctgatcggtgcgggctacctgctccacctcatgccgggctgcgtcgaccgcgcggcacagcgcctggtagccaacgccccgctggtgttgcaggtcgtgatggccgccgcgatgatctggtgcgtgatgcagatcaaatcgagcgacatacaaccgttcatatactttcagttttaaaatgcgtatgacggccgccttgcatcccggtatgttcttcccgcggccgacggccgtgtttgcaagtctgaccccaccccaagcccctgctgagggaaagcttcccgcaatgcggcaaaaacagcccacagccatttacgacaaatccatcgacccatgtatactttcgaccacggcctgttcatggccctcaatttcgacggcggccccctgttcgaccgcataatgctcaccgtctcgggcacggcgatgtggctgccgctctatgcattgatcctgtggctggtatggcgccgcagcggctggcggggcatgtcggttttcctggtgctgatgctcctcgccctggggctgtcggacatagtctcgggcatcttcaagcacaacggcctgctgggcgacttgttgccgcagctcgaaccgcggccgcggccgatgttcacccccacgctcgaagggctggagatcacgcccgactcgctgcgtgcccttcgcagtgcggcagtgccgcacgactgggcggtacacgtcccgcccgaggccgtaagcggcatgtacggcaccgtctcggcacacgcggccacgatcgtcgcggtggccgtgctttcatgcggcgcaatccgccgcaagtggttcaccgccctgatggtcgtctgcaccgtcgtcatctgctattcgcgcatctacctgggcaagcatttcccgatggatctcgtatggggcacgctcgtgggctccgtactgggctacgccgccctacggggctaccgcaggctggcacagagccggaacagacgattcacccacccccggtgaagcatatttgcgcagaatttattaactttgcacggtcaatagtccaaacattcaaaaacacaggatatgagtatcgaactcagtgaacaggaacagctccggaggcagtcgcttgcagccctgcgcgagctcggcatcgacccctatcccgccgcccgctatgaggtgacggccacggcacgggagatcgccgacaactacgacgaggcccgaggcaactaccaggacgtccgcatcgcaggccgcatcatgtcgcgccgcatcatgggcagcgcctcgttcttcgaattgcaggatcacacgggccgcatccaggtctacatccgccgcgacgacgtctgccccgaaggagaccccacgctatacaacacggtgttcaagaaactgctcgacatcggcgatttcatcggcgtcgagggcttcgcgttccacaccaacacgggcgaactgtcggtgcactgccgcaagttcacggtgctctcgaagtcgatccgcccgctgcccgtcgtcaaggccaaggacggccagacgttcgacgccttcaccgaccccgaagtccgctaccgccagcgctacgtcgacctggtggtgaacccgcaggtgcgcgacgtattcgtccggcgcgccaagatcgtcgccacgatgcgccagttcttcaacgagcgcggctacgtcgaggtggagaccccgatcctgcagccgattccgggcggcgcctcggcacgcccgttcatcacgcaccacaatgcgctcgacatcgaccagtacctgcgcatcgccagtgagctgtacctcaagaaactgatcgtcggcggattcgacggcgtatacgagttcggcaagaatttccgcaacgagggcatggatcgcacgcacaaccccgaattcaccgtcatggagatttacgtggcctacaaggactacctctggatgatggagttcaccgagcagatgctcgaacgggtggccgtggccgtgaacggcacgacggagctgacgctcgacggcaagcagatctcgttcaaggctccgttccgccgcctgacgatgaccgacgccatccgcgagaaaacgggctacgacatcacggggcagagcgaggagcagctccgcgaagcctgcaagcgcctcggcgtcgaaatcgacgacacgatgggcaagggcaagctgatcgacgccatcttcgggcagtactgcgaggaggagttgatccagcccacgttcgtgtgcgattacccgcgcgaaatgtcgccgctctgcaagcgtcaccgctcgaaccccgacctcacggagcgtttcgaactgttcgtgaacggcaaggagctgtgtaacgcctactcggagctcaacgacccgatcgaccagctggaacgcttccaggagcagctgcggctgagcgaaaagggcgacgacgaggccatgttcatcgacatggatttcgtacgcgcactggaatacggcatgccgtcgtgctcgggcatgggcataggcatcgaccgcctcacgatgttcatgaccgaccaggcttcgatccaggacgtgctcttcttcccgcagatgcgccccgaaaaaaaggtcgtgaacgatcccgtggagaaatacaccgccgccggcatccccgaggagtgggtgcccgtcatccagaaaatggggtacatcacggtcgaagcgctgaagaaactcgccccgggcaagttcttcaacgacctgtgcggcttcaacaaaaagaacaagctcggcctgaaggccccctcgatcgaggaggtcaaaaaatggtgcgaggaataacgtgacaactcggattttaacaataaaaacctaagaaaatgagaaagaaaattgttgccggcaactggaagatgaatacgcttcccgccgaaggtgtagaactggccaaaggcatcgtagccggccgcggcgaggtatgctcgtgcgtcaacttcatcgtgtgcccccccttcacgcacctttcgcaggtcgccgaagcactcaagggttcggacatcgccctcggggcacaggactgcgccacggaggccaaaggcgcctatacgggcgagatcgccgcttcgatgatcgcggcgctgggctgcaaatacgtgatcctcggccactcggagcgccgccagtactacggcgaaacctccgctacgctcaacaagaagatggcgcaggcttacgccaacggcctgaccccgatctactgcgtaggcgagaacctcgaagagcgtgaggccggcaaacacttcgacgtggtgaaggcccagatcgaggaggtggtttacaacctcaccgaagaggagtacaagaacctcgtgatcgcatacgagcccgtatgggctatcggcaccggcaagactgcctcggccgagcaggcacaggaaatccatgcttacatccgccaggtgctggcagccaaattcggcgcggcagcacaggataccgccatcctctacggcggttcgtgcaagccctcgaacgcaccggagctcttcgccaaggaagacgtcgacggcggcctgatcggcggcgcagccctcaaggccgaggatttccttggcatcggcaaaggcttcgcaaaataaaccgactccgacacacagaacgaatccccggaacgttgcaagttccggggattttttcaaactttccttgaaaaccattggcccgcacgaagccggaagagggacatgaaagcggatagtcccgataagggcaccattgcccaagtctatctgctccgcccggtactcccgcacctccggacacggatacccaaggtcgaaaacataaagatgccggtcgactaagggatcgaaaagccccggttcgtccgtccgaaccggcaggcaaccgccctccccggcaaacaagcaaccgatacccggccaaaaagcagggctcacgacaagccccggcatcccggacaaaaaaagggacaaccccgttgtgggtcgtccctttttctgacagcagacgcgaatttacatcttcttgcctacgttggttttcttggcaaccttcggggctgcaaccttggcagacttcggagccgcgggcttcgcagccttcggagcggcagcctttttcggtgcggccttcttggcttcgccttccacgaccgtagcctcctcgaccgcgtcggtcttcttggctgcgggcttgcgcgaacggcgcgtcttgggcttggcttcggcagcagctgcgggagcgatgcccagcgtgtaagcgtcgttgaagtcaacgaactcgatgatgcacatgtcggcagcatcgcccagacggaagccagtcttcaggatgcgggtatagccgcccggacgctcggcgatcttcggagcgatggtgcggaacaactcggttacggcctctttctgcttgaggtacgagaagacgatgcggcgcgagtgcgtcgagtcatccttcgacttggtcaccagcggttcgatgaactggcgaacggccttggctttggcaacggtagtctcgatacgcttgtgcaggatgagcgacgaagccatattcgacatcaacgctttacggtgtcctgcctggcggccaagatggttgaaattcttattgtgtctcataattaatctttgtcaagtttgtagattgatacgtccataccgaacttcaggttgagcgaggtcagcagctcgtcgagctccgtcagcgatttcttaccgaagttgcggaacttcagcaggtcattgcggttgagcttcacgaggtctcccacggtgtccacatctgcggctttcaggcagttcagggcgcggacgctcagatcctgatccgaaagcttggtcttcagcagctgacgcatgtggagtacatcctcatcgaactcttcggtaccgttggtatcctccatgttgacggtgatcttctcgtcggagaagagcatgaagtgctggataaggatctttgcagcctctttcagagcctctttggggtgaatcgacccgtcggtagtaatctccaggttcaacttctcgtagtcggtcttctgctcgacacggtagttgtcgatggaatactttacgttcttgatcggcgtgaagatcgagtcgatcgggagggtgccgaactcgcactcggcgggggtattctcctctgccgaaacgtagccgcgccccttgccgatcgtgagggtcatctgcatcttcgtgccgggcgcgaggtggcagatcaccagatcggggttcaacaccttgaagaacgaaaggtaatttgaaatatatccggcagtcagctccgtcacacccgcaacgttaatggaaaccttctcggcatcctgattatcgactgtgcggataaaacgaacctgcttcagattgaggatgatgttcaacatatcctccatcacgccggggatagcggcaaactcgtggtcgacaccggctaccttgacagtcgtgatcgcgtaaccctcgagcgaggagagcagaatacgacgcaaagcgttaccgacagtcataccgaacccgggctccagcggtcggaattcgaactttccgaacgacgaagtggattcaagcataataaccttttcaggtttctggaatgctaatattgccataatatattcaatttgtttgattactacttcgagtacaactcgacgatgagctgctccttgatgttctcggggatctcctcgcgctcgggcttctgcaggaacttgccgctcatcgaggcattgtcccactcaagccaagcatagcggctcttcgaaccgccggccagagatgccgagatcacttccaggctcttcgacttctcgcgaacggacaccacgtcacccgcacgcagcgagtacgagggaatgttcacgacgctgccattcacgcagatgtggcagtgcgaaacgagctggcgggcagctgcacgcgtcggggcgatacccaagcggtaaacaacattgtccaggcggcattcgagcagcttcagcaggttctcgcccgtgataccgcccatacgcgcagcctgatcgtaggtacgtgcgaactgcttctcgagcaggccgtacgtatactttgccttctgcttctcgctcaactgcgtgccgtactccgacaccttcttgcgcttacgcgccagaccgtgctgtccgggaggaaagttgcgtttctcaagcaccttgtccgccccgtaaatagcttcgccgaactttctggcgatcttcgattttggtcctatgtattttcccattgttctgacttttttaaaaccttagaaatattccttaccacgacaccgattatacgcggcggcggttaggagcacggcaaccgttgtgcggcagcggcgtaacgtcgatgatctccatcacctcgataccggcgccgtggatggtacgcacggccgactcacgaccggcacccgggcccttgacatacactttcactttgcgcaggcccatgtcgtaagcgacctttgcgcagtcggccgaagcggtctgtgcggcatacggagtattcttcttcgaaccacggaaacccatcttaccggccgaagaccagctgatgacgtcacccacctcgttggtgatggtgatgatcacgttgttgaaagtggagtgaacgtaggcattgcccagggcaccgaccttaacaacctttttcttaactgttccagttttctttgccataattctctaaagattactttgttgcctttttcttgtttgcgacagtcttcttgcggcccttacgggtacgtgcgttgttcttggtcgactgaccgcgaacgggaagccccaggcggtgacggatgccgcggtagcagccgatatccatcagacgcttgatgttgagctggacggccgaacggcattcgccctcgactttgatacccaggtcagcgatcgtcgaacggatcgcaccgacctggtcgtccgaccaatcctggactttgaggtcgtagctgatgccagcgacctcgagaatcttgcgggccgtcgaacgaccgataccgtagatataggtcaggccgatctcgccccttttattttttggtaaatctacaccgactatacgtgccatataaaatctttttcttttttactaaaccgtttaaacattacccttggcgcattttaaacttgggattcttcttgcaaatgacgtagagtttccccttacgcttcacaatcttgcaatcctcgcttcttttcttgatggatgcttttactttcatgattttcaagcaatctaatgttatttgtaccggaaagatatacgccccttcgtcaggtcatagggcgtcatctccacttttaccttatctccgggaaggatcttgatgtagtgcatacgcatcttccccgagatgtgggcggtgagcacgtggccgttgtccagctcgacgcggaacatcgcgttggacaaggcttcgataatcgtaccgtccctttcaatagcagcctgttttgccatagagtcttacttgtttattgcctgttcgatgatactaaagtccgtcagcacgtcgggcccgtccttacgaaccgcaacggcgaactcgtagtgcgccgcgggtttatggtcgcgcgtgcggactgtccagccatccctttcaaaaaccaccgctttggtacccatatttatcatgggctcgatacagatgaccattccttccttgaggagcggccccctgccgcgtgctccgtaattggggacaccggggtcttcgtgcattttccgccccaacccatgtccttccaattcccgcaccacaccgtagccgaaactttcggcgtactcttgcacggctgccgacacgtcgccgacgcggttgccggccttagcctgtgccgtacctttataaagagcctctttggtgacctccataagctgcctaacttccccggcaacctctccaacggcgaacgtatacgccgaatcaccaacaaaccccttcataaacgtaccgcaatcgaccgaaacgatgtcgccctccctgaggacgcatttcgaggatgggataccgtgaactacctgttcgtttaccgatatacacaacgaagcgggaaatccctgatacccgaggaaggcgggaactgctccgtgtgcgcggataaaatcctcggcaaccgagtccaaaaacttggtggtgacacccggccggatgtggcgacccacttccgccagtgtcttcgacaccaggatgttgttctcgcggagcagctctatctcctcgtctgtctttaaatatatcattctcttcgttaagaactcttcgggaaaaactcctaatgacgaccctggatacgcccggtcttcatcagaccatcgtaatgacgcatcagcaggtagctctcgatctgcttcagagtgtcgagcaccacaccgaccatgatcagcagcgacgtacctccgtagaagtaggcgaacgcctgctgaatgcccaggaacttcatcgccagtgcgggcaggatcgccacgatggccaggaagaacgagccggggagcgtgatacgcgtcatgatggtgtcgatgtagttcacggtctgcttacccggtttcactcccgggataaagccgccgtttcgcttcatgtcatcggccatcatttgggggttgatgataatcgcggtgtagaagtaggtgaacgcgattaccagcactgcaagcgtgaagttgtaccagaaaccggtcatcgagctgaaagcagccgcgaaggccgtaccggagaacagcgccgggataaacatcagagcctgcgcgaagatgatgggcatcacattcgcagcattcatcttcagggggatgtactgacgtacaccgccgtactgtttgttaccgacgatacgctttgcatactgcacaggcaccttgcggactgcctgtaccagggcgatcgtagccatgaagaccaggaacagcaacaccagttcgaggataagcatgatggcgctaccgctagcggtctggaaacgcgcgttgacctcggccaacagggcgtggggcagacgggccacaataccgatcatgattatcagcgagataccgttgccgatacccttgtccgtgatcttctcgccgagccacatgatgaacatggtaccggcgatgagaatcgtcgtcgcataggctacgaagccgaacgagttgccgtaaacgaatgcagagggcacctgatggtacaggttggcgatatacgccgggccctggaggatcagcacgccgatggtaaggaagcgcgtccactgattcatcttgcggcggccgctttcaccttccttctgcatcttctggaaatacgggatcatcatacccatgagctggatgatgatggaggcggtgatgtacggcatgactccgagtgcaaagatagccgcattgccgaatgcaccgccggaaaagacgttcagcagacccagaagtccgttgccgtctaactggctggcaagcgccgacccctcgcccagggcgttggggttgatacccggaatcaccacgaaactacccaagcggtagaccagcagcagcccgatcgtgtagatcacacgtttgcgcagctcctcgatcttgtagatattcttgagcgtttcaaccaatttcttgttggtcgccaaaagagcgattaccactaaaaagacgataccaacaacgagatactgattcataattttcggtttctagggttcttacagtttttcgacgctgccgccggctgccacgatgaccgcctcggcgctcttcgagaatgcgtgagccttcacgctcagcgccttggtaaccgtaccgttaccgaggattttcaccttgtcgttcgacgagatgaaacctgcggccacgagcgtgtcgaccgtgatctcggagagcgacttcttggctgccagctcctcgagcgtcgagaggttgatagccttgaattcgacgcgcttcaggttggtgaaaccgaacttgggaagacgacgctgaagaggcatctgaccgccctcgaagcccagtttacgcgagtaacccgagcgcgactgcgcacccttgtggccacgcgtggccgtgccaccgtgacccgaacctgcaccgcgaccgattcgcttgtcgtggtgcgttgaaccctttgcaggtttgagattattgagttccatcgtaaaaattacttcttagctgttaaacttattctgcggcctcggcagcttcggctttcttggccttggatgctgcagccttctttacggctacctcctcgactttgacgaggtgcttcacgcgctcgatcatacccttgatgatcgccgagtcgtcgtgctcgacgctcgcgttgatcttcttcagccccagcgcgtcgaggttcttgcactgacgctcggtagcgccgatgcggcttttgacctgggtgattttcaatcttgccatttgtctctacaaaattaaccgttaaacaccttgtccatcgagatgccgcgcagacgggcgatgctgtgtgcgtcacgcagttcgcacagggcgccgatggttgccttcaccaggttgtgggggttcgacgaacccttgctcttggcaagcacgttcttcacgcccaccgactccagcactgcacgcatggcaccgccggcgatgatacccgtaccgggggcggccgggcggatcatgacgagcgaaccgccgtaacggagctcctgtttatggggaatcgtaccgttgataacggggatcttcaccaggttcttctttgcgtcctccacgcccttggcgatggccgactgaacctccgaagccttgcccaagccgtagcccacgacaccgtcctcgttacctacgacgacaatggccgagaaactaaatgtgcggcctcccttggttaccttggtaacacgctgaatgcttacgagtctgtccttaagctcgaggtcgctggtgcgtactttctttatgttggtatttgacataatcgcttagaatttaagaccgccttcgcgtgctgcttcggccagctgtttaactcttccgtgatacaggtagccgttgcggtcgaacgctacggtcgaaatgcctttggcggcagcgcgctcagcggccagtttgcccaccagggcagccacgtcgcacttgttcttgccggcggcggcttccgccacctccttgtccagcgaggatgccgtggccagggtcacacctgcgaggtcatcaataaactgcacgtagatctgcttgttgctacgatatacagtcatgcgaggctgttcgggcgtaccgctcacgatcttgcggatacgcatcttgatcctctctcttctttctatcttgttcagtgacataactctaaactatttactatttagcacctgctgatttacccgccttgcgacgcagctgttcgccgacgaacttgatacccttgcccttgtacggctccggcttgcgcagcgaacggatcttggcagcgacctggccgacgagctgcttgtccatgctcttcagcgttacgatcgggttgcccttcttctccgtcacggccgtagcggtaacctccttgggaagcatgaaatgcgtatcgtgcgaataaccgaggctcatttcgaggatctggcccttgacttcggccttgaaaccgacgcccacgagctcctgtttgatttcataacccttcgacacaccgacgaccatgttgttgatcagcgcacggtacaggccgtgcagcgaacggtggcggggctggttggtaggacgcgatacgagcacggcgggagcctcgttgcccgtgtgaacgtccttgtgcgtgccgacctctaccttgatgtccgagtcaactttctggctcagcgtcccgagtggccctttcacgcttaccacattgtcggccgaaacctctacggtaacgccggcaggcaggtttacaggtaatttaccaattcttgacattgttcttgcgtttaaaaatttccgttagtagatgtagcacagcacctcgccgcccacgttttccttgcgggccttggcgtcggtcatgatgcctttcgaagtcgacaggatagcgatgcccaggccgttcagcacgcggggcatatcccccaccgagacatactggcgaaggccgggacggctcacgcgcttcaggtctttgatggcgttgcccttggtggcagcgtcccacttgagcgcgattttgatcgacgggtgacctttctcgtcggtgtcgaatttgtaagcgaggatgtaaccctgctcgtaaagaatcttagtgatttcctgcttaatttttgagccaggagcttcaaccaccttgtggttggctttcactgcgtttctaattctggtcagaaagtccgcaataggatcagtcataacgaatagaagttaaaaattaaagtaataagttaattatttgttcttcagcaccttggaatccacccggattcaccgccgcctcggatgtttcattgttttgcgcctcattcccagcgccttcgcgcccttcgcacgggggttacgcccggggtataaagcgcgcaaatatacgtataatttctcaaaaaaccaagctaacgccctgttttcggcgtttttaggccccggccccggaatacggacaatgttagcacggatgcgttgctaacataacccgtacaaatccccgttcggcaatgctgccgatgacccttcggaagagagccgccacaatcggcgatacccctcctcggcccttcggtcgagaaatttgtaaccaaatgcctaacccctcgatttccgccccgccgccgagaagttaccgcttgcggcggcactttcctcgacattgcgacgtaactactcgggttctgcacccatataagccccgattccttcggaaagagggaacggcaggcagcccagcggccgcaccatcgtcccggcatttcaccgtccggtacaggaactgctcctgtccggccttttcccacgggcatacgccctcagcatccagactcatttccgggattctccgccgccgcgcagatcggcacatccgcacctcctgcgccggccgcatccctgcggccccggcctcgcatcccggcagaaaaacggattttcggataccgggattcccggcatccgaaaatattaccagcttgctttcttcacgccgggaatcaggcccttcgaagccatctcgcggaactggatacggctgatgccgaacaggcggatgtagcctttgggacggcccgtgatcttgcagcggttgtgctggcggatgggattcgagttgcggggcagtttcgacagtgcgatccaagcctcctcgtgatccatctcaccgctcttcaccttggcagcaatctcctcgcgcttgtgagcatagcggtttgcgagtttcacgcgttttacctcgcgtgccttcattgactcttttgccatagcttattgattctttttagcgtttttgaaagggaggccgaattcgcggagcagggcatacgcctcctcgtcggtcttggccgtggtaacgaacgtaatctccataccgaagatcttggtgatcttgtcgatgtcgatctccgggaagatgatctgctcggtgatgccgagggtatagttaccctggccgtcgaacttctcattgatacccttgaaatcgcggatacggggaagtgccacggcgatcaggcgctggaggaattcgtacatcttcgtatcgcgcagcgtcacgcgcacgccgatcggcatgcccttgcgcagcttgaagttggagatgtccttgcgcgaacgcgtctgcacggctttctgacccgtgatctgcgtcagctcggcctcggccacgtcgatgagtttcttatcggcgacagcctgtcccataccctggttgataacgatcttcgtgagcttcgggcactgcataacgctcgagtaaccgaactccttcataagggcagctacgatctgctccttatactgtgtcttgagtgtaggtacgtatgccattatttgatctcctcccctgactttttagcgtaacggactaatttaccttttgcattgagcctgcgaccgactttggtgggtttaccgcctttggggtcgagcacctgcaggttcgatacgtggatcggcgcttctttctcgacgataccaccctgggggttctgcgcattgggtttggtggccttcttgcaaaggttcaccccctcgacgatggcacgctgcttttcagcttcgaccttcaggactttgccctgctggcccttgttgtcaccggcgatgacctgcaccatatcccctttcttaatatgtaatttcactgacatatccgaaattgtttttatgattacaatacttcgggtgcgagggagataatcttcatatactggtcgcgcagctcacgagctacggggccgaatatacgagtaccgcgcatttcaccctggttgttaagcagcaccacggcgttgtcgtcgaaacgaatgtacgaaccgttggcacgtctgatttccttggtcgttcttacgacgactgctttcgacacggcacccttcttgacatcgcccgaaggagtcgcgctcttgacagccaccacaatcttatcgccgatagatgcgtagcggcgtttggtaccgcccagcacccggatgcagagaacttcctttgcaccgctgttatcagctactacgagtctactttcctgctgtatcataattacttagctctttcaataatttgtactaatctccaacgcttcgttttgctcagcgggcgggtctccatgatacggacggtgtcgccttccttgcaggtctcgtcgagtgactcggcgacgaacttcgtcgtcttgttgacgaacttgccgtagatcggatgcttcaccttacgtgctactgcaaccacaatggttttctccatcttgttgctgacaaccaccccaatacgctcttttctaagatttctttccatagctattccttattaggcgtttttttgacgcaggattgtcagcatacgagctatatctctgcggtttttcttaatgatagaagggttctcgacgggggacaccgcgtgctgcaccttcagctttgcaagctgagccttctcagtctcgatgcgctcctgcaggtctttgatcgaaatatccttgatttctgcacttttcatcttgtcgtctcgttagattgtggtttcgacgtagtcacgccttacgataaacttggtggtaatgggcagtttctgggcacccaggcggagcgcttcctgcgccacttccaggggcacgccctctgcctcgaagagaatacggccgggagtaacgggcgccacgaacccttcgggattacccttacccttacccatacgcacctcggcgggcttcttcgtgatgggtttatcggggaagatgcggatccagagctggccttcacgcttcatgtaacgggtgatggcctgacgcgccgcctctatctgacgacctgtgatccatgcggattcaagtgctttgattgcgaacgaaccggttgcaagttggtttcctctctgagcaatacccttcatgcgacccttctgcattctcctaaatttggtctttttcggctgtaacattgttgttttgctttaaaaaggtccgacttacttattattgttgttgcgacgacggtcaccgccacgatcgccgcgatcacgccggtctccgcgacggtcgccgcgaccacgacggtcgccgcggtcgccacgctcaccgcggtcgcccgagggagcctgcgccgacgcgcctgcgatttcgaacaggtcgcgcttgccgtacacgatgccctggcagatccagaccttcacacccaggatacccactttggtgagcgcctcggtcaggcagaaatccacgtcggcacggaacgtgtgcagcggaatacgaccctcctttatggtttcgctgcgggccatttcggcgccgcctacacggccggaaacctggatcttgataccctcggcacccatgcgcatggtcgacgctacggccgtcttcacggcgcggcggaacgatacgcggccctccagctggcgggcgatgttctggccgacgatcacggcatccacctcggggcgcttcacctcgaagatgttgatctggatctccttgccggtgagcttcttcagctcttccttcagtttgtcgacctcctggccgcccttgccgatgatgatacccggacgagcggtggaaatggtcaccgtgaccagcttcagcgtacgctcgatgatgatcttcgagatgcttgccttggccagacggacattcaggtatttgcggatcttggcgtcctcgaccagcttctcggagaagtccttgccgccgaaccagttggaatcccaaccgcggatgataccaagacgatttgctatcggattaactttctgtcccatctgattacttgttttctacggttaccattttgtcaactacgatcgtcacgtggttcgaacgcttgcggattcggtgagcgcggccctggggcgcagcctgaatacgcttcagcatgcggccgccgtcaacgaacacctctttcacacacagtttcgtgtcttccaggcgctcgttctcgttcttggcctcccagttggcgattgccgacttgagaagtttctccatgcggatcgacgcctccttcttcgaaaaacgaaggatgcccaatgccttgttgatctccacgccgcggatgatgtcggccaccaggcgcatcttgcggggagaggtcgggcaatcacgcagaatagcgattgccttctgcttcttttcagccttgattttctcggcttttattgcttttcttgcacccattttctacctattttttcttgttacctgcgtgaccgcggaagttacgggtgggggcaaactcaccgagcttgtgccctaccatgttctctgttacatacaccggaataaacttgtttccgttgtggacagcgatcgtctgacctacgaaatcaggcgagatcatacttgcacgcgaccaagttttgatgaccgactttttgttgccttccgcctgggcgactactttcgcttcgagcttggggtcgataaacggtcctttttttaatgaacggctcattatgtactcttatttaattattttttcttcttggaaataataaacttcgaggtcgtcttcttcgggttgcgagtcttgtaacccttagccagcagacccttgcgcgaacgggggtgaccaccggatgcacggccttcaccaccacccatcgggtgatccacggggttcatcaccacgccgcggttgcgcggacggcggccgagccaacgctcacgacctgccttgccggagctttcgaggctgtggtcgacattcgacacgacgcctaccgtagcacggcaagttacgagtaccatacgagtctcgcccgagggcagcttgatgatggcgaatttgccctcacgagccagcaactgggcgtaagaaccggcggaacgagccatggcggctccctggccggggtagagttcgatattgtggatgaccgtacccagcggaatctcgctcaggaagagcgtgtttccgacctcgggagcaacgcctgcgccactcattacggtctggcccacctggaggccgttcggtgcgatgatgtagcttttctcaccgtcggcgtataccagaagtgcaatacgtgcagtacgattggggtcgtactcgacagattttacagttgcagcaatgccgtccttcgtgcgcttgaagtcgatgttacgatacatctgcttgtgaccgccgccgatgtagcgaaccgtcatcttaccagagttgttacgtccacccgagctcttcttggggctgagcaacgatttctcaggcttgttcgtcgtgatttcctcgaacgtaccgataatcttatgtctcgtacctgcggtaacaggtttaaatttttttactgccatctccgttagatattactgtaaaaatctatcttatctccgtccttcaaggtgacgatagccttcttgaagttgttagcgcgaccctccaagagaccggccttggtgtagcggctcttgagtttgcccatgtagttcacggtgttcacatccgtcacgacgacgttgtacatctgttctacggcattgcgaatctgcagcttgttagccctcacgtcaacgataaaaccgtagcgattcaacttttcgccctgaatcgtcattttctcggtcaaaaccggcttaataataatttccattgtgtgtcttgcgtttttaagctaacatcgtattcaatacattctcagcgccttccaccatcacgatcgccgaagcgttcatcacgtcgtacgtgcagacgttctgcgccagcacgggctgtacgtaggggaggttgcggcacgagagctgaaggtttgcattggactccgggagaaccagcagcacctttttgtcggctactttcagcgcatcggccagggcaacgacggccttggtcttgggggcctccatcgagatgggctccactacgctgatgacgccggcctgtgccttgtaggtcagtgcgctgcggcgagccaactgcttgagcttcttgttgagcttgaagctgtaatcgcggggctggggaccgaagatgcgtccgccgcccgggaagaggggggacttgatgctgccggcacgggcaccgccggtgcctttctggcgcttgagcttacgcgtcgaaccggcaacctcgttgcgctgcttcgacttgtgcgtaccctggcgctggtcagcgagatactgcttcacgtccaggtagatagcgtggtcattagcctccacgccgaaaacggcatccgaaaggactaccttacgacccgtttcctttccttgtgtgtttaaaacagctaattccatactacttctcaattgttaaataagcaccttttgcacccgggatcgaacctttcacgaggataaggttgctttcgggaataactttcaaaacacgcaggttcaaaaccttgacctgctcgccacccatctggccgggcaaacgcttgcccttgaagacacgcgagggataggacgacgcacccagcgaaccgggtttgcgctgacggttgtgctggccgtgggtctggccgcccacgccgccgaaaccgtggcgtttcacaacgccctggaagcctttacctttcgatatcccggtcacgtcgacccagtcttcctccgagaagaggtctacggtgagcgtgtcgccgagattcacttcgggcatacccttgaattcagccatcttgcgcttgggggtagtgccggctttcttgaagtgacctaacaaactgctgctggtgtgcttttcacttttctcgtcataggcaatctgtaccgcttcgtaggtatccttctccacggtcttgatttgcgtaacaacgcacggcccagcctcaatgacagtgcatggtatattcttaccctcggcactgtaaacggaagtcattccgattttctttccaataagtcctgacatttgttgtcgattgtttgttataaataaagtgatctttcgtgctatactaatatacgtacaagccttccgttatcacactttgatttcgacctccacacccgaagggagttccagcttcatcagtgcgtcgatcgtcttgggcgtcgacgaatagatgtcgaggatacgcttgaaggtgcagagctggaactgctcgcgggctttcttgttgacgaaagtcgagcggttcaccgtgaaaatctgcttgcgcgtgggaaggggcaccgggccgcttacaacggcgcccgtgctcttcacggtcttcacaatcttctcggccgacttgtccacgagattgtgatcgaatgactttaacttgattctaatcttctggttcatatgtttgcttattctatatccttacgtttaccactcgctttctcgatgatctccttagccaggttggcaggaacctcctcgaagtgcgagaactccatagacgaggttgcacggcccgacgagatcgtacgcagtacggtcacatagccgaacatctccgacaggggaaccttggctttcaccacgcgggcggtgcctttcgactccatgccggtgatctggccgcggcgcttgttcaggtcgccgataatgtcgcccatgttctcctcgggggtcacgacctccacggacatgatgggctccataatcaccgagccggccttgggggcagcgttgcgataaccgttgcgggcagcgatttcgaacgacagctggtcggagtccacggggtggaacgaaccgtcgagcagcgtaatcttcatcgagtccatcttgtaaccggccagcgcaccgttggtcatcgccgaagcaaagcccttctgcaccgcagggatgaactccttgggaatattaccgcccttgacctggtcaacgaacgtaaggcccatcgcaccgtcgtcggcagggccgatctcgaagatgatgtcggcgaacttaccacggccaccggtctgcttcttgaacacctcgcggtgctgaaccgtcttggtaagcgactccttgtagttgacctggggggcaccctggttgatttcgacaccgaactcacggcgcagacggtcgacgatgatgtcgaggtgcagctcacccataccgctgatgacggtctggcccgaatcctcgtcggtgtgaaccgtaaaggtggggtcttcctcagccagtttcgacagggcgatgccgagcttgtccagatccttctgggtcttgggctcgacggccagaccgatcaccggttcggggaaggtcatctgctccagaacgatcggtgcgttctcggcgcagagcgtgtcgcccgtatggatctccttgaaacctacggcagcgcagatgtcgccggccgatacggtctccatggggttctgcttgttggcgtgcatctggtaaatacggctgatacgctcgcgcttgccgctgcgggagttgagcacgtacgaacctgcatcgagcttacccgaatagatacgcacgaagcacaggcggcctacgaaggggtcggtggcgatcttgaatgcgagaccgcagaacggatcgttctccgatgcatggcgcacctcttcctgctcggtcttggggttgatacccgtcacggcgggcacatccagcggcgagggcaggaacgcaatgacatagtcgagcagtttctgtacgcctttgttgtggaacgacgaaccgcagagcatcggaacgacctgcatcgagatcgtagccttgcggatggctgcgagcagttcctcgggggtgatcgaatcgggatcctcgaagaacttctccatcagcgcctcgtcggtcgaagcgacctcctcgatgagtttcgcacgccattcggcagcctcctcggccatcgaggcgggaatctccttcagttcgaagttatcgcggacggacttgtcgtcgtagtaatagatcgcgttattatatataaggtctaccaatccttcgaacttgtcctcggcaccgatcggcaggacgaccggaagggccgtagcaccgaagtgctccttgatctgtgcgcagactgccaggaaatcggcgcccgtacggtccatcttgttgacgtagccgatacgggggacattgtacttgtccgcctggcgccatacggtctccgactggggctctacgccgcctacggcgcagaacgtcgcaacggcgccgtccagcacgcggagcgaacgctccacctcgaccgtaaagtcgacgtgtcccggggtgtcgatcaggttgatctggtactgtttgtccttatagttccagaatgcggtggtagcggccgaggtaatggtgataccgcgctcctgctcctgaaccatccagtccatcgtagcgccgccttcgtgtacctcaccgatcttgtgggttttacccgtgtaaaaaaggatacgctccgacgtggtggtcttaccggcatcgatgtgtgccatgataccgatattgcgagtgtaatgtaaatctctggttgccatctgttcggtctccttattagaatctaaagtgtgcgaatgccttgttggcctcggccatgcggtgcatctcctccttgcgtttgaaggcggcaccctgctggttgaaggcatccattatctctgctgagagcctatctgccatcgtctttccggcgcgcttgcgagaatagaggacaaggtttttcatggaaatagaaatcttgcgctccggacgaacctccataggaacctggaacgtcgcacctccgatacgcttcgatttcacttcgacttggggtgtgatgttctccagggcctgtttccagatttccaggggagatttatcagcatccttcatcttcttgcccaccagttccaacgcatcgtagaaaatggtgtaggcaatactcttcttaccgtccaacataaggttgttgacgaaacgggtcacagccacgtcgccgaacttgggatccggaagtagaattcgcttttttggcttagcttttctcattgtttattcgaaaattgtctaattaatgtttctcgtgattatttacctgccttggggcgtttcgcaccgtatttcgaacggcgctggcgacgaccgtcgacacctgccgagtcgagcgcaccgcgcacgaggtggtaacgtacaccggggaggtctttcacacgaccgccgcggacgagcacgatggagtgctcctgcaagttgtgaccttcaccggggatgtaggcgttgacctccttgccgttggtcaatcttacacgcgcaaccttacgcatagccgagttaggcttcttcggggtcgtagtgtacacacgggtacatacgcctcggcgctggggacacgctgcgagtgccggggacttgctcttgtcctccatgctcactcgaccgtttctcactaactgttgaatagttggcatttcttaaactgtcctttaattgttaaaaaatctatctccattgtccaaaatggactgcaaaggtacgcaatttttcggaaatacaatatatatgcacatcttttttcgcctttttccagcattttagccggcttgcgattctttttacttatacaattcacaaaacaataaacatcggttatacaaaattcaacaaccggttttccatcagcacgatagcggcttcgcagacagcagggaagagcggcacggactttgccccgcatggcggatgcggatccccgcggcggccaccgcccgtccgggggcaggacatgacaacccgcggcaaagcggccgcaagaaaaatgacagccgccaggaaacacctctcacacggcctcttgctgctgctcctcgcccccgtgctgctccggcgacaagggcggaacccggccgaaacctgcgggcttcgctccccataccgcaggctgcaagacaccgggcgggaaagccgtggcgacgctccgggaaaacgacacagagaagtcgacatgcccagcaacggccacagtcacagcaaagcctattcgatatgcgtcataccgcgctacgactgaccggcagcaccgccgaaacagcgactggacacgaccaaaacggctgcgtcccgttttttatgccgcgacgccgccaaaaagacgacaaaacaagaaacttttgctatttttgcaggaaaatccgaaacaaaccgttacgaagagctatggagtacaatttcaaggagatcgagcccaagtggcagcgccgctggcaggaaaataaaacctacaaggtcgagaccgacccgtcgcggcccaaattctacgtgctcgacatgttcccctacccgtcgggcgccggcctgcacgtaggccatccgctgggctatatcgcctcggacatctactcgcgctacaaacgccaaaaaggcttcaacgtcctgcacccgatgggatacgacgccttcggcctgcccgccgagcagtacgccatacagaccggccagcaccccgccgtgacgaccgagcggaacatcgcccgctaccgcgagcagctcgacaagatcgggttctcgttcgactgggatcgcgaggtgcgcacttgcgaccccgcctattacaaatggacgcagtgggcgttcctcaagatgttcggctcctattactgctatgacaagcagcaggcgcgcccgatcgaagagctgaccgcggccttcgaacagggcggcacccagggactgaacgtggcctgctcgcaggaactgcatttcacggccgaagaatggcgcgccatgccggaggaggagaaggagcggacgctccacaactaccgcctcgcgttccgtgccgacacgatggtcaactggtgcccgaagctgggaaccgtgctcgccaacgacgaagtgcacgacgggctttcggtgcgcggcggccatccggtcgaacagaaacggatgaaacagtggctcctgcgcgtgacggcctacgcccagcgcatgctcgacgggctggacaggctcgcctggagcgactccctgaaggagatccagcgcaactggatcggccgttcggagggggcccaggtcttcttcgacataaaggattcggcgcgcaaactcgaaatattcaccacccgccccgacacgatcttcggcgtgacgttcatggtcatcgcccccgaacacgagtgggtgggcgaactgaccacgcccgacaacaaggcggccgtcgaggagtacatctgccaggccaagaaacgctccgagcgtgagcgcatcgccgagaccaaacgcgtaagcggcgtggcgacaggatcttacgccatcaatcccttcaccggcaaggccatcccgatctacatctcggactacgtgctggccggctacgggacgggggccatcatggctgtccccgcccacgactcgcgcgactacgccttcgcccgccatttcgggctggagatcgtcccggtagtcgaaggcggcgacatttcacaggagtcgtacgacgccaaatcgggcaaagtaatcaactcggatttcctcgacggcaaggatgtaaaggaggcgatcgggatcatgttcgaccaaatcgagcaacgcggattgggccgcaaacgcatcaactaccgcctgcgcgacgccatcttctcgcgccagcgctactggggcgagccgttcccgatctattaccggggcgacgtggcctgcccgctcgccgaggacaaactcccgctcgagctgccgcccatcgccgacttcggccccaccgaacagggcgagccgccgctggcgcgcgccacgaattgggcgacgccggagggctatccctacgagctgtcgaccatgcccggattcgccgggtcgtcggcctactacctgcgttacatggatccgcacaacgacgaggcgctcgtcggccgtgaagccgacgaatactggcgcaacgtcgacctctacgtgggcggcatcgagcacgccacgggacacctcatgtactcgcggttctggaacatgttcctctacgacctgggcgtcgtctgcgaagaggagccgttccgcaaactcgtcaaccagggcatgatccaggggcgctcgaatttcgtctaccgcatcgtcggcaccaacaaattcgtgtcgctcggcctgaaagaccagtaccagacccaggcgctctatgtcgacgtgaacatcgtccgcaacgacatcctcgacctggacgccttccgcgcctggatgcccgaatacaaggacgcggaattcatcctcgaagacgggaggtacgtctgcggctgggccatcgagaagatgtccaagtcgttctacaacgtcgtgaaccccgactacatcgtcgacaactacggcgccgacacgctgcgcatgtacgaaatgttcctcggcccgctcgaacagtccaaaccctgggacacgaacggcatcgacggcgtcaacaagttcctgcgccgtttctggcgcctgttctacgaccgcgacggcaaactggcggtcaccgacgaaaaggcgaccgaaaaggagctccgcacgctgcacaaaacgatcaagaaggtcagcgaggacatcgagaacttctcgttcaacacctccgtcgccgccttcatgatctgcctcaacgaattgggcgaatgcaacaagcgcgaggtgctcgagccgctgaccgttctgctggcacccttcgcgccgcatatcgccgaggagctgtgggaaacgctgggacacacgacctcggtctgcacggcaagctaccccgcctacgatgagaaacacctcgcgcagagcgccttcgaatacccggtttcggtcaacggcaaactccgtttcaagaaggagtacgccacgtcgatgacgcccgcccagatccaggccgacgtcgtgacgcagcccgaggcgcagaaatggctcgaaggcaaggccccgaagaaagtcatcgtcgtcccgggcaagatcatcaacatcgtgatctgacgcaccccggcgcaaggcgccaccgacgcccccgacacggcggatgcggtcgaatccgcgcccgcattcccggacaacccgccccgccctgcggggacaaaaacgataagaccatgagacgaccacacacactgctcgccgccctcctgctcgccgcaggcacggcggccgcacaggactacggacaagctgcgacgctgaaaatctgggacaacacgacggcgccccacagcaacggcatcgccacgcccgaacgggaacccgagccgaaccggattgccgacgtttcgcaggccgtgctctacatcttcccggccgaccccgcaaaagcgacggggcaggccgtcgtgatctgcccgggcgggggctacgtgaaactgtgcatcgactacggaggttacgacatggccaagtggttcgccgccaacggcatcacggccgccgtactcaaataccgcatgcccaacggccaccccgaggtgccgctggaggacgtcgaacaggcgctgcgcatcatgatggggctcgaagcgggcgccaccgggttcacggccggcaaggtcggcatcgtgggcagctcggcaggcgggcacctcgcggcctcggcctcgacgttggccgagaccaagcccgccttctcgatccttttctacccggtcatcacggccgaaaagggcaaagggcaccaggggtcgttcaacgccctgctgggcggcagccgcaatgcggagagcgacacgtggtattcgctccagaaccgcgtgacggcacagaccccgccgacgctgctgctgctttcggacgacgacaaggtcgtgccgcccgtcaacggcatcctctattacaacgccctcaaggagcacggcgtgaaagcctcgatgcacatctaccccaccggcgggcacggctggggcatccgcgaccacttcgaatacaaggagcagtggcaacaggcaacgctggactggctgaaagagctgaacgatgaccgcaacactgcttccgtgctcctgcggcagcccggcctgcccggctgcgtggatgtcgggatacgaccggccacaagccgcaaaagcgcagggagggaactcgcggaagccgtagtgcaggcagccgtacaggagttcggccaacaggtgcgttcccgccgggagtcggattggcctgcggggcaataatctccccacggagaggcgcagtcccgttttttcagaccgcgcattgccgtttgacgattattgcgtatctttgccgacaaaataaggatttatggcagacaacagcattttgagccgtctcgacggcctgaaactcaaatacgaggagacggggcagaaactcaccgaccccgaagtcatcgccgacgtcaaacagttcgtgcagctcaacaaggagtacaaggagctggagccgatcatcgaaacctcggaacgctaccgcacggcgctggccaacctggccgaagccaaggacatcctctccaacgacaaggacgaggagatgcgcgaaatggctcgcggcgagatcacagaactggagccggccatcgagcaaatggaagagcagatcaaactgctgctgatccccaaagacccgcaggactcgaagaacgccatcatggagatccgcggcggcacgggcggcgacgaggcggccatcttcgccggcgacctgctgcgcatgtataccaaatacatcgagtcgaagggctggcgctacgaaatgacatcgttctcggacggtgctgcgggaggctacaaggaggtcgtcctcaaagtcacggggcagaacgtctacggcacgctcaaatacgaatcgggcgtacaccgcgtacagcgcgtgccacagaccgagacgcagggccgcgtccacacgtcggccgcctcggtggccgtactgcccgaagccgaggaattcgacgtcgagatctcgatgaacgacatccgcaaggacatcttctgcgcctcggggcccggcgggcagtcggtcaacacgacctattcggccatccgcctgacgcacatccccacgggcatcgtcgtacagtgccaggatcagaagtcgcagctcaagaacttcgacaaggccttcgaagagttgcgtacgcgcgtgttcaacctcgaatactcgaaatacctcgacgaaatcgcctcgaagcgcaagacgatggtctcgacgggcgaccgctcggccaagatccgcacctacaactacccgcagggacgtatcaccgaccaccgcatcaactatacggtctacaacctctcggccttcatggacggtgacattcaggacgtgatcgaccacctgatcgtggcggagaacgccgagcgcctgaaggaaagcgagttgtaaaactgcccccatgggagcccccatccccgcatgcgtactgcccccgtccgggccggcagcatcggggcaacccctgccttccatggccaacgggcttggacggggaacccaccgcaaaccgctatcgaccgaaaaccattgcaaaccgacaaactgacaggccgggcattcgacgacgaggtatacgccgtcgtggcgcaaatccccgccgggaagatcgtttcctacaagcagatcgcccggctgatcggcatgcccggccacgcccgccgcgtaggccgcgccatggtctccgccccggcagggctcccctgccaccgcgtggtcaacagcgccgggcgcaccgcccccggctggccccggcagcgggagctgctcgaaaaggaaggcgtccgcttcaaggccaacggctgcgccgacatcgcccgcttcatgtgggaggaaatcctgtaaaccgcacggcacccatatccggcacagccggggagagcaccgggaaccccgccgggaagggcattcgccccatcccgccggacacgatcgcccggcaggccgcggcaacatatcgccggaaaaaatttggcattccgcaccaaaaccgttatcttcgcatcatcccgcatacgctccggacatactgcggcgggcaatattccccgccggggatgcgtttatcgggaaaaagcaccgcatgaaaagatacatcctgatcctattcgccctcttcgccgcgacactctccgccgtggcgcagcgtcccttgtatatcgtcaacggcgtcgaaaccgaagagatcgaatcgatcccgcccgacgacatcgaaaatatcgaatccctgccggccgacgaggaaaccatcgcccgctacggggaaaaagccgccaacggggtaatactcatctcgctccgctacgacaaacccgctatcttcgaggccggcacgaccttcgacgagtacatcgccgggcaggtcaaatgggacgacgacgaaccggcagcccgcatcatactgcgctacaccgtaactcccgaaggcaaggccgtcctggcgcaggagctcgaatcgacggacaaccgcctcaagcggcgcgtgctgaaggcactctccgaagccccgcactggcacccggcgcagaaaaacggcgtcgccgtcgcaagcgaaggggtgctgcacatccagctccccaagggcaagcggatgccccgtcccgtagaactggtttggcgctgacccatgctgccgcacgcccatatcaccctgtcggaattacaacggctcgtgaaggagaccctccacgagcgttttgccttgcccgtctgggtgagcgccgaaatctccgaggtcaaagtcaactattcggggcactgctacctggaactcgtcgagaaagggggcgataacggcgtgccgctggcacagtcgcgcgccgtgatctggcgcacggcctattcccgcattgcgggttatttcgaagcagaaaccgggcagcggctcgccgcagggatcaagatcctggccaaagtcgccgtcaactaccacgaactctacggattctcgctccagatcaccgacatcgaccctgcctacacgctgggcgacatgcagcggcagcggcagcagaccatcgactgcctgcgcaaggagggcgtgtgggacatgaaccgcgaggtcgggatgcccgccgtcgtacagcgcatagccatcgtttcgagcgccaatgccgccggctaccaggatttctgcaaggagatcggcaaaagcccctaccggttccgcctcacgctcttcgatgcgttcatgcagggtgcggcggccgaggagtcgatcgttgcggcgctgtgcgccgtggccgaccgcatggaggagttcgacgccgtggtcatcatccgcggcggcggttcggccagcgacctcaactgcttcaatgcctaccggctctgcacccatgtggcgcagttcccgctgccggtgctgacgggtatcggccatgacaaggacacgagcgtggcggacatggtggcgcatacggcgctcaaaaccccgacggcggtggccgggtggctggtggagcggatggacacgatcgacgcatggctcgacaacgccgccctgcaactgcgcgacaacgtgctggtcacctcgcgggcacaggaactgcggcttcaggagctgtccagccacctgctcttccatgccaaggggctgctcagacaacgggggatggccctggagcagatgcgcgaaaccctcgcggccagtgccgggaatttcctcgcacgccaggcgtcccggctcggcaatgcggccgaactggtcgccggacgctccccggagcgtatcctgcggctgggcttcgccatcgtccgcacgggcggcaaagccgttttctccgccgcacaagtcggaaaaggcgacacgctcgacattgaggtcgccgacggccgcatcgaaggcaccgttcaatacaccgaaacgaatgtaatatcacaataacttcatattttactaacctcacctacaacctcgctatgaaaaaatttttactttatttattttgtctatcggctctaatatcttgtacaaaggattttacagatttatctcatacgccaaattcaataacaagaagtggaggagacaataaattcgatgtccttggttggggatatgacattacagaagattatttaaatcctacatctgtcagagggcaggttatcgacattgaaaaatatgaacgggagttcccaaatcgtttaatcatccatacaaattcttggggaagtgactttttttgctatggcgctagcgcagacgattatctcaaagaagtaacaaaaaaatccaatatggaaagtggcctaagcattggtattgggaaattcggtttttccggaactttttcctcaaataaagattttttcgacagctattcctactctaataaatatgcatttgcaagtttagagtgtattcggaatcgccgaattatttatattaacgacgacatttcacgtatttcatcatacatttctcctgaatttctcgaagacataaatcgttattcagcggaacaaataattgaaatatatggtactcatgttctaactcacataacattaggtggcagatatcgactaatgtataaatcgtgttttactaaaacaacagaccaaacgactcgaaaaaaagcagttgcagcaggattcggagccgttctcggcaaacttggaattaaattcaatacaggtggagaaacgattacaaacgaaattctggcaaaagaaaatgcatctcaggaactatatgtttatttcttcggtggcaagggaagcaacataaaatacaatttagataaagatgctccgacaacgatagatatccaaaattgggacaatcaaatctcattagatggaaccagtgtattaacagatattgagtggtgtaaaacttatccgatctatgattttgtttccaatgcacaaaaaagaaccgaactaaagaacgcgattgaacaatatatcgcaaacaaacaaattaaaccattaagactaaaacctttttacgaaatgtggtatagtggtgcaaaagacacatactatttattttcctgggaagacgttgtgagagaacaatctagaggccgagacttcattcgattaagaggttatcttttagcagatcctagcgaagaaactcttcctcaatatgttctatggtatcaaaaaaatgaagacacatactatagctcatcatgggaagtagtacaaacagctctaaaacaaggtcgtgaatactggggacaatccggctacattctaaaaagccaaaaaaataatactattccactatacccaatgtggtatagtaagcataaagattggttttttgcatttagttgggatgaagtttgcgagcaaataaaacaaggtcgagagtcctatggatacatcgaaggttacatatatgacgcttattaacaaaaaaataaaaaacaatgattcaggattcctctttccggatagccttctgcatattatgtcacaagtatacacctgtgctaaccgagcttatccatcaacttgatgtccccggaaacgagttattcattcatgtagacggtaaaacaaatataactacgtttgaaactcttcggagacatgagcgcatccatattatcgaacctcgtgtaaaaatctactggggagaattcagcatggtagaaagtacactccaactttttacagcaacacaaaataaagattttcattatattattttaatatcaggagacactttacccttgaaaacagtggaagaaatacacacgacccttcgttctgcatatactgaaaaacaagaatttattcctattgatccaaccatcacggatgctatcataaacagagtttgctggcgatatttttatccgaataaagttacaattatgcgtagaataaaacgcctagcaatgaaatgctgttgccacaaaaaaaatccttatttcagcaaactcccaacattaaaaaagggtagtcaatggcttgcaattacaaattattttcgggactacatcttcgattaccttgctgcacaccccgatttcatccctgcatttcggtacagccactgcgcggacgaaatgttcttccagactctgatatgcgatacttcttttgcagcccgaaatacatgtagttcacttgtatatacggattggaaaaatacagattcccatcctaagacatttacaacaaatgatttagagcatttagcagccttgaaatcaatatctaaagaatatccctattccccgcttttcgcccgcaagttcgacgacgggctggacatcgcccgctaccgcgaaatcctgttcgggcagggaactaaggctgcacggtaagggcacgatgagaaacagttgttaaaccacgagagatatggcaaagaaaaaagaaccggcctacgccgaggcgatcgccgagatcgagaaaatcctcgcccgcttccgcagcgaagagatggatgtggacagcctcgccgccgaggtgaaacgcgccacggagctgatcgcaagctgcaaggcgcgcctgcacaaggccgaagaggaggtatcgaagattctggaatgacgatgaaaaaactaatcaaatggacgcttaaccacgtgccgcggccgctcctgcaacgcatcgcgggctgggccgtgccgatggcgggcctgttttacaggggacgcggcgccgagtgccccgtatgcggagccaaataccggaaattcctgccctacggctacgtgcatgcacgcgccaatgcgctctgtcccaaatgcctgtcactggaacgccaccggctgctgtggctctacctcacgcgcgagaccgacctgctcaaatgctatccccgcacgctccacatcgcgcccgaggtctgcatcatgcgccacctgaaaccccattttgcggggcatccggggcaatacgtcacggccgacctcgaaagcccgctggccgacctgcatttcgacgtacagcaaatcccgctggccgatgattcggtcgacgtcatcctctgcaaccacctgctcgaacacgtcgccgacgaccgcaaggcgctgtgcgaactctaccgcatcctcaaacccggcggctggggcatcctgctctcgcccgtggaggcggattacgaacagaccttcgaggatgacacgatcaccgaccccgacgagcgcacgcgcatcttcgggcaatacgaccaccgccgcatctacggggcggactatcccgaccggcttcgcgccgcgggtttcgaagccgcggatatcgactacgccgcgacgtttaccgatgcggaacgggaactgtacgccctgcccgaagaccatatctacgtcgtttacaagcactgacccggcaaccggacacggtgtccgcagccgcgcccggcagcccggggtatacgagatgtacggaatattttccggagttccctgcttaggccgaaacgcacggcaatgcggatcccgtcagtagaggaaaaacacgatcccgatgaaatgcgccacgaccgcaaggttgatcagcagatgccataccatgtggtggtagcgaaacccctgccgggcatagaaccaggcgccgagcgtgtagagtacgccgcccgcggcgatcagcaccagcaacgccgttgaggcctgccgcacgaaaagcggcaggaagaagacgatcgtccatcccatcaccaggtaaatcgtcaggctgatggccgggatcgagttgcgcgacagcgacttgtaaaagatgccgaacagcaccatcgcccactgcaggatggtgatgaatatcccctgccagccgccgatgaccgataaggcgatcggggtgtaactgccggcgatcgccacatagatgaagatatggtcgaggatatggaaaacggccttgtgcttcgaggccgggttcatcgaatggtagagcgtcgaggcaaggaacatcaggaagatcgagatcacgaaaatgctcaccgaaaccgatgccgtaaccgggttgggatcatgcacgtaggcccacacggcggcaaacgggagcgccacgagagccacgagcgacatcaccccgtgcgtaaccgtattggcgatctcctcgcccacggtcggaacataaacatcctttttatttgccataacgccgtgtattggtctgacgtgccaaatttatgaaattttttcatatctttgcgagcaaggttaagcggttaggcaaaaatggacttttcacggtatgaaaatctccgcacgctcgtgcgcgcgaacttctcggagcagacccgggccctcgtcgacgaggcgctcgtctacgccgacgggaagctcacgggcctgtgccgctatgacggcacgccgctgctcgaccatgccgtagccgtggctatggtcgtgatctcggaagtgggcctcggccgcaactccacggtctcggccatcctgcacgacgtggtgcgcctggcccacaagcggctccccgccgaagagttcctcgccctgaccgccgacatccgcgatcgcttcggcgaacaggtcgtgggcatcacgatgggcctcgcgaacatctcggaactgcggctcaaggtcgccaaggaacaggccgacaatttccgcgacctgctggtttcctattcggaagatccgcgcgtgattctcatcaagctggccgaccggctcgaagtgatgcgctcgctcgaaatgttcccgcgtgaaaaatggcgcaagaagagctgggagtcgatgaacctctacgcccagatcgctcataaactgggcctttacagcctcaagagcgaactggaggacatcgcgctgaaatacctcgaacccaaggactacgaacatatcgtcaccaagctcgaagagagcgccgaggagcgcagggccttcatcgcgcggttcctggtgcccatcgaggagaggctcggcaagctgggcatcaaataccacatcaagagccgcaccaagtcgattttctcgatctggacgaagatgcacaagcagaacgtcccgttcgaaggggtctacgacatcttcgccatccgcatcatcatcgactgcgacaaggagcaggagaaacagcagtgctggacggcctattccatcgtcacggatttctacacgcccaaccccaaccgcatgcgcgactggatctcgatcccgaaatccaacgggtacgaatcgctgcacaccaccgtgtcggccggcggccggtgggtcgaggtgcagatccgcaccgaacgcatggacgccgtggccgaacgcggcatcgcggcgcactggcgctacaagggggtcaaccagggagcccagaccagcgaaatgtggctgggacgcctgcgcgaactgttagaggacaccacgcattcgctggcgcagcgcttcgacgccaagccggcctcgggcgagatcttcgtcttcacgcccaacggcgacctgcggaaactgcccgaaggggcttcgctcctggacttcgcgttcgacatccacacctcgctgggttccacgtgcgtggggggcaaggtcaacaaccgggcggtctcgatccgcgaacagctccacaacggcgacatcgtcgaaatcctgacccagaagaaccagacgcccaaatccgactggctcaacttcgtggtcacgtcgaaggcccgcaacaagatcaagtcctacctgcgcgaagagcaggccaaacatacgcgcatggggcgcgaagagctcgaacgcaagctcaagaactggaaattcacgctgaccatcgacgaggcggtggcctacctggtcaaatacttcaaagtccgcaccggcacggaagtctacgcactgatcgccacgcagaaagtcgacctgggcacgatcaaggagatcctcgcccgccatatctcgggcgaagccgacgaacagcgccgtgccgccgcggccgaagccgagcgcaacaaggtgcacaacgtcagggagagcaccgcgccgcaggacgcgctggtgatcgacgacgacatctcgaagatccagtacaaactggccaaatgctgtaacccgatcaagggcgacgacgtattcgggttcgtgacgatcaactcgggcatcacgatccaccgcaacgactgccccaatgccaagcgcatgcgcgagaactatccctaccgggttatcgaagcgcgctggcgttcgacggccgagggcgccttccgcgtctcgatccgcatcgtggcggccgacacgacgggcatggccaaccacatcaccgaggtcatcagccgcgacctgaaactcaacatccgctcgatcaacttctcatcgctcgccaacgggtgcatcgggggcacggtgagcgtcgaggtgcccggcgcgggcgtcgtggacacgctcattcactccatcatgcggatcaagggcgtgcagcgtgccttccgtatcaacaactgattcacaccacaattttacccacataaaagtaaatgaataacaactctatcagcgtcgtatttgccgacccgtcacacgcgcactacgcccagcgtatctgcgatctgatctacgagtcggcgttgcagcgtggcacgggcatcgccaagcgttcgcccgaatacatcgccgcaaaaatgaccggtggcaaggccgtcgtggcgctggacggtgagaaacttatcggtttcagctacatcgagtgttggggacacggcgatttcgtcgcgacctcggggcttatcgtcgacccggagtaccgccatatgggactcgcggagcagatcaagcgacgaacattcgagctggcccgacgacgattcccgtacgccaagttattcagtattacgacgtcgctgcccgtgatgaaactcaattcgcgcatgggctacacgccggtgaccttttccgagctcaccgaggacgaggagttctggcggggttgccaggggtgttgcaactacgacatcctgcaacgcaacaaccggcgcatgtgcctctgcacgggtatgctctacgaccctgccaaggaacccccgcaggtacagtcgcgcatggcgccctacatcatgttcttcaaaaacaagttcaaaaaattgttccacctgaaataaacaaaacgatataagaaaatgggaaagcaaaaagtagttctggcattcagcggaggtctcgacacctcgttctgcgtgaaatacctctccgaggataaagggtacgatgtctataccgccatcgccaacacgggcggcttctcgaaggaggagcttgcgaacatcgaaaaacgcgccctggcgctgggcgccgtgaagcacgccacgctcgacatcgagcaggaatactacgaaaagagcatcaaatacatgatctacggcgacatcctgcgcaacggcacctaccccatttcggtcagctcggagcgtattttccaggccatcgccatcatcgaatacgccaagtcggtcggcgccgactgcgtggcccacggctcgacgggcgccggcaacgaccaggtgcgcttcgacctgacgttccaggtgcttgctcccgaaatcgagatcatcaccccgacgcgcgacatgaccctgacgcgcgaatacgagatcaactacctccgcgagcacggcttcgaggccgacttcaagaagatggaatactcgatcaacaaggggctctggggcacttcgatcggcggcaaggagacgctccgctcggagcagacgctgcccgagcaggcctacccgagccaggttacggcccacgccgaggagcgcctgaagatcaccttccacgaaggtgagatcgccgccgtgaacggcaagccctacgccgacaaggtcgaggccatccgcgccgtcgaggccatcggttcgaaattcggcatcggccgcgacatgcacatcggcgacacgatcatcggcatcaagggccgcgtaggcttcgaggccgccgccccgatgctcatcatcgccgcacacaggatgcttgagaaacacacccagaccaaatggcagatctactggaaagagcaggtcgccaactggtacggcatgttcctgcacgaggcgcaatacctcgaaccggtgatgcgcgacatcgaagcgatgctcgcctcctcgcagcgcaacgtcacgggtacggtcgagctgatcctgcgtccgtacagctacacgctcgtgggcgtcgattcgaccttcgacctgatgaagaccgacttcggcgaatacggcgaggtcaacaaggcctggacggccgacgacgtgaagggcttcacgaagatcctcggcaaccagatcaagatttaccacaacgtccagaaacgcaacaagaaatgatccgggccggcatcatcggaggcgccgggtacaccgccggcgaactgatccgcctgctgctcgcccacccgcaggcccggatcgtcttcgtccacagcacgagcaacgcgggcaaccgcctcgccgacgtacacgggggactggagggcgacaccgaaatgcgtttcagcgacgcttacgacctgggagccatcgacgtgctgttcctctgttcggcacacggcgagagccgcaaatggatggaggcgaacacggtgcccgcaggcgtgaagatcatcgacctggcgcaggatttccgcgacgagagcggcgggttcgtctacgggctccccgagctgaaccgcgaccgtatccgcacggcacagcgcgtcgccaacccgggctgcttcgccacggcgatccagctggcactgctcccgctcgcagcggcgggactattgacggacgaggtgcatgtgacggccgtgaccggctcgacgggcgcgggggtgaagccctcggccacaacccatttcagctggcgttcggacaacatctcggtctacaaagccttcacgcaccagcacctcgtggaaatcggacgcaacctgcggcagctggagccctcgttcgaccaggcggtgaacttcgtgccgatgcgcggcgatttcacgcggggcatcctggcaagcgtctacaccgcctgtccgctcgacgaagaggccgcacgcaagctctacgccgactattacgccgcggcagccttcacgcacgccacgacgcgcagcatcgacctaaaacaggtcgtcaacaccaacaaggcgctcgtgggcgtgtcgaaatacggcgacaaactgcacatcgtctcggtgatcgacaacctgctcaaaggcgcctcgggacaggccgtgcagaacatgaacctgatgttcgggctcgacgaaaccgcggggctgcagctgaaagcatcggcattttaaaacgccgcctataacagccgctttcggggcggcaaaatgcggcgcgacatctccgcattgccgttcggggagggaaaccggcgggataaaagccaagcgtcaagaaacggaggacgggttgcccgcacaccccgcgaagacgcccgttttagcacagccttcctaccgccccgcagggaacgacacgcagatggttttgggcacccttttgccaccaaaaggtgcaataatgaaaaaattgtaaaaatggaacttttcaacgtatattcgctctatcccgtagagcccgtccggggcaaaagctgcttcgtctacgacgcggcaggcaccgaatacctcgacctctacggcggccatgccgtcatctcgatcggccatgcgcagcccgactacgtacgggccctctcggagcaggccgcacggctgggattctattccaactcggtcgagaactcgctccagaccaccctggccgaaaaactgggccgcgcatcgggctacgacgattacagcctcttcctctgcaattcgggagcggaggcgaacgagaacgccctgaaactggcttcgttccacaccggccgcacgaaggtgctggccttttccaaggcgttccacggccgcacctcgggcgccgtcgccgcgacggacaaccccgcgatctctgcccccttcaaccgcacggccaacgtggaattcgtaccgctgaacgacatcggagccgcgcgcgcgaaactcgccacgggtgagttcgccgccgtcatcatcgagggcatccagggcgtcgccggcatccactgccccgcggacgacttcctgcgcgaactgcgcacggcggcgagcgaaaccggcacgcagcttatcctcgacgaaatacagtcgggctacggacgcacgggtcgcttcttcgcccaccaggctgccggcatccgccctgacctgatcaccacggccaaaggcatgggcaacggcttcccgatcggcggcgtgctgatcgcgccccatttcgaggcgcgccccgggctgctgggcaccaccttcggcggcaaccacctcgcctgcgcagcggccatcgccgtgctcgacgtgatggagcgcgacgggctcgtcgagaacgccgccacggtcggcgaatacctgctcggcgaactgcataagatcggcgggctgaaagaagtccgcggccgcggactgatgatcggcatcgaactcgacggctccgggtcggagttccgcaaacggctgctcttcgaaaaacacatcttcacgggcggcgccggcgcctcgaccgtgcggctgctgcccgcgctctgcctgacacgcgaactggccgaccgcttcctcaacgcattcaaagaactcgtacgatgaaaaaattcacctgtgtagcagacatcggcgacctgacgacagccgtcgccgaagccatggagatcaaacgcgaccggttccagttcacggggctcggccgcaacaaaaccctgctgatgctgttcttcaattcgagcctccgcacgcggctctcgacgcagaaggcagcgatgaacctcggcatgaacgtcatggtattggacgtcaaccaaggtgcctggaggctcgaaaccgagcgcggcgtggtgatggacggcgacaaggccgaacacctgctcgaagccatccccgtcatgggatcgtactgcgacgtgatcggcgtacggtcgttcgcccgcttccacgacaaggccgaagactacgaggaacgcgtactggaacagttcatccgctactcgggccgccccgtattctcgatggaggccgccacgcggcacccgctgcaaagcttcgccgacctgatcaccatcgaggagtacaagaccacggagcgcccgaaggtcgtgatgacctgggcaccgcaccccaacgccctgcctcaggccgtgcccaactcgttcgccgagtggatgaacgccgccggctacgacttcgtcatcacccatcccgaaggctacgagctcgccccgcagttcgtcggcaacgcccgcgtcgaatacgaccagcgcaaggcgctcgaaggggcggatttcgtctatgccaagaactgggcggcctacgccgaccccgattatggaaaggtgctcagccgcgaccggagctggacggtggacgccgaaaagatggcgctcacccacgacgcctatttcatgcactgcctgcccgtgcggcgcaacatgatcgtcacggacgaagtgatcgaatcgccgcgctcgctggtgatccccgaggccgccaaccgcgagatctcggcacaggtagtactcaaaaggttgctggaggggtcgaagtgatggaaaaaatcacggtagtaaagatcgggggcaacgtcatcgacgaccccgcggccctgcgaggcttcctcgcggacttcgcctcgctgcccggggcgaagatcctcgtccacggaggcggcaagctcgccacgcgcctcgcccagaaactcgaactgcaggtgcagatggtcgacgggcgccgcatcaccgacaagggcacgctcgacatcgtgacgatggtctacgccgggctggtcaacaaacagctcgtggccgggctccaggccgccggatgcaatgcactcgggctatcgggcgccgacggcaacgccgtcatggcacgccgccgcgcacccgaaccgatcgactacggcttcgtgggcgacatcgaaagtgtcaaccacacgctgctcggggaacttctcggggcaggcgtcacgcccgtattctgcgccatcatgcacgacgggcagggcacgctgctcaactgcaacgccgacagcgtggcttcgtccgtggcactcggtgccgcccggatcgcccccacggagctggttttctgcttcgaaaaaagcggcgtgctgcgcgacccggaggacgagacgacgctcatccgcgaaatcacggccgaatcgtacgccgcgctcaaagccggcggcatcgtcagcaaagggatgatccccaaggtcgagaacgcgctgaaagccgttgccaacggcgtgcggagcgtcacgatcaaacactcggagaacctgctgaacgacaccggaacggtaatcaggtaatacgcccgatccctgtggccgcacggccacaggggaacggacagccagctcacaaacgacatggatgcaaaaaccaaggaagccatcgacctgctcaggacgctgatcgcaacgccctccccgtcgcgcgacgaaagccgcacggccgacctcatcttcgcctacctggcgggacacggcgcggcacccgaaagactgcacaacaacgttttcgcccgctccgcaggcttcgacccggcgcgcccgacgctgctcctgaactcccaccacgacacggtacgccccgcagccagctacacccgcgacccgtatgccccgaccgtcgaaggcgaccgcctctacggcctggggagcaacgacgccggggcttcggcggtgagcctcacgcagactttcctgacgcagcgcacacgccccctgccgttcaacctcctgctggcgctttcggccgaagaggagtgcatgggcgagcacggtatgcgcgccctgctgccgcagctgggacggatcgacatggcaatcgtgggcgagcccacggggatgcaggccgccgccggcgaacgggggctggtcgtcctcgactgcgaagcccgcggcaaaagcggccatgcggcccgcaacgagggcgtcaacgcgctctatatcgcactcgacgacatcgcccgcctgcgtactttccgcttcgaccgccgctccgacctgctgggccccatcggcatcgccgtgacgcagatcgcggccggcacgcagcataacgtcgttcccgacacctgccgtttcgtggccgacgtccgcaccacggacgcctacaccaacgaggaaacggtcgaaatcctgcgtcgggcactgcgcagcgaggtgacgccccgctcgacacgcatccgtgcctcggcgctcgacgccgcccatccgctcgcacgggcggccgccgccacggggcgcgaaagctacgtatcgcccaccacgtcggacatggcgctgatgcccttcccgtcgctcaagatggggccggggcaatcctcgcgctcgcatacggccgacgaattcgtgttgctatcggaaatcgaagagggcatcggaatttacgaaaaattcataacacaactggctgaaaccctctgatgcccgcggcaggaggctgcaaccccgctgcgaaagagccccctccgaggcagatggcagcccggcaaacgcagcgcaccgccgcaagccgacggccgacggcaatagggagccgaaacaaagagagaaacgaatatacacaatatggcaacgaaactttgggacaagggcttcgagcccgacaagatgatcgaggaatataccgtcggcaacgaccgcgaactggacatgcggcttgcgcgctacgacgtccagggctcgctggcgcatatcgccatgctcgaaacgattgggctgctgacggccggcgaactggaaaagctgacggcgggactgaaagagatcgccgccgagatcgaggccgggcgcttcgaaatcgaacccggcaccgaggatgtccactcgcaggtggagctgatgctcacccgccgcctgggcgacgccggcaagaaaatccactcgggccgctcgcgcaacgaccaggtgctggtcgacctcaaactgttcctgcgcgacgaactgcgccagaccgccgaagccgtaaaaacggtcttcgaccgcctgcaaacgctcagcgagcagtacaaggagatactgatgccgggatacacccaccttcagatcgccatgccttcgtcgttcggcctgtggttcggcgcctacgccgaaacgctggtggacgacatgcggctcatcgccgcggcatggcacatcgccaaccagaacccgctgggctcggccgccggatacggctcgtcgttcccgctcgaccgtgaaatgaccacgcgcctgctgggtttcgaagcgctgcactacaacgtcgtggcggcacagatgagccgcggcaaaagcgaacgcgccgccgccaacgccatcgcggccgtcgctgcgaccatcggccgcctggcgatggacgtctgcctgttcatgagccagaacttcggcttcgtatcgctgcccgacaacctcaccacggggtcgagcatcatgccccacaagaagaaccccgacgtcttcgagatcatgcgcggacgctgtaaccgcctgcaatccgtaccgaacgagatcgccctgctcacggcgaaccttcccgtcggctaccaccgcgacatgcagctgctcaaggacatcctgttcccggcgacgaccgaaatcaaacgcaccctctcgatgtgcgacttcatgctcgcgcacctgaaggtcaacaccgacatcctcgacgagcggaaatacgactaccttttcacggtcgaggacgtcaaccgcctcgtactcgcaggcgtcccgttccgcgaagcctacaagcaggtggggatggccgtacagcgcggtgagtaccgtccgacgcgcgaggtgcaccacacccacgaaggcagcatcggcaacctctgcaccgcccaaatccgccggaagatggagcgcgtgatgtccgaattcgaataacgggcgcaccgtccgatccgccccggacaaaaggggctgtctgacaagtctgatttcaacgatttcacccctgccagagcttattctgacaggggtgattttcgattttcgggacttgttaaacagccctccggaacgctgccggcttacttgatgcgctcgtaatactcgcgggtgcgggtgtcgacgcgaatcttgtcgcccgtgttgatgaacagcggaacgcgcaccgtcgcaccggtgttgaccgtagcgggtttgagcgagttggtcgaagcggtgtcgcccttgatgcccggctcggtataggtcacctccatgtccacgatcgggggaagctcggccgaaagcacggtctccttctcggtgtggaacatcacctccacgatctggccgtcggccatcaggtcgtagttggtgatcaggttcttgtcgatgttgatctcttcgaaagtctcggtgtgcatgaaatgcgcccccaggtcatcctcataggtgaactggtagggacggcgttccacgcgtacgggttcgatcttcgcacctgccgagaacgtattgtccagcacgcggcccgattcgaggttcttgagtttggttcgtacgaaagctgggcctttgcccggcttcacatgctggaaatccacgatttgaaaggtcttgccatccatttcgatgcacataccgatcttgatgtcagctgtagttgccataaggtattgttttgaattgattttttcgtgggcgcaaagttatgaaaaaaatccggaatttcctatttcccccattcatagcgcggtatatcgaccccgagcaatgctgcggcgcggtcggcgaccgtaccgcacagctcctcgacgccctgcggcgcggcatagaacgacggcgatgcgggcaggatcaccgccccggcctcggtcagcgccgccatgttgcgcaggtgtatgagcgacaggggcgtttcgcgtacgacgaacaccagccggcgccgctccttgagcatcacgtcggcggcccgctcgatcaggctctgcgccgtgccggcggccacacgccccacggtacctaccgtcgacggcacgaccgccatgccgtcgtaacgcgccgagccgctcgccggaggggcgaacatgtcgtcgttcgcatactcacggatgcgtccgtctacgggcagcgacaccccctcgtgcgccatcacctcgcgggcgtggcggctgcacacgagcgcgatctccgacacgcacggcgaggcgagcagccgttctatcgtcaggcgggcatagatggcgccgctggcggcggttatggcgactacgaacctcatgtcagaattcgatggctttgcatttgagccccatctgccggatcttctccagcgtgcggggcagggcgtaacgcatgttgcggaacgccttttcgctgtcgtggaacaccacgatggcccccggggcaaggtatttggtcacgttccgcaggcaggtgcggggcgagagcttacggttgtagtcgcgcgagatgatgtcccacatcaccagcttgtagcgctgccccagaaaacgcgcctgcgccggggtgatccgcgcatacggaggccggaacagttcgctgtgaaccagatcgttggcaaaatccacatcctccgtatagcgttcgaggctcatcccccatcccttctggtgcgagtaggtgtggttgccgaccctgtgcccggcatcgaggatgcgctggtaaaggtcggggtacatttcgacattcttgcccagcacgaagaacgtggctttggcatcgtacttgtccagcgtggaaagtatccactccgtgacgccgggcgtggggccgtcgtcgaaggtgaggaacacgccgtcccggtcgtcgatctcccagatcagatccggcatcaggcgccggattattttcggtggctttaaacgcatggctgcttattccaggcaaaaatagtgaaattccgcactattccgaaaaatataactatatttgtagtagattcaattccagaccggctatgaaaactatcttccgtatcgcgctggccgcggccgtcgtcgcaacgatggcaggttgcaaggcattcaggacactgaccgattcgcggctcaaaaccgcacaaggcgccccctacgaactgatcgtcgtctgcccgcagcaggagtggacgggcgaggtgggcgatacgctgcgcgcgatattcacggcaccgatcccctacctcaaccaaaccgagccgttgttcgacgtgctgcgcgtcaccgaacgcgggttcacgggcatggtcgccgaccaccgcaacatcctcaaggtactcaaagaccccacgctcaccgagtccagcgtcgccgtccagtacgacgtgacgtccgagccccagatcgtgatgacgctcatggggcccagcgacaagtcgatcacggcgttcctctcggccaaccgcgggaatatcgtcctcgccctcgaaaacgccgaacgcgaccgcgccatcaaatacgcggagaaattcaacgaaaagggcatacacgacgccattctgaaaaacttcggggtcgagatgaacgtgccgaaaggctatgcgcttgccgcgaacgaacccgatttcctgtgggcgcgctacgaataccccacggccagccagggcttcttcatctactcttacccctacgagggcaaggagtcgctttcgcccggggcactgctcgccgcccgcaacaagttcgccgcccgcattcccggcccgtcggacggttcatacatgaccacctccgacgccttcgcgcccgatttccgcatgttccgcatggaggggcgcctctggtgcgagatgcgcggcttctgggacgtgcacggcgatttcatgggcggcccgttcgtaagctacacgaccgtcgacacggcgaccaaccgcgtcttcacgctcgactgctacatctactcgcccaaaaaccccaaacgcaactacatgcgcggcgtggagcacctgctctacctggtaaaattccccgccgcggaagccccgcaggaagagcagcggcaatagagcccgcccagcagcggcacgcaccgaagaagaaacccgcatgcaacaaatactgacatacttcttcctggtcgtatactcggtcacgatcctcggcatcattctggtcatcatcaccgaaaaccggaatccgctgaagaccctgccgtggatcgtcgtgctggtactggcccccgtggtcgggctggtcttctatttcttcttcgggcagaacctctccaagcagcgcatcatttcgcgccgcacgcgcaagcgcatcaccatgcagctcgaagagcccgaacaccccgaaggccccggcatcccgccccgttaccggccgctcgcctcactgctgctcaacacgctgcactccgtaccgctctacggcagccgcatcgccgtctataccgacggacggtcgaagatggaagcgctgatagaggagatcgcccgcgcacggcaccacatccatatccagtattacatcctcaacgacgaccagacgggttgccgcctgcgggacgccctggtcgcaaaggcgcgcgaaggcgtccgggtacgcatcctctacgacgacgtgggcagccggggtgccaagaactcctttttcaaagggatgcgcgacgccgggatcgaagtatacgccttcctgcacgtcaaattcccgctcttcaccagcaaggtcaattaccgcaaccaccgcaagatcgtcgtgatagacggccgcgtcggattcatcggcggcatgaacatcgccgaccgctatgtccgcggcacgcaatggggcacatggcgcgacacccatttccgcatcgaaggcagcggtgccgccgggctccaggcctcgttcctgagcgactggtcggcgactacgaaaacgcatatttcggggccggagtactacccgcctgtcgggcattttaccgacgacatcctgcaaatcgcccccagcggcccgttcggcaagtggcgcgccctgttacaggccgacagttacgccatcgcccgtgcccggcagcggatatggatccagaccccctactacctgccttcggacgtactcaacacggcgctccaggaagcggcgctcgcaggcatcgacgtacacctgatgctcccggcccgttccgactcgaaagtcgtcgaccttgcgacccactcctacctggacgacatgatgaaggcgggggtgaaaatttcgttctacaaaccggggttcctgcattccaagttgctgatcatcgacgacatgctctcggtgatcggctccgcgaacatggatttccgcagcttcgagcacaatttcgagatcaacgccttcgtctacgaccgcgaattcgcaagccgcatggccgccgtattcgaagacgacctgacacactgccacaccgtcaccccgggcgaatggttcacccgcccgcgcacccgccgcgtcgcggaatcgcttatgcgcgtcttttcgccgctgctgtaaatttccgacgcggcaggcgactattcgtatcctccggcctgcagttcccgctgcaattcggtcatgatctcctgtcccagcgccgcaccggcggacatgccctcctgcatgatcgcaggggtcgcaccgaccgccttccgcatgaccggcgtggcgtaaagggcattcagttcacgcagatcggcgagcgtcagatatttggaatagatcggcacatagatatcgaccatgcgggcgcgcatcttctcattgaatttcgagattatcttctcccagacggcttccgaaaccgacggggcggaggttttgaggtacccgaccatctgggtcatgaccacatcggcattccggagcgccccggtcagctccatcatctcggcgaccgcatcgcggtattcgtccgactgcgcacgggcgggcagcgccgcggcaaacacggcgcacatggcaaggcaaaggatttttttcatcggtatggggtttaggttaggtgtcagatctccacgatccccttgcggatggcatagacgaccaggctggcggtgtttttacagccggtcttttcgaggatgttggcgcggtgcttgtcgaccgtgcgtttcgagatgaacagttcgtcggcgatctcctggttcgacaggccacggcatacggccaccaggatttcgcgttcgcgggccgaaagctcctcgtcggggacgtcctcgcgcgtacgcatacgccccgcgagcgacgacaggagctgcgggctgaaatagctgcccccggccatcaccgtgtcgatggcctcgaccacgtcgccgatgtccgagtccttgagcaggaaaccccgagccccggcctgcaccatgcgcgtatagtagctctcctcgccgaacatcgaaagggtgatgatcctcagttcgggacgccgcgccagcgcccgctcggtggcctgcgcgccgtcgataccgggcatggcgaaatccatgaaaacgatgtcggcctccaactccggcagcatggcgaggaactcctcgccgctggccgcctcgcccaccacgcggcacccggcgcaatgctccagcagccccctgagcccgttgcggaaaagcgaatggtcgtctacaagtactatcgtgcgttccatatcagttgcgtttgcggcggcgaagcctctgcgatgcctgctcctcctgcgtattgacacggatcgcggcgcgcatcccccggcctttggcactggcgatgtcgaacacgccgcccagcgaattgatgcgcgacgagatgttcgaaagccccatgccgcagtccatcatggcctgtgggttgaacccccgcccgtcgtccgtatagtccagcgccagttccgtcccgttctgcgacagcgaaaggttgatcgacgaacatgcggcgtgcttgagcgagttgttgatcagctcgcagatcacccggtagaggatcacctcgacgtccgtatcaaaccgctccgaacggaggttggtcgtgaagcggattttcacgtcgtgcatcgcggcgctcttgtcgatgaagttctgcacgccccgcgccagcccgaagtcattgagcacgtggggcgaaaggttgttcgaaatctcgcgcagcgaacggatcgcctcgtcgatcacataggtcgtattgtcgatgatctccttctgctcggggctgcgttcatcgcgtgccagtgccgaaagcgacatcctcgccgacgagagcagcggccccagcccgtcgtgcagttccttcgagaagcgcgaacgcgccttctcctcggtgcggagcacggccgtgaggatgcgtttgttgagcaattgccgctggcggttgagcctgccgatgtacttgaagagcttgtgggcgtacatcacgccgatcgacaggcagatcgagatcacgatccccaggtaggcgaaccaccaccgggggacatactgcccgctggccatcagcagctgcacgaaccgctcgaccgagagcagcgaaaaccccacgatgaagagaatccacaccgaattgtacttggtagcccgcaccagtttgagggcatatgccgtcgcgaccgtctggatgaggatggcgatgacaagcaggatcttaatcaacataggcgtcccgattttttacaaatatagtattattccaacacattggcaagggccgcgagctggcggtaatccgtcaggtcgacctgcaccggcacgaccgaaacatagccgtgcgcgagcgcccactcgtcggtatcctccgccccgggctcgccgttgacgaaatcgcccgtgagccagaaatacgcacggccccgcgggtcttcgtggcggtaaaactcctcgcgccagaacccgcggttctggcggcagaggcggatgccgtgcagttcgccgggcttacctacggggacgttcacattgaggcacaacgggagttcgaccttcttttccaggacgctgcgcacgatccgcttcccgtagaccaccgccgcctcaaaatcggcgtctgcgccgtggtcgtcgagcgacagcccgaccgacgggcaatcgtagaaactgccttcgatagccgcccccatcgtccccgagtagagcacgttcacggccgaattggaaccgtggttgatgcccgaaatcaccaggtcgacgcgctcgtcgcgcaacaggtagtcgaaggccatcttcacgcagtcgaccggcgtaccggaaaaggaatacacttccagcccttcctccttccgcacgcagcgcaggtagaggggattgtacatggtgatggcctggctcatgccgctctgcgtcgtctcgggtgccacgaccaccacgcggccgaaggcccgcgcgacctcgacggccgccgccagccccttcgaatcgtacccgtcgtcattggttacgagtatcagtttttcttctttcatagtcggtattttacctgcaaagataacaataaatcacgctcacggaagatattttcatgccgcacttgcaccgaatgaaaaaaacttcgtatatttgcagtcccttacggggcgtatatcaacctctttcattgggcgctacgcagttgcggggacacaaggacggcacagcccgtccggcgtgccgggaacgcgggattacggatcagggtacccgtatggtacggcgggcgcagcgggaatgttgggtgcgaaacacattaaatttgttgcaacaatgaacaaagacgcaatcatcaagctcgtcaacgagcagatgtgggcaaagacggatgccgatgtaccgtcgttcaaggccggtgacacgatcaccgtatcctacaaaatcatcgagggtaacaaggagcgcgtacagagtttccgcggcgtagttatccagatcaagggttcgggcaagaccaagatgttcacgatccgcaaggtttcgaacggcgtgggtgtcgagcgtatcttccccctctattcgccccacatcgacaagatcgaggtcaacaagatcggtgtcgtacgtcgtgcacgcatctactacctgcgcgacctgaccggcaagaaggcccgcatcaaggagaagcgcatgaccagcgcggacaagaaatagtccgggccgtcagcaagaaaaaacaggaaggttccccttcctgtttttttgtgcccgccccggaaagcccccgccgcccggataacggcccgtacaggcggccatcttcgacggcctgtttcgacagcaacagaagttccggcccagaattccgccccggccgcggcccgcgccagcctgccgtccgcgcttacaggcccgccgccccgaactcccctcccggcgcaggttctccgccgcacgatccggcaaaaccgggaaaggcgacgagcggaacctcgaaatattgggcgccccgccatgaagcgccgctgacaatatgccgcaagaaacccggcgttctcggaacgccgggtttcccgtaactcgcaaccggttctgcggattactcttcgaccggaatgtccttgttgacgttcttcgaacctaccagcgcgtagaagagcatgtaggccagacctgcgacaaccacccagtagctcgagaggtaacctgcgaagtcggccacgccgccctggatcagcgggaggataccgccgccgcaaaccatcaccatgaagatacccgaacccatcgaggtatacttgccaaggccttcgaccgcgaggttgaagatcgtgccccacatcaccgaggtgcagaggccgcaaagggtgaagaagatcacgccgacaggcacttccaccattccgaacccggttccggtgaacacgggcatcgcacccatcacgtccgtcggggcgaagatgcccaccagcacgaagatcagcgccagcgaggcgacgaacgaaagctgcaccttgctcgaaatcttaccgcccagcaggccgcccagcagacggccgcacatcatcaggaaccagtaggtacccaccagcgaaccggccgcagccgctgccatgcccacgccgctcgtcgaagcgtcgggtgccgccgtaaggaacaggttcatgaagttgggaataccgacctcgacacctacataaataaagatggcgatcgttcccagcaggaagtggcggaacgaaagggcgctgtgcttgtccttgacctcggcctttttctcctggatggcgaacggctcgggaatgttgaccatgtagagcacgacgaataccacggcgaagatgcccattgcgatccacagtgcgggagccgcgtcgctgatcgtggcgttggccgcattacccatcaggtaacccaccagcacaggaacgatggtcgcggaaatcgagttgagcgaaccgccgaactggatcagctggttacccttcttgccgccgccgccgagcgtattgagcatcgggttgacgacggtgttgagcatacacatcgagaagcccgagacgaatgcgccgatcaggtaaatcgggaaactgcccgcttcgcccgaaagatactggatacccacgccgacgaaaccgattgccacggccgcaagcgccgtcttcttgtagccgatgcgcttgagcatcataccggccggaatccccatcaccgcataggcgatgaagttggcgaaattgcccagctgcgacatccagttcgccacggcgaactggttcttgacaattacgcccagcggattcgaaagccccgtcacgaatgagatcattgcgaagagcaagaacatcatgatgatgggcagcgtgtaattttttttctgttccatacgattttatctgaatttaggttaatgagtttcgcggttatctgtccctctcggcgatgtaggcgcaaaggttgacgagcgccgtgcggtattccgaggggtcgtattcggagagcatctcgacggcccgcgctacgtagctgcgcatcacttcggcggcaaaagccagcccgccctcgttctcgaccgtattctgcagatactccaccgattcctcctcctcgcggcagccggccagccgcccgagcaactcggcacggcgttcgggagtcgccttgtccagcaccgctaacagcggcagggtgatcttcccctcgcgcaagtcgttgttggcgggtttgcccgtatgcgccgtacgcatgtagtcgaggatgtcgtcctgtatctggaacgccatgccgatcgcctcgccgaaacggcgcatcagcgccaccttctcgcgcggggcacccacggccatcgccccggccgatgcgctgaccccgatcaggcatgcggtctttttataaataatgtcgaggtacgcctggcgcgtcatggtgtgcttctcggcacactcgctctgcaacacctcgccctcgcacaacgccgccatcgaaccgcatacatgcgtcaccaggtcgaactggccgctcgaaaggccgatattcatgttcctcgcaaggatgaagtcgcccagtatcaccgccttgtgcgactgccagcgggcattggccgacgggcggccccgccgcgtatccgactcgtcgatcacgtcgtcgtggatcagcgacgccacgtggatcatctccacgagcatcgcggccagatgcaccctccgccctttggccgccccctccaccggggagttcatcgccgccgacagcatcaccaacagcggacgtatgcccttcccgcgcgaggaaagcgcataacgcagcatgtcggcaagcaattccccttcggccgtaaactgacggtcgacgaactcgtcgaacgcctccagttccgcagtcacaggtttgcggatcgtatcgagtgtaatcataaaaacaaacttaacccagcggcaacggacgcaacatcgcccgggacgggcccggataatccggacatcccgcacaccgggtcgccgcatatctttggcaaagatagtgatttttcgcaatcgcgactcgtcaagtaaatgttttttcgtacctttgcgaaacttggatctttcaccgggacaggctgcagcccgggaatgcccgaacaaattcggcacttctcccgccctgcactatccttggcaacggttaacgacagggaaaatggatttttcgaaaacgatcatacgccggctggcgccggcagcggcggcgctcgtcgtcttcttcgtggtgagcgcggcctatttcgccccgcaattccgcggcgaagtactgccccagcacgacgtggtgcagtacgaaggcatggcaaaggacatcagcgacatgcgcgcggccacgggcgaagacccccagtggacgggcggcatgttcggcggcatgcccgcctttttgatcaacgtggcctaccccgcgcagatcgtcaagcgcaccgtggggcaggtcgtgaaactcatcgacacgcccgcggccttcctcttcttcgccatgactgccatgtggctgatgctgctcgtcttcggcgtcgacccctgggtcggcatcgtcccggcgctggcctacgggctctcgacctatttcctgctgatcataggcgccgggcacatcaccaagatgtgggcgctggtctatgccccgctgatgatgggcggtgcgtggatgaccctgcggggaaacatgtgggcgggcggggcgctcacggcactcacggcgtcgcttgaaatcggcgccaaccacccgcagatcacctactatttcctcctggccatggccgccttctggatcagcgaggggatcgcggccttcagggagaaacacctcggggacttctggaaacgcacggcggtactcgccgccgcaggcatactcgccgcagggtcgaatttctcgcccctgtggtacaccgccagccactcgaaggaaaccatgcgcggcggctccgaactggcctcgacctccgagacttcgcagaacgggctggcgctcgactacgccacggcctggagctacggacgcacggagagcctgaacctgctgatccccgacttcatggggcgcgaatcggccacgaccttctcgcccgacggcgaggtggctgccgtactgaacgaatacgggctgcgcggcgccgcacaacagctgccggcctactggggcagccagccctacaccggcggcccgacctacctgggcgccgcggccattttcctcgcagcgctgggcatcgccctggcacgcggacgcaacaaatggtggatcgtcgccgtctcggtgctgatgctcctgctggcatggggacgcaacctaatgtggttcacccaactggccttcgacctgctgcccggctacaataagttccgcaccgtctcgatggcgctcgtcgtcgtccaatgggccgtgccgctgctgggagcactggcgctgatgcggctttggcgcggcgaaatcccgcgccagaggctgttgcgggcgctggcatgggccgcgggcgtcacgggcgggctctgcctgctgctggccgtcgccggcagcgcgttcttcgatttcggccgcgcggaaagcaccgggatgatgaccgaacagttccgccagctgttcgaggccaacaacatgcaggattacctccagcgcggcatggatgccgagatgggcatcgccacgggcaatgccatggcggccgaacgcgcctccatgatgcaggccgacgcatggcgctcgctgctgatgatcctgctcgcagcgggcggcgtagcgctgttcgccctgcgccggatcaacaaatacgtgctcacggcactgctcgccgccgtgatgctgctcgacctggtgccggtcgacttgcggttcatttcgcacgacaacttcatttcggcgcgccagcaccaggtcacggccacggccgccgacaaggcgatcatggccgacaaggagccggggttccgcgtcttcaacctcacagtcagccccttccaggacgccacgacctcctatttccaccgctccgtaggcggctaccacggcgccaagctggctcgttaccaggatctgatcgaccgctacctgagctaccgcaacgacgccgttctggacatgctcaacacacgctacctgatcgtgccgggcgacggcggacagcccgaagcggtgctccgcccgacggccaacggcgccgcatggttcgtcgacacgatcgccgtggcggggagtccgcaacaggagatcgacctgctcggggaaaccgacctgaaacgaaccgccgtaatcgcagaaaaagacaagccgtacacgcagggctggacggcgtcccccgccgacacggcagccgtacgcaccatcgccctcacggaataccgtcccaactacctcaagtacgaatacaccgcccccgcagagagcgtggcggtattctccgagatcttctacccctacggctggacggcctacgtcgacggcgcggaagccccctgtttccgggccgactacgtgctccgcgccatgaggctgcctgccgggcaacataccgtcgaatggaaattccgcgccccgggatggacggcggccgaagccgtgacgctcgtctcgtcgctcgtgatcctgctcggagctgccgctgcaattgtttattggattcgacaaaagaggaaagagaataatccggacgaataacatacgaatcccgccaggacaagcccccgccgaggcgggggtttaggggtgggtcagacttataaacacggcgaaacgccgtgaatgaatcggacgacggaaaagagccgtcgaaaaagcatttcggctatgaaagacgacaagcgactgaagcggaaagtccgcaactcctacatcgtatcgacggtgagcatcaccctcgtgttgttcctgctgggctcggtgggctacctgatggtcgcggcgatgaaggtcgccgacaccctgcaggagagcatcgccgtgaccgtggagctggaaaacgggctttcggacgaacagaaggacgcagtcaaccggcagctcacggccgaagacctcgtggcgacgatcgcctacgtcggcaaggaggagaagatcgaggacgccgagttccgcaagatgttcgccagcgaattcgaggaaatcctggacgaaaacccgctgctcgactcgttcgagctgaccctcacggccgcctcggccgacaaggagctgctcgacggcttcatcgccggcatctcgaagatcgcgggggtcgaacgggtgagctacccggcgctgatggccgaacggctgcacgccacggtaggcaaaatccggctggtgctggtgctcttcggcggggcgctgctcgtcatttcgctgatcctgctgggcaacaccatccggctggccatcttctcgaagcgttacctgatcaataccatgaaactcgtcggcgccaccaagtggttcatcatgaagcccttcctcggcagcagcatcacgcagggcatcctggccggactgggagcctcgctgctgttcgggctttcggtctacgggctcaacgaagccgtccccgaactgctgacgatcgccgaggcgggcaaggtcgccatcatcctcggcgcgatgattgccgggggcatcgtaatctcggggcttttcacaatcctcgcgctgaacaaattcatcaacatgaagtcgaacaagatatacctttattaaatgaaaaaagccaataacacccctccggaacaggaaaatccccgcatgcccctgacccgccgcaactacatcctgctggccgtcgggttcgccgtcatcctcctgggcttcgtgctgatggccggcggcggcagcgattcgcccgacgaattcaactacgccatgttctcgtggcgccgcatcacgctggccccgatcctggtcatcggcggtttcgtcatcgaaatctacgccatcatgaaacgcttcgaaaaataatccgcccggccgtcccggcgcccggccaccggcggcccgttccggccgaggcacgacgcgcccccgcaccggggcccccgatgcggcgcgacggcacaggagatatacccgcttaaatcagttatggacaccttacaagccatcctgctcggtatcgtgcagggtattacggaattcctgcccgtgtcgagcagcggccacctgcagatcgccaaggagctgctcggcgtggaactggaagaaaacctcacgttcgacgtggcgctccacgccgccaccgtactgagcaccatcgtggtgctctggagcgaggtgtggcgcctcctgaaggggctcttttcgcgccgcttcaacgccgagcaggcctacgtgctgaagctcgtactttcgatgatccccatcggggtcatcggcttcctcttcaaagaccggatcaacgccatgctcgacgccccctacatcctggtaatcgtgggcgccatgctgctgcttaccgcgacgctgctggccttcgcctactacgccaagccgcgccagaaggagaccatctcctaccgcgacgccctgatcatcggcctggcgcaagcctgcgccgccatgccgggcctttcgcgttcggggacgaccatcgccaccgggttgctgctgggcaacaaaaaggccgccgtggcacaattctcgttcctgatggtgctggcgccgatcctgggcgaaacgctgctcgaagccgcaagcggcgacctcacggccggcatcgccacgggcacgctcgccgccgggttcgccgcctcgttcgtcacggggtgcctggcctgcaaattcatgatcgagatcgtcaagcggggcaagctcatctggttctcgctctactgcgcgctggccggcctggtatccatcctaagctatttctgctgatgaaggagacactcgacctgcggggcctcaacttcgaagagggctacatcgccgtcatcgacaagcccctgaactggacgtccaccgacgtcgtacgcaagatcaagttcgcgctccgcaagctcggctaccgcaagatcaaggtcggccacgcgggcacgctcgacccgctggcctcgggcatcctgttggtctgcatcggccgcgccaccaagatggtcgacgccctgcaggccgaggagaaggagtacgtggccgacgtcatgctgggtgccacgacccccagctacgacctcgaacaccccgtcgacgcgaccttccccacacagcacatcacgcgcgggaaggtactcgaggccctcgccgcactctcgggcgaacgcctccagtcgccgccggtctattcggccaaaaagatcgatggcatgcgcgcctacgaactggcgcgcgcgggcgaggaggtcgaaatgcgcaaggcgctcgtccacatctacgaaatggagctcctggaatacgacctgccgcgcatccgcatccgcgtgcgttgcagcaagggcacctacattcgttcgctggcccacgaaatcgggcaggcgctcgaaagcggcgcgcacctgacttccctttgccggacgcgcagcggcggcttcagggtcgaaaacgcccacagtctcgatgattttctaaaaaaattgcaggaacttgaaacaaaataggcttttttgcgtatagaaattaatctatgttgtttatttcgaacgtaaaatagagtattccacctatgaaattatcgcaatacgggtatgatttcgcccccgaaatgctggcgaaacacccgacggaaaaccgggacgattcgcgcctgatggttatcgaccgcgccaaaggcactatcgaacaccgtattttcaaagacatcatcgaatacttcgacgaaaaagacctcttcgtattcaacgacaccaaagtcttcccggcacgcctctacggcaacaaggagaagacgggtgccgagatcgagattttcctgctgcgcgaactgaaccgcgaactgcggctctgggacgtgctggtcgacccggcccgcaagatccgcatcggcaacaaactctacttcggcgatgacgacctgctggtggccgaggtgatcgacaatacgacctcgcgcgggcgcacgctgcgcttcctattcgacggctcctacgaagagttcaagcagacgcttttcagcctgggcgagacaccgctgcccaaatgggtgcgcgacaaggtcgaacccgaggacgccgagcgctaccagacgatcttcgccgagcacgaaggcgccgttgccgccccgacggccggcatgcacttctcgaagcacctgatgaagcgcatggagatcaagggcatcgaccgtgcgttcgtcacgctgcacgtcgggctgggcaacttccgtacggtcgacgtcgaagacctctcgaagcacaagatggactccgaacagttcttcgtgaccgaagaggctgccgggacggtgaacgaagccaagcgcaacgggcacaaggtcgcagccatcggcacgaccgtcatgcgcaccctcgaaacggcggtctcaaccaacggcatgatcaaaccgatggaaggatggacgaacaagttcatcttcgcgccctacgagttcacggtggccgacgccatggtgaccaatttccacctgccttactccacccagctgatgatggttgcggcgttcggcggctacgaaacgatcatgaacgcctataagatagccaaggaagaagggtaccgattcggcacttacggcgacgcgatgctcattctttaagattttttcactatctttgcacaatagacctcgaaagatcaaatactcgaaccatggcaaataagattctgtacgtctgtcaggagattacaccctatcttccagagacggaggcttccggactttgccgcgctctcacgcaggcgatgcaggagcgtgggaacgaaatccgtaccttcatgccgcgctacggctgtatcaacgaacgccggcaccagctccacgaggtaatacgtctttcgggcatgaacctcatcatcgacgacaacgaccaccagctcatcatcaaggtcgcctcgatccccgcggcgcgcgtgcagatctatttcatcgacaacgacgactatttctcgcgcaaggccgtgctgaccgacagcgaaggtgcggaattccccgacaacgacgaacgggccatctttttcgcccgcggcgtgctggagacggtcaagaaactgcgctggacgccgaccgtagtccattgccacggctggttctcgggagtgatcccggtctacctgaagcgcattttcgccgacgacccgattttccgcgacgtgaaaatcgtcgtttcgttctatgccgacggcttccccggggaactggacaagggcttcgccgcgaagatcgccggcgagggggtcaaggataaaaatctctcaattctcgacgtcccgtcatacgaaaacctctgccgcttcgttatggaatatgccgacggtgtggtcgcagcttccgcagatgccgaccccagggtattggaaatcgcccgtgcgagcgggaagccgatgctcgaataccagtcgcccgaggcagcggactttttcgataattacaaccgattctatgaagcgattcaataatttccgccgtttgctccgcgccgccgccgtcatgacggccgtcgctgcgatgacattcgcgggctgcaccaaggtcgacgacacactggggtcgaacctcgtgccggacaaccagcagatgaaagcgggttacgagaccttcggcgccctgacgctgaagggggatctcaaccccaggcgctatgtcgagacgcggctttaccagaccgactcgctcatcacgtcgaacctcagctacgggtacatgggttcgatgctcagcgacacgttcggactgcgcacggcagggttcctcacgcaatacatcccctatgaaatcgattcgggatatttcgggttccgcccgatcctcgactcggcgatcatcctgctttccatctccagctacgggagcgacacgcttaccccgcagctctacaacgtatacgaggtcgtcagcaacaaatacctgaccgagaaacccgtcgaaagcggaaagtcggaacgcgacacgaccttctacctcaatttcgaccccgtcaaggcgggcgccgtaggcaacgaggtgctcttcacgttcaccttccccgacggagaggagacgggtcccgccaccacgtacgccaccatgaaaccgacccagaagggacgggaattcatcaaccgcctgatgcttcaggagggcacgtacaagggcgactattcgatttacagcctcgacagcctcgagcagtgggtcgccgaattcaaggggctctacatcgtcccggccgtcgaccagacgacccccaacaagggcaacatctacgccacgtcgctcgacgcttcgggctttgcgatctacgggcgtaaccgcctggagagcgaccctacgctgatcgccgacacgctctcgatcccctacattttctacgactcttcggtcgactacggcaacgtgtcggtcaacaccatccgccacgactactcgaaagccacttctccgcagaggttcgacattgcggatgcggtcgagaccaacgagaaccgccccctcagcaagcaggtctacgtcgagggcatgggcggcgtcgtaacggaaatgaccttcaccgaggagttcttcaggcagctggcgcagatcatcaaggacgagaatgccgcttccgccaaggagttcaataccctggccatcaaccaggcccggatgtcggtctatttcgcgggcagcaactacgactggcagaacctgaccgacgtgaagcacatgatcgagcagatggacgcctcgcagagccgcctgggcctctataccaattacaaaaagctctcgggcatcaccgactacgcctatgcctacgagaagacctacagcacgacgctgacctacggcggttacatcaaccgcagccggggctgctacgtgatggacatcacgggccacgtgcagagcatgtggaactactaccaggaggccgtgaaggagctgggcgagaacgccccgtgggaagagatcgcggagagaatcaaaaccaggactatgtacatggggcccgaggcatacggtctctacacccagaattacagtgtgatgcagggtatgacgccctcggacgggtcgctgaccaaggaggatgccccgatcaagatcgacatcgcctataccctggtcaaataaaggatcaacagcacggaatgcgaaacctaagtactcatgcttaggttttcgcatttcagaaaagccataaagaacgcatgcaggaaaatttagtaatcgtcgagtcccccgccaaggccaaaaccatcgagaagttcctcggcaaggactatatcgtcaagtcgagtttcggacacatccgcgacctgtcgaaaaaagacctgggtatcaatatcgacgacgagttcaggcccgtctatgaaatcccgggcgacaagaagaaagtggtggacgaactgaccaagctggccaagagcaagaccgtatggctggcgtccgatgaagaccgcgaaggagaagccatcgcatggcacctgaccgaagtgttggggctccccgtcgaccagaccaagcgcatcgtcttccacgaaatcaccaagcgggcgatcctcgaagccatcgagaacccccgcacggtcaacatggatctggtcaacgcacagcaggcacgccgtatcctcgaccgcctggtcggtttcgagctttcgcccgtgctgtggaagaaagtgcggccgtcgctttcggccggccgcgtgcagagcgtcgccgtacggctgatcgtcgagcgcgagcgcgagatcatcgccttccgctcggcaccctatttccgcgtcgtggcacagttctacgcggccaacgaccccgaaaagaccctcttcaaggccgaactctcgtcgcgcttcgaaacgcaggccgaggccgaggcattcctccgcagttgcatcggcgccactttcaccgtgtcgaaagccgaagagaaacccgcacagcgtttcccggcgccgcccttcacgacctccacgctccagcaggaggcgggccgcaagctgggcatgtctgtttcgcagacgatgtccgtcgcccagcacctctacgagcagggtctcatcacctacatgcgtaccgactcggtaaacctctcgcaacaggcactggcccagtgcaaggaggagatcacgaaactctacggcgaaaaatattcgtcgtggcataactacaagaccaagaccaagggtgcccaggaggcgcacgaagccatccgcccgtcgtatattgaccggcagtcaatcgagggcaccccggccgaaaagaaactctacgacctgatctggaagcgcaccgtagcctcgcagatggtctgcgccgaactcgaccgcacaaccattgtgatcgacatgtcgggctcgtcgcagcaattcgtcgccacgggcgaagtcgtccgcttcgacggcttcctgcgcctctactccgaatccacggacgacgaccaggccgccgaaagcggcgaagggctgctccccaaaatggcacagggcgacgaactgctttcgacgcagatcaccgccacggaacgcttcacgcaggccccggcacgttacaacgaagcctcgctggtcaagcgcctcgaagagctgggcatcggacgcccctcgacctacgcaccgaccatcacgacgatcatcaaccgcggctacgtggtcaagcaaaacagggaggggcagaaacgcaactacgtgcaaatgaccctcacgggcgacaagctcgccacgaaaaacctctcggaaagctacggcaaggagaagaaccgcctttcgccgacggacatcggcatggtcgtcaacgactacctcgaaacgcagttcaagccgatcatggactataacttcacggccagcgtcgaaaaggaattcgaccgcatcgccgacggcgacatcacgtgggtgaagatgatccacgatttctacggccccttccaccagatggtcgacaccgccatcggcacgcagaccgacaagaagagccaggcacgcatcctgggcaacgaccccaagacggggcatatcgtcaaggcacgcatcggccgctacggcccgatggtcgagatcgaaggcgaggaggggcagaaaggccgcttcgcctcgctcaaaaagggccagctgatcgagtcgatcacgctagaggaggcgttggcgctcttcgcgctgccccgcgacctgggccagctcgacggcgaagagctctcggtgggcatcggcaaatacgggccctacgtgcgccacggcaaatcgttcgcatcgctgcagaagggcgacgacccctacacgcttacctacgagcgggccgtggagatcgtccatgcccagcaggcggcggccgccgcggccaacactccgctgcggagcttccccgaagagcccgacatgctggtcaagaacggccgttacggggcctacatcgcctacaagggcaagaactaccgcttgcccaagggcagcaaacccgaagagctcacgctcgacgactgtctgaagatcgtcgccgactcgaaaaaatagcaacacccacaacctaaaccctaaagcaatgaagaaactcctgctgaccctcgttgccttctgcgccgcacttgcggctgcggcacagacacccgacacgaccgccgccgaaggctaccggttcaccgacgtcaaacttatccccatgaccccggtcaaggatcagagccgtagcggcacctgctggtgctactcgaccctttcgttcctcgaaggggaaatcctgcgtgcgggaggcgcccccgtgcacctctccgaaatgtggatcgtccgccatacgttcatggagaaagccgtgaaatacatccgcatgcacggcgagatcaacttcgccgaaggcggggcctcgcgcgacgtgacggaaggcatccgcaactacggcatcgtcccgttcgaagcctacccgggcttcaactacggcaccgagaaagccgatttccacgaactctcgcgcgtgctgaaagcctacctcgacgcagtgatggaggccagcaccaaatcttcgaacaagccgctctcgacggcttggaaacggggtttcaacgccatcctggacgaatatttcggcccgatgcccgagaccttcacctatcagggcaaggaatacacgccccggacgttcgccgcctcgctgccgatcgacatcgacgactatatcgacatcagttcgttcacacaccaccccttctatacgcaattcatcatcgaggtgcccgataactggatgtggggcacggtctacaaccttccgctcgacgaaatgatggccgtcgtggacaacgcactggagaacggttatcccgtcgcgtggggcaccgacgtaagcgaaaagggattcagccgcaccaaagcgatcggtatcgtaccggccgccgacctcgaaggcatgggcggcaccgaagccgagcgctggggaaaactgacgcagaaggagaaggatgacgcactctacaagttcgacaagccgggcaaggagctcgccatcacccaggagatgcgccaggaggctttcgacaactacgaaaccaccgacgaccacggcatggtcatcatgggtacggccaccgaccaggcaggcaaccgctactacaaggtgcagaattcatgggacgtacgtccgccctacgacggattctggtatttctcgcgcccgttcgtcgcctacaagacgacctcggtcatggtcaacaagcacgccctgcccaaggagatcgccaggaaactgggcatcaaataacccgggcgcaacgaccgcccctgagaagcctcagccgcatgg

SEQ ID NO: 312 - DNA, 222279 bp, Alistipes onderdonkii
  source 1..222279: mol_type = genomic DNA
ccgccgagccgaagatgacgggcttcgtcttcaagatccacgccaacatggatcccaaccaccgcgaccgcatcgccttcctgaaaatctgctccggaacgttcgagcgcaaccataactacctgcacgtgcgcagcggcaagcagctcaagttctcctcgccgacggccttcatggccgaaaagaaatcggtcatcgacttcgcctacccgggcgacatcgtcggcctgcacgacacgggcaacttcaagatcggcgacaccttcaccgagggcgagaagctcaaattcacgggcatcccgtcgttcgcccccgagcagttccgctacatcgagaacgccgacccgctgaaattcaagcagctcgccaagggcgtcgaccaactgatggacgaaggcgtggcgcagctgttcgtatcctcgctcaacggccgcaagatcatcggcacggtcggggcgctccagttcgaagtcatccagtaccgactcgaacacgaatacaacgccgcctgccgctgggagccgatctcgatctacaaagcctgctggatcgagagcgacaacgccgcgcagctggccgatttcaagcgccgcaagcacaccaacatggccgtcgacaagcacggccgcgacgtcttcctcgccgacacgagctacgggctggcgctggcgcaggagaatttcaaggacatccgcttccacttcacctcggagttctgatccggggggggctgtccgatccgtaaaaatcccggcgggaacccatgtgggatcccgccgggattctctcttcctgccggcaatacgcccgccccggccgcgtcaaccgcgatgccgcaggcagatcgcaggtacggacggcgcagacaggtcacaggcatggacgccgcacgcacggacatcgcacggcttgccagccgggctactcgaaaacgggagcttcggcactccgggcgggtacgtgcccgcgcacctcgggccacccgtcattccattcgatccggtcgagaatcaggtaacgcggcccgcccacctcgagccgggtatggtacagcatccagtcctgccccttgtcgtcggtaatgaactccgcattatgccccggggcgacaaacccgttgccgttgcccacgaccagttcgtggtgcacgccgagcatgtcgcgccccgcacgatcgacataaggccccatcagcgaccggctgcggccgacgactacatggtaatccttcatgaaatcgcccgtcgagacgatcaggtaatagtatccgtcccgcttgtggatgtaggtgccctcgtactggtcaccggcgatcttacgcttttcggccccgggtttgagcgataacccgtcgtccgcaagttcaatcgcccagatgccccggaaacttccccagaacatgtacttgtgcccgtcctcctcgatgtagaactggtcgatcgaaatatcgaccccgatctcgtcgctgccgatcagtttcccgtggtcggtaaagggcccgacaggcgaggggcccgacgccacgccgatggcgtgcttgttgttctcccccggctgggaataatacagcacatacctgtcgccgatcttgttgatgtccggtgcccagaggttggccccggccttgtcggttatctgcggatggttctccgccgtaaagacctcgccgaccttcgtccagttcaccaggtcggacgagcgcaggatggggatgttgttctttccgctctcggtcgcatagaggtagaaattcccgtcctcggcgcgtattaccgtggggtcggccacgaggaattcccggaaaaccgggttcttgtagctctttgccccggggttcccgggcaggggatccccgtccccgctgcgggcgggttcgggcgtgccgcaggcacaggccacgggcaggaacagcgccgtgaaggcgagtgcgacgaaataatttttcatagcgtatctcatttacgaattcaacgatattttaccggaaccggcaaacaaagatacgaaaaatacactgtcttcggccgggcggaaggggatttccgtttccgcccggccggtgcggcacggtagcaataaaaaaagcctgctggaaaccagcaggctttcacctatatatccgcccgttaacgcatcggcacctcgatgaccagcacctgggcgtcggccgaagccctgatcccgaagccgtcggtatcccagacccccatgccgtcgcggcggacgagcacttcgccgtccacctcgaccagcccttcgatcacgaagacataggccccgttcccgggcgtatgcatccggtattcaacgtcatgccccttgtccaggtcgagcgtcgagaaccaggcatcctgatggagccagcccgtgttttcgccaccgcggccttcgggagccacgatcgtcctcaattcgttacgctttgccggcgccagccggatctggttgtaacgcggcgtatggttctccgcatcggtcagcacccatatctgcaggaatttcacgggctccgtgtcgctggcgttcatttcgctgtgcgtaatgcccgtcccggccgacatgacttggatctcgcccgggcgcagctcctgcatgttccccatgctgtcgccgtgccgaagcgcaccttcgagcgcaatcgacacgatctccatgttatcgtggggatgcgtcccgaatccttcgcccggggcgaccgtatcgtcgttgagcacccgcagggcgccgaaatggattcgccgggggtcgtaatatccggcaaaactgaacgtatggtaggtatcgagccaaccatggttggcgtgtccgcgcgtctgtgcgcggtgaatcgtcttattcatagcaatgattttttattatacaatcggttgggcgtgaagcaaactccgcgccagccgcgcctgcgcgcagcacctgacggaatccgcaggctacaccttcagaaagacgttctttctgtaaaggaaatagagaaacagccagcatacggccacatagccggcactattgaccacggcggcaagcgcctccgggcatttcgacgccacgcccccgaggaagaaatcggatatgcgcccgaagcccacgatacgctgggccagatagatcgtgatcgaattgagtcccacgacacggaagaagagcgtccagcggcgccatcccctgacatcgatcagatagtagaacagggcgaacatcgccagcgaataggcagccacgacacatacgaacgtactcgaccacagcgatttgttcacaggcaccaccccgttgaaagccagccctgcgaccagcagcgccacggccgccgcaatcatccacgacgccttgcggccgcccgacaagtcctgccgccgcacgaattcccccgtaaacatgcccagcatggccgtcaccacggcgggcaccgtactcagcagcccctcggggtcgaatgtcttgccgtacagcttacccggcaacagcagccggtcgacataccctgccaggcaaccctcccgggtcaatggccctgcgcccgcgacgtcgggtgccgccaccagcgccgacaacaggccgtaaccgaccagtatggctgcggcgatcgcaatgcgcgccttcaccccgaaattgaggtacagcaccgcggctatgccccatgcaaggccgatacgccccagtacgctggcaatacgcaggttttcgaaatcgagcctgaacaacccgttgtaaaccacccccagcaacaccagcgtcagcgcgcggcggacgatctttgcatagatcgtcccggtcgacaaccccagcgaacgctgcttggaaagcgaaaaggggaagctcaccccggcaatgaagaggaacagcggaaagatcgtatcgtggtgggtgaagccgtcccagctggcatgccccatctggctggcaatgctgtcggtcacagcgttgggccacaggccgcacacggcgacgacgagcgaggcgaaccccatgataaagagcatgtcgaaccccctcagggcatcgagcgactgcaatcgttcggacggtttcataattcgggtgctgttcttccggcccgatccttgtcagtgatccttcttcgaccggccctgttatactttacacaaagataataagaatttctgatatatccaaatatatcggggcccggcggagcgcatccggccgggccccgctttttccatcggcaactactccaactccaggttgctcacccggtcggtcaccccgaacgggaagtcggggtagacgtacagcccgaaacgcggctcggtctgaccgtgcgtgtagccccagatgctggcgtaatcctccgcgtcctcgcccatcttctccaactggcgcagataggcggccaccgacttgttctccacgatgtagatctcgcccatacggtcaatgatcgggctgtggcggcgcgtacggtcgtggtcgaagcgcaggatacgcttcccctcggccgtgatgcccaccagccggaaggtcatgctcttgccgatggccggcaggttgagcacactgcggtcggtggccaggaacggcagccggtgtttcttcatgaagcggcggatgcgcccggccgtgtcgccctcgccggtcagcgccgcatccagttccgcggtctgctcctcggtcatccgcccgaagagcttctcttcctgctgctcctgcatcgaacggctgttgggcgtgaagacggcgtagttttcgccgaagcccttcaccgagaaggtatagtaacagaccacgcccagcgagttgagcacctgcctcaggcgggtggtatgcccgcggcgcgatgccgcgacggtatataccaactggttggtgatgagccacccggcggaaagtagcttccgtatagcctcccgcgcctcgggcgtcacctccagcggcgactggaaatgcgtctggatgacgaactgcttcacgccgacggccgaggccttctcccggaactccttcagcacctccaccagctggtcgtcgatgcgcatcggcaggtaagccggcaggcgcgaccccagccgcacgcgttgcaactcggcatatttttcaccgtcgggacgcgcctggttggccttgcgcttgcggcaggccatgcggtagaccgcctcgaggatattgcgcagcgtcttgttctggctcatcagggcgtcgccgcccgtgatgaggatgtcgcgcagctgcgtgtcctcctcgaaataagccatcaggcggcgcagtttgtgatcccagctctccttggggcgcaggctctcgaactcgaaattgagccgttcgctctggaagtcgtacatccgctggcacgaggcgcacaacccgccgcaggcacgccccatcgtatcggggatcaggatcgccacttcgggataacggcggtggatattgtgcccgtcgggcagcagccacccggccgcattgggttttccggcctcgacgacgtcctccttctcccaggcgcggatattcccgtaggtctcgaccagctgcggcgaatagaggatataactgcgtatcgtctcgtcgtcgtacgctttgccggtgatgtccagcagcgagaggtaataaggcgtggcgaagaacggcatcccctttttgcgggccttcgacagcaggtacatggtctccgccgagagcgagttgcccagaaaccggttcaactccgaagggctcttcacggccatcgccaggtggaaccgaaagtcatcccaccagacgcttacctgacggtatttatcctcgtaggacatcccctcctcgaaacggaaacgcgatggggtcgacttgcggttctcgatcttctgcaccaagaggtggagcatacgctccctgttccgggcgcgcacctccaccacctcgggatcgagccccgtcggccagcgatcgctgcgggtacggacgcgctgcgacgtgagcggctgcaactccagcccctcaaggcgcttgaactggaaaaacaggtcgatgaacaggtcgcaacgcatctccgggttctccagccgccccgtgaggaactgccacagcaattccagcgtccgcacgggcatctgctcaccggtcgaaagttcgctcacctcccgcccgtcgtagccgatcagcaggcggatctgttccgccgcctcgccctgcgccgccgcatgccgggcgacgaactcttcgagccgggcccggaactccccggcatcgcggctcgcgtcggcctgggcaacaagtcccggcagctcctggcggaaaagcagcccgagctggtaaagcgtgaatgaaagcattttcctttgtttcataagcactatcgtttatttttccgttataattttcggatgcgggcggcaatgtccccggtacggtcgtcagcgtacaaaaaaaggcacggcgcaataaaatcacagatacacccggaaccgcaggctcccctgcaaattcctccgcattcagacgatatacccgggaaaaataacagccctccgggcgaatatcaacagccgccgctcacaggcgagccggcaagaatcggcggcctcaaggcaaaaaaaacgacggccgtcatacggaatccgctacaaagataagaaaaaatttgaaacctcccgtccgcggccttccgggtttcccgcaccgcccgcatcttccgtatcccataaaataacgtatttccccgcagaatcgtattctccccgcccgcacagcccctgcccgtaaacagatacaaaaacaagaaagccccgacaatctctcgattatcgaggctttttgcttgcaaaaatggtaaggggcagataggcacccattcccatataataattcattaattacataaagaaaaatacatagacttatattcgccaaaaatatggttcttctgctcctggtttcaattctgcattgggaaatggcctactctgttcgcatcgttttacggaaatacaaacccaattcaatggggtatcacattctccaattatgcgtcaccaaaaatagctgtcgcaagcgcatcagtctgaaattatacgtcgatatggtctaccttacgaccgatcatattcaacggctggccgacgggaattatatcgtttacaaacgcaacaaaatcaagcaccaaaagaacgcaactgccatccgaatccacattacgccggaaattcagggtttgatcaaacagctgcaatctgcctctcctactgtcgaaaattatttgttaccgatcatcacttgttccggctatacgggcgagaagctatacaaccacatccgaagccgttacgccaaatatcagaaatatttgaaatcgttggccgaagaactcggtatcgattatcatttgaccagctatgtaagccgtcatacaatggcaatgaccttgcaatacaataaaatcccgcgtgaaatcatttcgcagatgctcggtcatgccgacctcgaaacgaccaacacctacctcgacagcttcgacaacaaggtaatcaacgaggcggcaaaagttttgtaataagccgacaatggtttaatattttttgtatagttgtactatgagtacaacaccacaaacaaaaataaaccaactattgcaggctctcccatccggagcagtctatttgtcgtcttggatgaaactcaaaaacatctccaacgacttacagcaccgttacataaaatccgcttggctgactcccataggcacaggtgtaatgatccgcacgggcgatacgccgacattatacggagccatgtacagcctcaatacacaggcagacaaacatctgacaatcggagccatgtcggcactggaaatccacggatattcgtactacctcccgatgggcaggccgaccatttcgctgtctgctccgcaaaaggagtatttaccgctttggttcagaaaatatgactggggtgtgacgctccggctgtttaccaccgaaatattcaattccgtcaccggaatcaccaccacccgacaaggggttttcgagttgccgatctctaccccggaacgggcgtttatggagtgtctgcacctcgcaccgcaatattatgatattaccgacctctattatgtgatggaaatgctgtcgatactcccgccgaagaatgtacaacgactgttggaggggtgccgttccgtcaaagtgaaacggctgttcctctttatggccgaaaaggcccgtcatgcgtggttcgaggccctcgacctcgaccggatagacctcggcagcggcaagcgggtaatcaccaagggagatgtttacgataagaagtaccaaatcactattccggctgaactgaaaaatgattaatcaagagtacaaagagcgagtgcggctgttgctccgcatcatcccgattatttcggcggaagaatgttttgccgttcacggcggcacggcaatcaatctgttcgtgcaaaatctgccgcgatattcagtagacatcgacctgacctatattcccgtcgagcctcgggaagcaagcctcacccatatcaaagaacggctgaaagcggtaaaggcaaaaatcgaggccgcgataccgggcattgcagtacgcgaagttcccgacaaactgatttgcactcataacgggcatttcgtcaaagtggaggtaaacgacgtgaagcgaggcatcatcgcaccgcccgtcgaattgcccttatgcgacctcgcccaagaagatttcggtgtattctgtaaagcccgcatcgtgccactgtcgcaactccacggcggcaagatcacggctgcactcgaccgctagcacccgcgcgacctgttcgatgtaaacctggtgctctattatatcaaagacttcgacgcgatcaagcgcgggttcattttctgcctgctgggaagcgaccgcccgatcttggagtcgctcaatcccaatttcaacgaccatctgacaccgaccgacaaggcgtttctactcggattcgaggacgggacgccggattgggacgcatcggaataccgggatttcctgcattatccgtcggttcaatggaagctactcaacattagaaagctgaaagaaaagaatccacagaagcacaaggatagcataagcaaactacaaaaatatcttgccttgtaatccattttctcctgtatggcctactatcccaaaccatatgctgaaatattgaaattatttccaacggaggaaaaggttttcactctcatatttcaggcaaaaacgacttactgcggtcattgcggcggattcagccacatacagcagtatcgttctaattatcgctatgttatatgcagagattgtaaaaagactacttcaattttaagggaaacttttctcgcaaaagcccacctcgatctgagaatatgggtttatattatatatgcaacattatatgctcgacatcctacgtcctatcgctggatcatgcaggagttaaagatcaattcctataataccatttggagcgcagcgcacaaaataaaagccgtgtcacaacggaaagataaatatgacgatgatgtaaaaattctacgtgcatttaagccttttttagcacaagtctaaaatagcactcaaaaaggataagttaataaagtattttttccaaacccctcaaaaaagcccgaaaatcgggctttttgggcttaattatttttattaagccctgtttttcgtatagagagtgtgcaaacatatcaaacagctatggacgcacacaacaacatatccaatttccccgatgatttccccatcgcgggactcacggtaaagcaatttatcgaactctgcgtgagcctcggcttcggcaaccgccccaactcttatcccaataagccggaatcacctccaccagaaattatgggcatcgatgatgtgattaaacttacaggctattccaaggccacgatctacaagttcacgcatcaacggctcatcccatttcatagacccgcccacggaggacggcacttggtgttcatccgacaggaaatcgaagactggatgaaagagaattcaatccccaccgtcgggcaatactgtaaagaacaattaaaaaaacttaataattaaaaaatttatgaaaacagaatttaaccctttggaagcactggccgacatttctgaagatgaaatgaatgaatttattgaacaacaaagggaggtaaccaagaagcaccggagacagaaaccccgagaatcttttgtgtgtttcatctcattctacgaatctattaaattaatgccggagcggctccatttaagagcattcagagtattgatggattatgcattctatcgggaggaaccgcccacaaagacaccagcacgtattatgcaatctttcgtcagttgacggaagcaggtggacgtgaactcgcaaaaatatgacagaaaagtcgagagtaattgggcgggaaagatgatgacgagaaagcggataatgacgggacttaaaacatcccgtcttatttctcagagcaataaccggactgggaatatacaagaaacaggcaacaagtcaatatgcaatacactgaataacaaaatcataccgacgctcttcggataaaatgataatttcaaacgcaatgaaccaaaactataaactcatattctcaaggacaaacaccgttgttaggattcctgaaggcattgttgggccccaagtttcgctctttgcaaacgtagttagcacaatacctgtcgcaacggtcgatttatggacatttttattaacgacctcctaccaaaatatagtagacgaatatcgaggcactaaagatccggaaacacgcgccaaaattaagaaattcgagataccgtgcgtaaccgttgccggtgtattcgacacacgcgccaaaaagaggcttcaacatcttcatagtggctatatctgcattgacattgatgggaaacagaaccctcgtgtaaaagggcgatggaacttggtcaaaaatatgttggaagacagaatcagcagtttatgctatgctgggctatctgtcggaggcgatggtttatgctgcatctttcgaatagcttatcctgaacgccataaagctcacttttatgctctcgtggacgaaatacaaggacggacgccactaatcgtcgatgaaagtggcagcgatgtcgtaaggctgcgtgtggccagctatgaccctcaaccctatttcaaccctgatgctcctccgtacttgtattacaagccgaacaaatacagtgcgccgcgcagggtgaagaaggctcgaaaagccgtaatggatgtagccacaaaacaacggacatattctctgataataataattcagaaaaaacagattgatatcactgttggacgtgcagtctggaaatccatcggacaagctctcgccagtgaatttgggcccgaagaaggattacgacttttccacttggtaagtaaatggcatcccgattacgatcctactgaatgcgatgaaatgtttgactggtgtatcaaaaatcacaatgatgtggatatagccactttcttttatcattgtcaaaggtataatataactttcaaataaccccatcgtgccgcgagtgaagccggagccttaacaacagactccggctttttttatgatggcctcggaacgtagagaatcccgaagccgattccgccgaaatttatacggcgataccccacttcgagtgttgttcgagtgaaaataatttctaactttgtcactgtcgacgtccgcaaggactgcggcggacatactggaagtgtttttcgcacgcctttcaaagaaaatgtggcaattttcaatagcaaagggcaacgaacagcactcattcttgtttagatcatggcagggcgcattctgtgtgcccgttaccccatatctatcaagtgtggggtatcgcgtcgtttattttgctatgggttcgccacaaccttctttgagatgaacgaaactgactccacactttctttttactactaattactactaacccagccatacaggagtcgaatggcaacataaaacttgttgctatgacctattacaaggacaccttacaggcattcttggataatcacatccacgaaatcctcggaaagctcggccgcgagttcgattccaacgattttattacagcattcaggctgttattccccaatgaatatgcaactgcgctgcaaagaagcagctcttatcgagccatccatacttggattgcccgatggtatctttccgcccgaaccgatttactccagaaaagcgatattcagtcgagagaaagcgtcaatcggaatccaacaaaaaatcacacatggattaaactttaacacttcaacaatatgggcagaaaattcataatagaggaggtcgaggaagaatctaagttcggttgcggcagtatcgtagcgacgataattattgctcttgtcatcggactgtgcggcggattcaaatcatgcaaggaagacaaaaaaccgaaagccgtcgagagccggacggaacaaccgcaacgtttggatgaagtaaaggtacaatcaccgccctatgtcccgaaaagttcgcatccgagtgtttccacaccgactccaaccaccgcatccaagccgcagaaagaagcctcggccgaatccataacggagataattttcgatgatgatattgagacggaaaagccgggtatttcgactacaccgaccgagccagataatagcatcgtcacggaaactgattccgaaacgcccgctttgacgaaaaaggaacgccgcaaggccgaacgtcaggccaaacgagaggcccgacgtagagagaaagcgcagaaaaacaattaaagtcttaaaatcatgaaacggatcatcggattgctgttcattgtattgtctctctcttgttgcagtaaaagcgaaacagacaaggaggaaggaggaaactacgttttatcaattgctccccaaaatctaaaatttccggcgaatgacgattctcaaaatgtgattgtcgcaagtaacggtcaatggtcgctatccggaggcgacagttggtgcaccccctctatcacgtcaggcgggaacggagccaacgtaactttttccgttgagaaaaacatggaattacaaccaagaaatacgtcgtttacattcacgcttggcaatgaaaaggcgacccttcatgtaacacaagaagccgcgccaaattccaatatttcattgaatccgggatcggcgactgtttcaagcaattcaaatacgcaaagcgtcatcgtgacttgcaacggaacatgggccttatccggagaaaccgtatcatggtgtcgcccctctaaaaccacaggacaaaacaacgatgtcgttacattcaacatcgacgaaaacaacttatcggacgatcggaatgcgacctacacgtttacttgtgcaacggagtccgcaaaattcgttcttactcaaaaaggcaaagatgcactgaccgttacaaaatccaaatttgaagtctccgcacaaggagaacaaatcgcagtcgaggttaatgcaaacatctcgttcgactatgaaatcgcacaagcggacaaatcttgggtgtcttatgtcggatcgcgtgcaatgacaacatcgcgccttttgttttcaatatctcccaatgaagagaccgcaacaagggaaggtacgattacgatcacaagcgaaatcggaaaagaaaccataaaaatttaccaattcggagcttctccggcacttgttcttactcaaaaagagtatatcgttccaagtgacggacagacaattaaagtcgaattgaacagcaatgtcgattacgaagtcgctatgccttcagtcgattggattacggaatccccgacacgggccatatcgacccatacgcattattatacgatagcctccaataccacttgcgataaccgatctaccgaaattcacttctataataaggagaataatatcgacgaaatcgttgaaattactcaattacaaaaagatgcgcttataattggtaagacggattatcaagttccccaagaaggaggaacagtcgatgttacactgcaacataatattgattttgaaattaaaattaatgaaaccgatacgtggataactcaaatagaaactcgtgcactacaagaaaatcaacttcgatttaatatctctgaaaatacgacaggcgccgaacgcatcggcaaaatcatgatagccaatacccaacagaatatttcacagactatcactattactcaatccgccataccggtcttagacatacccgatccaaatttcaaagcttatttggttgcaaattatgaccaaaatagcgacaatgaaatatcccgattcgaaatcgagaagctgaaatctttaatcgtatcaagtctgggcatcgcgtcgctggaaggaattgagcattttacaaacttagaaggtctagcatgtgacaacaactctttgacagagttggatttgagtaaaaacacacaactaaccgaactgacatgtggttacaataaaatttcaaaactcatattacctcccaacgctgaaaaaatgacttggcttagttgtggtgacaataaactaactggcaaacttgactgctccaattgggtcaaccttaccaatttgaattgtcataccaataattttaccgccctcgacctgaccggatgttcggaactaatcggcctgtcttgtggcaacaacaatctcacatcacttaatgttcaagattgttctaacttaaccactttgcaatgtgacggcaacaaactctcttctttggacataagcatgtgcccctatatggtcactttgacttgcggaaacaacaaccttgaaactctcgatctaagtaattgccataacttagatcgtctattctgtcaagacaataaactatcatctttggacataagcatgtgttcgaagctaagtttattatattgccagaacaatatgcttacattactgacattaggcaatgcttcgacgttacgagaccttgattgttcacagaaccaactatcatcgttaatcgcgacaagttgcacaagtttaacccaattaacgtgtgataacaataatatccggattcttgatatttccaactgttataatctcggagacttaatttggcacaataacccattcgaagagatcaatttaggggatgttgcatccattacatttcacaactatgctgcaatctatgatccaactaaaacaacggactacccatatctgagctatgcattgaacaattcgactaaacttaaaattacaagttctcgatattcaaggttaaatgtttcaggcaatcaattggaatcgcttgacatttcccaatctcccaatatccaaaaattatattgcaacaacaataatttaaccacattagatgtaacaaagcatcgacaattagtcgaattaaactgcgaagccaatcacatgacagaattaaatctcgaaacaaacagccttttgcaatatttaaagtgcaattacaatcaactaactgcgctaaaaacgactaataacccggaattacgaacattagaaataaaaagcaatcagatagatgtgttggatttatccaacaaccaatatatcaacactctaagatgccaagagtgtcctaatttaagagagatttggtttcagaaccaaacacaacatgcacttattcctacatgtgccttggatttaagcataacaaaaccctgctacaaggaaaatgatgggacatacgtcttaatgaattattacaatgaagccggtcttgaaggaatcatttattatcttgatgcagacaggaaacatggaaaaattctctcattagacgaagccttgctgccatggtataagtggaatagtagtaataacaaggcttcttatcctgtttccgattggatcaatacaaaaaagcagtcaaataccgcttgggaattaccaacaatagacgatttaacaaccctattttactatcgttttgaggtcaatggctcttcgattggcaacaatggaatgccattaaaatacgcatcgtcagccggtggcacttactggtcttccgaagaggtgaacaataatggttcataccctcggtacattaaatgtttcaagggatacagtgctaccggacaacccatagagagcagttgggaagcaacccattctgttcgagcaatcgcatcattttaatgaaacgatggaaatattatggcaacttctaacagtagaccaagcgcacgcgcgattttggaggaaatcgacatgcgggatttggcggctttgagacaagccgtcgagggtacggaattcgattcgcacgttatcgacgaaattatcgaaacacatttcaatgaccaatatgaccgattacggatgttatacgcttataagcaagactccgaagcgataactcatgaagtcacaaaacgaatcggatcatacttatttaagtatgccgatgaattaagaatcgaacagataatgtctcgtggagagccgactcgaaattcaaacggcaaaacaagtcgcacgagtaaatggagaaaagtatgatattggctcgtatataattccggtcgcggataaagcacatagttataagttgttatccaaatcctttccgagtttttatcccgaccgttcttagttgtcccgacctgccgccacccggcaggtcgctttgttaaatcccgacagaagatactgcggtgcgattacggctcatgtagtcgtgctctcgataaaattcattaaccgcctgcttcaagccagtgtatagggcttaaataagcaagccgcaatgatggtctccagtacatagcggctgaattgacctgcgtattcacagccggaatgtattacccccaaaaacaaaatcacatgaaaaacaaagaagaaatcaggctttacctcgacacccaattcagcccatcggaagacgacatggtgcaaattgtccggaacgatttcgaccgcattttgaatagcgcggcatcttgcgccctaattacggtcgagggtgcaatgcccgtcttggcggaacaactccgcaccgaactggaagccctacacaccggagctaacctcgacgtgattgtaaaagtaaactatcatcccgtttcggaaataagtttcgatgacctatgcagcctcttaaccgtcatccacgaatttaccccgcaagtaaatatcgtctggggctgcggcacggatgcaaaactggcgaaaaccgactatttgattctattgctgatcgggacatcggcagagtaaatttgcaagacctgccaaaaacatattggcaggtcgctttgttaaattccgatagaagatactgcgacacgattacagctcatatagccatgaacccaataaaattcattatccgcctgtttggagcgactgtataggcccaaatacagcaactaccaaacaaccaaatacttaactacttagattgaaattttcggatagcggccatttatgtaccacttgtgtaccaccgccgcttttcagactatataccagaaaagaaaaatccttgatattcgattgaatatcaaggattttccatcagtcggggtgacaagattcgaacttgcgaccacgcgccccccagacgcgtactctaaccgggctgagctacaccccgtagcgtttcggagtgcaaatatagtgtatttttcacaaatcgtcacatttctgcaagatttttttctaattttgtcctcaatgaaacgattcgcacttctcatagcggtattcttcgggttcctggccagcggctgcggaggctccgcaacgcgctctgccgcagatttcacaatcgaggtctacacacccgaatatgcttcgggattcgacatccgcggccgggacaaggatgccgcgaccctggtcaccgtccgtaacccctggcagggggccggcaacgtcgagcagcacctgctcatcctgcgcgagggggccaaagccccggcgggcctcgacgcccaggtcgtgaaagcccccgtgcggcacgtcgtctgcatgtcttcgagccacgtggccatgttcgacgccctgggcgaggtgcggcgcatctccggtgtttcgggcatcgactacatcagcaacacctacgtcaacgaacaccgctactgcggcgaagtgcgcgacgtgggatacgacaccaacctcaacttcgaactgctggcctccatgcggcccgacctcgtcctgctctacggcgtgacgggcgaaaacaccgtcgtcacgggcaagctccgcgaactgggcattccttatatatatgtcggggactatatggaagagtcgcccctcggcaaggccgaatggctgatggtggccgccgaactgtgcaacgtccgtgacaagggcgccgagaccttccgcggaatcgccgcacgctacaacgcgctcaagacccgaatcgccggggcagcccggagcccccgcccgaaagtgatgctcaacacgccctaccgcgacacctggttcatgccctcgtcgcggagtttcatggtgcgcctgatcgaagacgccggcggcgaatacgtctacacgaaaaacgcctcggacacctcggtcgccgtcgacctcgaagaggcctacctgctggcctcggccgccgacacgtggatcaacgtcggcccgtgcaataccctggccgaactcacggcccagaaccccaagttcgcggacgtccctgccgttcgcaaccggcaggtcttcaacaacaaccgccgccagacccccgccggaggctccgatttctgggagtcgggcgtcatacgccccgacctggtgctgcacgacctgtgcgccgtattcaatccccaagccgccgacaccgcggaactctactattataaacggctcgaataatgaagcggctcgcaatactcctctcggccctgctctggctgcaaacggcggcctcgggcgcggaaccgtggttccgctacttctcggacgggcgcgccgtcatcaaacggggttcgctctacggcttcgccgaccgcaacggcaccgaagccatcccctgccggtataccaaggcctatcctttcaacgacggcatcgccatggtgcggcagggctatgaagtcttcgccatcgacaccctgaagaaatcccccaggtggacgtccggcacggccaacggcgtacccgtcgacgtacgttacgaaacctccttcaaattccagtaccgctaaatggcccccggcaaaaccgcattcctcttcacggcacttgcgctgctgaccgtggcgctcttcacggccgacctcctggtcggctcggtcgccgtggcgctcgccgacatctgggcggcgctcacaggcggcgactgcaaccccgccatacgggacatcatcctgcggatacggctgctcaaagccatcacggcactcctggccggcgcggcgctcgccgccagcggcctgcagatgcagacccttttccgcaacccgctggccgggccctatgtgctgggcatcagctcgggcgccgggctgggcgtagcgctgttcctgctgggggctcccctgctgggcgtctcggcgcactcgttcgtgcagtcgctcggcatcgccggcgcggcatggctcggcgcggcactcgtgctgctggtcgtgatggcggtcagccgccgcatcaaggacatcatggtcatcctcatcctgggcatgatgttcggctcgggcatcagctccgtagtcgagatactccaatacctgtcgagcgaggcggcgctcaaatcgttcgtcatctggacgatggggtcgctgggcgacgtcacgggcggcaacctcgccctgatgctccccgtcgtcgccgcggggctcgtgctcagcgtcgccgccatcaagccgctcaacctgctgctgctgggcgaaaactatgcccgcacgatggggctcaacgtgcaacgcacccgtacgctgctgttcctctccaccgtactgctggccggtaccgtcaccgccttctgtggccccgtgggcttcatcgggctggccgtcccgcacctggcacgcatgctcttcgccagcgccgaccaccgcgtcctcatgccgggatcgatgctcgcgggcgccgccctgctgctggtctgcgacctcatttcgaaaaccctggcgctgccgatcaacaccgtcacggccctgatgggcatcccggtggtcatcatcgtcgtcgtccgcaaccgcaacctcttctaagatggcagccggcaccctccatcccccccgactgcacacaggccccgcacccggggcaccgggcatctcgctgcacggcctcaccctcgcctacggccgccgcgtcctgctgcgcgacgccgacgccgtgctcccgcaagggtcgatcacggcgctcataggccgcaacgggacgggcaaaagcaccctgctgcgggcgatcgccggactgggcaccgccgccggcgagatccggctctgcggcaagcccctcgccgcactcaccgcgctgcaacgcgcctccaccgtcagcttcgtcaccaccgacaagatacgcatcgccaacttagcctgcgaggatgtcgtcgccctgggccgcgcgccctacaccaactggatcgggcgcatgcagcaggccgaccgcgatatcgtggcacgctcgctctcgctggtcggcatgtcgtcgttcgcccgcaagaccatggatcgcatgtccgacggcgaatgccagcgcatcctgatcgcacgcgctctggcgcaggacacccccgtgatcctactcgacgagcctacggccttcctcgaccttccgaaccgctacgaactggcgtcgctgctgcgccgcctggcacacgaagagggcaaatgcatcttcttctcgacgcacgacctcgacgtggcgctcgggctctgcgacgccacagcgctcatcgacacccccgcactgcactgcatgtcggcggccgacatggcggcgagcggccatatcgaacggcttttcgccggcgcaggcatctcgttcgaccctgcaacgctgaccatccggctcgcaaaaaagtagaatatccaatatttttccgccaattttttgttaaactcacttttttatttacctttgcaccgctaaagtcaccctttcgggggtatgcgatagtggtattggcccattcgtctatcggttaggacgcaagattttcattcttgaaagaggagttcgactctcctatgggctacgaacgaggagggctgcggagcggcacgaaaccggggggggctcccgaccggcaaccgggacagcaaaaacggcaggcctctacgggtgaatacttttcaaggagcgggcttcaggcctatccgcacacagctacggctggaaccgatttagcaactgaaaaagtaaaaaataaaaaacacagaattatggcaaaccataagtcatcgaaaaaacgcattcgccagaccacggccaaacgtgcccacaaccgtctgtaccacaagacagcacgtaatgccgtaaaagcactgcgcaacacctcggagaagagtgccgccgaagccctgcttcccaaggtaaccaccatgctggacaagctcgccaagcacaatatcgtgcacaagaacaaggccgcaaacctgaagagcgccctccagctgcacgtgaacgcactctaaaccccggccggatgcaaagccagaagctgcccctgtggcagcttttttattcccctgcgcaaaacaacggcatcagccaccgtcccgccagcccaagtacagcgcacacatacgctccggcataccgcctgtacgacaaagccgtccgcatcgctgcggacggcttccgtttttctccgccggggcatccccgcgcggcactacccttcccggggatcccctgatcctccggcagcctcactccttcccggaaaacccggatccgtccccggaatcactccttttctggaaagccttgggccttgaggcggatatccgcgccgtcgggcgtcaccaggtatacccccgtcgactcgggcgttatgtggccgatgacatcgacgcaccccatgcgcatcacctgctcctgcaacgccagcggcaccgtgaacagcaattcgtggtcttcaccgccgttgagcgccgccacgaccgggtcggcattcatctcttcggccaaggcataggtctgccttgcgataggaatccggtcgaggtatatgcgggccccgcatttcgacgccttgcaaatctgcatcaggtcgctggaaagcccgtccgaaagatcgatcatcgacgtcggtacgatgccctcctcggccaatgcctccacgatgtcctttcgcagacgcggcttgagatacttctccagcaggtattcgtaccctgcgaacttcggttcggggtctttcacgtcggcaagcacccgcttctcacgctccagcagccgcagccccatgtacgccgcaccgaggttccccgaaatacagatcaggtcgttctgctgtgcgccgccgcgcgacacgaccttctccttcggggcatgtcccagcgccgtgaggcccagcaccagtccggtcatcgaagccttcgtatcgccccccacgaggtcgatcccctgctccctgcatgcgaaggcaattccctcgtacagctcctgcaacgcctccaccgacagcttggacgacacaccgagcgacaccatcagttgcgagggcagtgcgttcatcgccaggatatcgcttgcggccaccgtcacggccttgtatcccaggtgccggagggggaaataggtcaggtcgaaatctatgccctccagcagtgcgtccgtcgaacagagcaccgcctcgcccgacggcggcatgacgaccgccgcatcgtcgcccgcagcgcggagcgtcgaagcgtcggccgggtcgaaccctctggtcaacaggtctatcaggccgaattcacccagctcggcgatttcggtgcgtcgtttcttttccatattataaatttttttacaaaattacggattctttactctttcccaaaaatttagcgtatttttgtccggtaaatcccaaattcggcttctacatatgataaacatcgtcttattcggtgcgccgggctgcggcaaaggcacgcaggcacaacggctcaaagcacactacggcatcgagcatgtctcgacgggcgaggttatccgcgacgagatccgccgcggcacggaactcggacgcagcatggaatcctacatcaaggcaggcaaactggcccccgacgaaatcgtcatcggcatggtcgccaactatgtctcagagcacaagcacgtcaagggctgcatcttcgacggcttcccccgcaccacggtacaggccgaggagttcgacaagctcctcgcccggcacgggctgaaggtcgacatcatggtcgacatccacgtccccgaagaggaactcgtccagcgcatcctgctccgcggcaaggattcgggacgcgccgacgacgcctccgaggaggtgatccgcggccgcctcgacgtctaccgccagcagaccgccgtcgtctcggactactatgccgcccagggcaaatacgcctcggtcaacggcacgggttcgatggaagaggtcttctcgcgcatcaccgacgtgatcgaccagttgcaataggccgccgccggccgaccgccgaaacccggggcaaatcctgttccgggctccatttccatcccctttcccgcagcagggcgagggccggcaccgcccgtttccggctccggaggcaaacacgccccggcactttccccgtctttgcggccgctgtccgtacacccgggactgaccccggcggcggaatcggctcaaagatacggcgataaaaccgaaaaaaaggtgcgcggctttgctattttacaaataatccgtatatttgcaaccccattgagggacaattaactaattttaaaacgtattatgaacaattacgaaaccgttttcattgtcacgccggttctgtctgatgcacaggtgcaggaggtcgctgacaaattccagggtgtcatcaccgagaacggcggtcagattgtgaacaaggagtcgtggggccttcgcaagctcgcctaccctattcagaagaagaccaccggtttttacttcctggtcgagttcacgggcgaaggctcgctcataggcacgctcgaaacgcagtaccgccgcgacgagcgcatcatccgtttccttactttcaagcaggacaagttcgccgtggaatactcggagaagcgtcgtgcaaaactttctaacaaacaggaggagtaaaccatggcacaggagaacaaggcacagtctgaaatccgttacctcaacccggtatcggtcgacgtcaagaaaaagaaatactgccgcttcaagaagctcggcatcaaatacgtggattacaaggacggggagttcctcaagaaattccttaacgagcagggtaagatccttccccgccgcctgacgggtacttcgcagaagttccagaagaaggtggcccaggccgtgaagcgtgcgcgccacctggccatcctgcccttcgtaaccgattgcatgaaataattaaaggaggaagagacaatggaagttattctgatcaaagatatggaaaacctgggctacgccaacgacatcgtgaccgtaaagcccggttatgcgaacaactacctgattccccagggttacgcaaaggctgccaccgcatccgccaagaaggtgctcgccgagaacctccgccagcgcgcccacaaggacgccaagatccttgccgacgcacaggcactcgccgagaccatcgccaacctgccgctcacgctggccgtgaaggccgaggagggcaagctcttcggtacggttaccgccaccgacctggccgaggcactggctgccaaaggcatcgaactcgaccgcaagctgatcgccgtagagggcatcaagaccgtcggcgagtacgaagcaaccgccaaactccacaaggaggtcaaggccgtcatcaaattctcggttaccgccgcagaataatccgcaggaggctgcaagggttccgccctgcaactcaccgcaccataaaaaaggagagccaaaggttctcctttttgcattcaggcaatactccgtcccgatattcgtttctcccgaattcggggacgggcacgccgcgtgtcctgccaacccgcattccggactgttcgaacccgccggattccccgcccgggtcagtgcggcggcgcggccgacggatcgggatggcggggcggcacggagtaggaacgcagcacgagccccacgccgacgaagatcaccagcgcgaagaccaccgtatcggcatgcagcttgtccagccccatcccgaccgaaatggcgatcgccagcacgggctgcaggtaggtatagatgctcgacaccgtggccggcacactcttgagcgcataattcagcatcaggttcggcaggtaggtcggcaccgtcagcacgaagagcgtcgggaaaagcgcatggctggctatggcggcatagtcggtatggacgatctccttcaggccgaacggaagcgcaatgacggccgccacgcagtatacccagcgcagcacggtggtgatgcggtacctggcaaccagggctttgaaccagaccatgtacagcgccgtggcgcaggcgcaaagcatgatcatcacgttgccccagacatgcgaatgctgatgcgacgacgaggcgcccgtcagcaccaccgccacggcgcccgccatgccgagcagcagccccgcgaccttgagctttgtgaagcgatccatgcccagcaatacggagagcagcagcaccagcagcgggacgatggtgtcgatgatcgatccgtcgatgggcgaagtcatcgaaagcccgtacatgatgaataccttgcgcagcacgccgatcagcagcgcggcgccgatcagcttgcggatgtcggcgcgcgcgacccgttcggccttctgccacagcagcggcacgagcgaaaaaagcgccgtgacgaccagcgatcccgccaccatggccatcgggtggacatagtgcggcaatacgatgttgtaaaacgggtagtccatggcccatacgatattgcatatcagcagggcgatgtggggcttgaatctgctcattccgtctcggagtttaccctgcgggaaacaaaaacagtgcctttccgttcggaagggcactgccgttatagcggtggcggccatttctcaccacccgtcgcgcggcacctcgaacgaaccgggcgacgctcctgacagctctttcccccggtaatagactttccatgcgtctttcccgtatccttccccgagttcttcgaacgtctgcgccgaggcgcccttcacctccccgcccctgtaaaataccttccaggcatcctttccgtatccgttcccgaggctctcgaaggtcatcgccgacgccccgtccaccttccggccgcggtaatacaccgtccagctgtccttcgagtaaccgccgcccagcctttcgcccgacaacgcgctcccgtcataccgctccccgtagtggtaggtatgccagttgtctttccccatcccgttcccgaggctctcgaacgacgaggccgacgccccgtccaccttccggccgcggtagaacaccgtccagtcgtccttaccgtacccgccgccgagatccgtgaacgacgatgccgaagcgcccttcaccttcctgccctcgtaatacaccgtccagttatccttcgagtaagccccgtgccgcctctcccggttgagcagcgacgcccgaacctcctcgggggcaggatttcccaggcagtgcggcgggacacccgcaaacaccgaaaacagcgaaaacagggataatatcagctttttcataaggcgcggtatccgttcatgattatatttagttcctgattatattttacgattcggcccgaaatatacggagttatcgccacgcgtccaagaaatcggcggcaaactttcccggagtggggcgaaaagccctgtcctccgcctcaacccgccgcagtccttcaccgctcccggcctatccttcgcccaggtctacccgcccccgccccgcaatccttttcccaatcgcgaccaactgcccctccttcctccgcgccctcaaacgcgcccacaaaaaaagaaccgcaggcgtaacgcctgcggttctttcgatatatcggcggacggctgcaccgtccctccgtacggggattactcctcggccttctcttccttggcagccttcttggcgttcttcgcctcggcagcctccatggcgctcttcagcgcggccagacctgcgatgtcgcccagcgtcgtcttctcgaccgaagcgttgatcttcttcacggtcgacttcgtagcatcggcggcggcacgcttctcagccttctcggctgccacttcggcacgcttggcctcctcgtacgtacgcaggtgcgaaagggtgatacgcttggtagccttcgagaactcgagcaccttgaagtcgagcttgtcgcccaccttcggcgtcgtgccgtcctctttggtgagctggcgtgcggggcagaagccctccacgttctcgcccagtgcgacgactgcgcccttgtcggtcatctcggtgatcgtaccctcgtggatgctgtctaccgagaactggttctcgaactcgttccaggggttctcctcgagctgcttgtggcccagcgacagacggcggttctccttgtcgatctcgagcaccacgacgtcgatatcagcgcccaccgacgtgaattcgccggggtgctttaccttcttcgtccagctcaggtcggaaatgtggatcaggccgtcgataccctcctcgatctcgacgaagataccgaagttggtaaagttgcgcaccttggccgtgcacttcgtgccgacgggatacttggtttcgatattttcccagggatcgggcgtgagctgcttgatgcccagcgacatcttgcgctcctcgcggtcgagcgtcaggatgacggcctcgacttcgtcgccgaccttcatgaactcctgcgccgaacgcaggtgctggctccacgacatctccgagacgtggatcagaccctcgacgccgggggcgatctccacgaatgcgccgtagtcggccatcacgaccacgcggcccttgaccttgtcgccgaccttgaggttctggtcgagcgcctcccacggatgcggggtgagctgcttcaggcccaatgcgatacgcttcttggcgtcgtcgaaatcgaggataacgacctggatcttctggtcgagcgccacgatctcttcggggtggttcacgcggccccacgagaggtcggtgatatggatcaggccgtccacaccgcccaggtcgacgaatacgccgtacgaggtgatgttcttgacggtaccctcgaggatctggcccttctcgagtttcgacatgataacctgcttctgcgcttcgagttcggcctcgatgagcgccttgtgcgaaacgaccacgttgcggaactcctggttgattttcaccaccttgaactccatggtcttgtccacgtatacgtcgtagtcgcggatgggcttcacgtcgatctgcgaaccgggcaggaacgcctcgatgccgaatacgtcgacgatcataccgcccttggtgcggcacttgatgtaacccttgatgatttcgtccttttcgagggcctcgttcacacgatcccacgatttgagctgacgtgccttcttgtgcgaaagaaccaactgtccgcccttgtcctcggccgactcgacatagacctcgatcttgtcgccgaccttcaggtcggggttgtagcggaactcggaaacgggaatgacaccctcgctcttgtagccgatgttcacgagaacctcgcgcttggtaatgcccgtaacggtgccttccacgacctcgccgacattgacgttcgacagcgtcttgtcgtaagcctctgcgatctcctccttgggatggtcatagacccccaggtcgttctcatacgcgttccagtcgaaattctcgttcgtgactacatttttcgtttcttccatgatggaaattctttttgcgatacaatcgctcgttaaatgattaataattaaacccgtagcccccacagcgcgccttacgcgcatacgtgagggctacaaaggtaacggttttttgcgaatctgcaaaaaatcaggcggttatttgcgttccgcggacgaggcccggcggcttccgcggcgcctatttgcgaaccacccgctgccgcggcgtgttgtcgatcttcagcgggctgtcgtccctgagcccttcgagcaggatgtcggccaccttctcgtcggtgatttccccgccggtatattccatatccttgtaattccggtaaatgtagtcgctcacggcgaccttgtacttccgcccctcgcgcagcttcgggaactgcacgtcgagggcgttgtccgccgcatcggtgacgatcacatagggcatggtcgaaatcaggtcgatgcggtgcgcctccttggcgttcaccgggtcgttgtacttcgacacgatcatgcggcgcatctgggcgggcgtcatctccatccgggccaccagcgtcccgaacggctccagtccgtataccttcgccgcgctcaccccgcccgcggggatcgaatcgaggcgcacgccgccgatgtggtagaaaccgacgtcggcatcggcctcgtcggcgaccgccgcggccatccagttggcaagtccccacttgtcggcggcattgccaaaacgcccgacgggtttgttcagctccgggtcggcatagtaagcctcgacctgtttctggtagaggatatccggctcgtaatcggcgagcgggacgatccggtaatcgacccctgcgaccttattccccttcatccgtacggtcgtcacgccgatgttccgcaggtctttgcccgtctgcgtcagcagcgtgccgccgatgagcgtatcgacctcttcgtgcgtatgcccgccgatcaccacgtcgtactgcgactgccccttggcgagcagttccgcatcgcggtcgtcgcccatgtgcgacacgagtaccagcacgtcgcactcgggccgcagctccgcggcatatttcagggccatcgcctgcgggtcgggaaactccagccccgcgaaactcgattcattgcccgccggatgccccgggccctcgtagttggtcaccacgccgacaaacccgatccggatcccgtcccggtcgacgatcgtgtagggcggcaactgcgggaaggtgcaggtgtcgctcaccacgttggcgcagaccacctcgaagtccatgctgtcgatcatccgccccaggaacgcctgctcgtggtcgaattcatggttgcccagcgtcgccacgtcataccccagttcgttcatcagggcgatcatcggcataccgggcgtcggcgccatgtccacataggcattccccgtccagcggtcgccggcatcgaccagcaccaccagccgggccgtatcgcggcacgcctcgacggccgacgccagccgcgggaagttctgtatctttgcgtgcatgtcgttcgtcgacagcaatacgagcgtcctttcgcggggggcgcaggccgcggcgagcgccgcaacggcgaccagccccatcctcagcattcctttcataacacaggttttagtttgtcaaagttataaattattcatatctttacatggtttcaatcctgaaaatctatgacgaatatcatcgaaatcatatgcgaaaacctcggcggcaaggtcgaggtgccgatgggcaccccgctttccgaggtcgcaaagcgggtcgcaccgggcccctacccgttcctggccgccctggtcaacaaccgcatcaaggagttgtattacaaaatatataccccggtgagcgtccgcttcgtggacatcacctccttctccggcatccgcgtctaccagcggacgtcgtggttcatcctgcaaaaggccgtacgcgacctctttccgggcaagacgctccacatccgccattcgatggggcagaacggcttttactgcgaggtcgaaggcatcgacgagttctcacacgaacaggccgcggcactcgaagggcgcatgcgctacctggtggcgcaagacctgccgatcagccgcatgaagatcctcacgagcgaagtccgcgcccgctatgcggcccaggggctcaccgacaagatcgccctgctggacacccgcccgcggctttacagcgacctctatacgctcggcgacaccgacggttatttctacggcgcgctggcgccctcgacagggttcgtcgacctgttcggcatcgaaccctactacaacgggttctacctcgccctgccgctgcgcacggcgcccgaccggctcaacaccaacgtcgaacaggaaaagatgttcggcatcttccaggaataccagtcctgggtgcggatcatgggcgtgcccaccgtgggcgccgtcaactccaaggtgctcgcgggcgacgcgggcggcatgatcaaactggccgaagcgttccacgaacgcaagttcgcatgggtcgccgacacgatctacgacgccaacatctcgtgcggcgtacgcatggtgctgatctcggggccctcgtcgagcggcaagaccacctcggccaaacggctgggcatccagctcggggtactggggctgcagccggtgctgatctcgctcgacgactatttcgtcgaccgcgaaaagaccccgcgcgacgccgacggcgattacgactacgaggcactcgaagccatcgacctcgacctgttcaacgaccacctctgccgcctgatgcgcggcgaaagcgtcgacatcccgcgctacgacttcatcacgggtcgccgcacgtggcacaacaacccgctgacgctcaacgagcgttcgatcctgatcgtcgagggcatccacgggctcaacccgcgcctcaccccgagcgtccccgaagcgcagaaattccgcatctacatctcgtgcttcacgtcggtggcgatggacaacctctcgcgcatcgccacgaccgacaaccgcctgctgcgccgcctcacgcgcgactatacgcaacgcggcgccgatgccgtggcgacgctttcgcgctggggctccgtccgccgcggcgaggagaagcacatcttcccctaccaggaaaacgccgacgtcatgctcaactcgtcgctcttctacgaaatctcggtgttgcgcccctatgccgaaaagatcctccgcgaggttcccgacacggtacccgagtacgacgaggcgcggcgcatgctgaagttcctgaaaaacttcacccccatcccgcccgacgagatcccgcccacgtcgatcatccgggagttcatcggcggcagcagtttcaagtactgactccggcaagccccgccggacagacgccctcgcctgccgccccacggtgtccgccgcaactccccgtttcgcggcctgcgggtgccagcgcggccggctacgaccgacggaggcgtatccctgcgccacggggaaaatataaacccggcagacgcttgcggtcttcgtaaaaatagtatttttgcatggagattacgcgccgcccggcgcatccgaccacaataaccaattgatgacaaatatgttcgacaagttttccgaacgccacatcggcgtcagcaacgaaaaagacctcaaagccatgctcgaagtgatcggcgcaaagtcggtcgacgaactgatctcgcaggtcatcccccagtccatccggctcaagaagccgctcgcgctgccggccgaagggatgagcgaatacgaattcgccgcccacatccgctcgctggccgaccgcaaccgctgcctcagatcgttcatcggcatgggctactacccctgcgccgtcccggccgccatcgtgcgcaacgtcttcgagaaccccgcctggtacacctcctacacgccctaccaggccgagatctcgcagggccgcctcgaggcgctgctgaacttccagaccgccgtgatctcgctcacgggcatggagatcggcaactgctcgctcctggacgagggcacggccgccgccgaagccatgctgatgatgttcgcgctgcgctcgcgcgaagcggtcagggaaggtcgcaaccagctcttcgtcgaccgcaacatcttcccgcagacgctcgacgtgctgctcacgcgcagcgaaccgttcggcatcgaactgatcgtcgacgaatacgacgaatacagcttcacgggcaaggagttcggcgccatcgtccagtacccggccgccaacggcgccgtgcgcgactatacggacttcacggccgcggcacatgccaagggcgtgctggtcacggctgccgccgacctgctttcgctggcgctgctcaaatcccccggcgagtggggtgccgacatcgccgtcggctcgacgcaacgcctgggcaccccgatgggcttcggcggccccggcgcaggctacatggccacgcgcgaggcctacaagcgcaacatgcccggccgcatcatcggcgtctcggtcgaccgcctcggcaacaaggcgctgcgcatggcgctccagatgcgcgaacagcatatcaagcgcgaacgcgccacgtcgaacatctgcaccgcctcggcgctgatggcctcgatggcaggcttctactgcgtctacaacggccccgaggggctgaaacgcgccgccgacacggcccacctggccgccgcaacggtcgccgacgcactccaggcgatggattacaaactcgccgccgcagacttcttcgacacgctcgaagtctcggccgaagccgccgtcgtgcagtcgctggcactcgaaagcggcatcaacttctactaccccaccgaaggctccgtgcgcatgtcgttcgacgaggtgaccacccccgaagaggtcgccgaggtaatacgcatcttcgccgccgccaaaggcaggaaagccaaggccgtaaagcccgtcaccgaaagccacgtgccggccgccctgcgccgccgcacggcctacctctcggaggcggtcttcaacacctaccgctcggaaagcgacctgatgcgctacatcaagaagctcgaactgagggacatctcgctcgccaattcgatgatctctttaggttcgtgcaccatgaagctcaacgccgcggcgctcatgcagccgctctcgctggcgggcttccagatgatgcaccccttcgtcccggccgaccaggccgaaggttacatgcagttaatcacggagttggaaaacgacctggcgacgatcacgggcttcgcggcctgctccctgcaacccaattcgggcgctgcgggcgaatacgccgggctgatggtgatccgcgcctaccaccagagccgcggacagggctaccgcaacgtggtgctgatcccggcctcggcgcacggcaccaaccccgcgtcggccgccatggccggcatgaagatcgtcacggtagcctgtgacgacaagggcaacatcgatgtcgaagacctcaaggccaaggccggggaatacagttcggagctgtgcgggctgatggtcacctacccctcgacgcacggcgtgttcgagagccgcatccgcgagatcgtggacgccgtgcacgacgcaggcggacaggtctacatggacggcgccaacatgaacgcacaggtggggctgaccaaccccggctacatcggcgccgacgtctgccacctcaacctgcacaagaccttcgccatgccccacggcggcggcggcccgggcgtaggcccgatctgcgtcgccgagcacctcagggcattcctcccctcgcatccggttatgccgacgggcggcgacgagggcatcacggccgtggcgtcggccccctggggctccgccatgctgctgcccataacctatggttatatcaagatgctgggtgaaaacgggctgcgccgcgccaccgaaatggcgatcgtcaacgccaactacatgtcctcggcgctggcgccggaataccgcacctattattcgggcgagaccggccgcgtgggacacgagatgatcctcgacctgacctctttcaagaaggactacggcgtcgactgcggcgacatcgcccaccgcctgatggactacgggttccatgccccgacgctctcgttccccgtgcacgagacgctgatggtcgaaccgaccgaatcggaacccaaggccgagatggatcgcttcatcgaagcgctggtgagcatcaagcgcgagtgcgaagccgccgcgggacaggccgacaacgtggtcgccaacgcgccgcacaccgccgccgagatcgccggcgaatggacgcatccctacacccgcgccgaggcggcattcccgctcgcatgggtgcgcgaagcgaagttcttcccctacgtgaccaagatcgacaacggctacggcgaccgcaacctctgctgccgcaactgcgaataggctctcccgaaccggcaactacgtaccaaaaacgcgggcacgcacgccggcaccgcaagccatacaataatgatccccggaatccgtttgtattccggggatttttccgacagcccgcatccgcaaaaccggcgatacggaagacggggacgcacaggcttccgccgaggcaccccgcgaaaaacagccctgccggcaccgtaagcatcgcggcacgtatccggccccggcatttcacccgggcagacccgacgaaacgggccgaaagcaacagaagcggaaaataattttttttttgcacgattttagcataatagggagataagcttccataaaaccagataaattccgcagtaattgcaaatccggaacttaatttctatctttgccaatcaattacatgcaataaatcctaatcagattacaatgaaagtagaacagaacaaaatggtcggcgtggactacaagctcactgtcgacggacaaatcgcagaccagtcgcgcccgggacagccgctcgaattcatcttcgggacaggcatgctgcttcccaaattcgaggaggcaatcctgggcaaggagatcggcgaggccgtctcgttcaccctcgagcccaaggacggctacggcgaactgatcgccgatgccgtggtagacctgccgaaaaatatattcatggtcgacggcaaactggccgaagacatcctcttcgtgggttcgcaggtgccgatgagcgacaaccagggcaaccgcatgatgggtatcgtcaaggaggtcggcgacgaaaccgtgaagatggacttcaaccacccgatggcgggcaagacgctcaatttcgacgtcgaggtcgtatcagtgcgcgacgtaacgcccgaagacttgcagggcggctgttcatgcggcgactgcggggatgactgcggcagcgggtgcgaccatggggacggccactgcgactgccactgacgaacacgaagcgggactggaaagccccgcttttttaaacccggataccgtattactgtattatgtggccctggcccaacttgccacggtggccgacagcggtacttttcacgacctgccgggactggaggtgaaagacgcggattccacaggcgccgcaggcagcagggaaccttcgcccaggccgggaggcggctccgctttcgccgccccaccctgcaaaccggaatcttcggttccaaccccggcaacaagacaaccaataaaccgtgttcacgctgcgacaatacctcacgacactggccgacacccacggattgacgaaaaccctgggcggcatggaggtatgccgtgacagccggggccgcatgtgctacaccgtaggcaacagcgccatcgtcttccgtgtccgccacgaagggcatatccgctcgctgcggtgctacatgcatccgccgcgccacctggcggagatttacggcgaacggctgctgccgcaggagctgtacctctacgactcgccccggagcggggtttgggtcgacgtcgtactgggcgactggatcgaaggcgcgacgctccacgaagcagtcgcagaagcggccgcggcagaagacacagcacggctgcggcaactggccgcggcgttcgaccgcctggccgcaaggcttacgtcggacgactgggcgcacggagacctcaagcccgaaaatatcgtcgtggatccctcggggaggctgcacctgatcgacctcgatgccatgtacctgcccgcattcgccggggaggcgagccccgaactgggtaccgcggccttccaacacccggcacggacgatccgcgacttcaatgcctcgctcgacgactaccccgcggcgctgatctcgacggcccttcatgcgctggcgctcgaccccaccttgtacgtacgctaccccgatgccgacgggctgctcttctccccgcagcagatccgcaccgacgaggcgctccgcgaggccatcgcgcttttcgaatgcgaagggctggccgtgcagtaccgcatcgcacggttgctgtatgcacccacgccccgtttgttcgggctgccggagttgctggcatgggccgcacgcactggcgggcccccgtgcggcgggagagaaggcgaagagacaaccgggaatacgggcggggacaaaagcggggacacggacggcggcgcagagaggcatccagccggaaatacagggtgcggcgcggacaagcgcacaggcggaggcaaaagcggcggagagttgtttgcgggcaaagacggaggcgtacggaacgacggcggcgcagtttcgccggagctgttcgtcgggaacggcctgtggggttacaggacaccggagcggatcgtcataccgccgctctacgacagcgggttcgactttaccgaagggcttgcagccgtcagggtgggccaggcttggcactacatcgacaccgaagggcgcacccggatacgatgtgcggggtacgaagccgtaaaacccttccgcaacggccgtgcgaaagtcatccgcgacggccgcaggctggaaatcgaccgcgcagggcgcgagtttgaaattttgccgtaattcgttatatttgcatctgctaaatacgattgtgatgccccaattcagaaatatgacaccggcggaaatcgccgcggtcgagtcgctcggctcctcggccgaagcgtggtcgcaggtgtcggtcgccgacgatttcacccccttccagttgctgcaaagccacctggaaggcaaggtcgtggtcggctccggagcacgcatcgtccgctcacgggtgcgcaactaccacatcggcgaaggggcgctcgtcgaaggggtcacggcactcgaatgccgccgcaggagcacgttcgggaacggcgtgggcgtggcgacgatgaacgaatgcggagggcgcacggtgaagatattcgaccgcctctcggcgcaggcagcctacctgatggccgtctaccgtcaccgcccgcagaccatggcggccctggaaaagatggtcgacgactatgccgaaacccgcgcctcgcagacggggagggtcggcaaaggcagccgcatcgtcggcgccaggttcatccgcgaagtccgcatcggcgacaacgtcaccgtagacggctgttcgatactggaaaacggcacggtctgcgacggcgcgcacatcggggtggacgtcaaggcctacgacttcatcgccgcggaaaacgcccggatcgacaacggctcgatcgtcgaacgctgtttcgtgggcgaaagctgccggctggacaaggccttcacggcggccgaatcgctgttcttcgccaattcgcactgcgagaacggcgaggccgcctcgatcttcgcggggccctacaccgtctcgcaccacaagtcgtcgctgctcatcgccggcatgttctcgtttttcaacgcgggcagcggctcgaaccagagcaaccacctgttcaagagcggcgccgtgcaccaggcggtgcacctcaggggctgcaagttcgccagcggcgcctacatcatgtcccctgcgctggaaggggctttcacgatgatcatggggcaccactcgttccaccacgacacgtcggccttcccctactcatacttgatcgaaaaggaggggcgttcggtgctcatgcccggggcgaacctcaccagctacggagccgtgcgcgacatcgagaaatggccggcacgcgaccgccgcaccatacggcgcgacgtcatcaacttcgaagaatacaacccttatatcacctcgggaatgctcagggccgtggatacgctccacgcgatcgcagaggaagaccccgacgccccgacgtacgtccaccagaaggcgatcatccgcgcggcggccctcaaacggggcatcggactctacaaccgcttcatcgtggcggcgctgggcgcgatgctcgaccggggagaatcagcggaacgctacgacggcagcggccgctggctcgacatcgccgggcagtatatcaccaaacgcgaagtcgaggccatcctcgatgccatagaccacggagaactgacctcgcccgaagaggtggacaaccgtttcagggtcttttccgtccactacgacgactacgcccacagctgggccgaaggggtctacgcatcgctgctgggacacatcccgaccgtggcggagatagaagaggccatcgcggcggggcgcaacgcccgcgcgacgatgcgccgtacgaccgacgccgaccgcgaccgcgactgctcgctcgacatggcggtcagctacggcctcgacagcgacgacgaaggggaagtacgcgacgactactactccgtccggggacttaaatagacgcaacatgtatacacagagcatcacacgcaaccaccgcacggcattcatcctggccatagacggctcggggtcgatggccgaaagcatcctcttccggggacgctgcatgaccaaggccgaagcggttgcaaccatcaccaacgacctgctgttcgagcttgtcgaacgggcacgccgcagcgacggcgtacgcgactattacgacatcgccgtggtcggttattcgggtgacgacgaggtacgctcgctgctgcccggaggcgaggatctggtgcctgtcagcgccctggcggcacaggagatgccggtgcacacggaggtgatcgaacaccggcttcccgacggcagcatcgccctgcgggagatccccgcaccggcgtggatcaagcccctgtcggccgggcagacgccgatgtgcgaggcactgcgccgcgtgagggacatagccgccggatggacttcccgcacggccaacgccgaaagtttccctcccgtggtcttcaacatcaccgacggcgaggccacggactgcgacaacgaggagctgcgcacggtctgcgaccagatcaaggcgctgggcaccgtcgacggcaacgtcctgttgatcaatatccatatcgccgccggggataccgaacgtccggtattcttccccgaggcgcacgaagcccggtacaccaaccggtatgcctcgctgctctacgactgttcgagcgaaatgcccgcggtcttcaacgaggccatccgcgaagccaagggcccgggtgcgatcccgcccttccgcggcatgagctacaacgcctcggcggcccagctggtcgccatgctcaacataggttccatcagcgtcaaaaccgaatagagatgatagtgaccctgcaacatttctcccgggcactgctgacgcccgacctgtcgctggcgacgctcgccgacgcccgccccgttacggaacccaacggcataccgcgcctggtgcgcacgacgcgtttcgccgaggcggaagtcgaatggcggggcgagcggtggctcgtcgccatgcccctcaacccgtcggccatgccccggatcgaacgcacggtctcggcgctgcgcaaactcaacaccggctacctggcggaatgccgcatactgccgggcgaaatgcgctggcacgacgccacgggcgcggaacggcacacagacctggtgttgcagcacctgcctgcggggcgggagttcgccgaagcgctgctcgccgaggacaaggcgacgctgcttgcggcgctcgacacattgcaggcggcgctcggggagctggaattcacacacaacaacctcaaggaaacgaacctccgctggcaccggggacggttcatcccgatacgctattacgatgcccgcatcggcacggcggagctcggcacgggtgacagggaggcattcgccgcactccggcacaggatcgccgaggcacccgcgccccgccagacggccaacgacgtcacagcaccctacaacccgctgcgcagcctgaccgggcaccgctggacgagccacgtattcgaagggctggtgtgcgtggaggacgacaacggattcgggttcgtggatacggacaacaacccggtgatcccggcgcagttcgtctgggcgggcgatttccgcgaaggccgcgccgaggtacagacgcagacggggatggggctgatcgaccgccggggctgttacgtcatacctcccgaatacgaaatcgtcgactacgaccccgccgccagcgtggtgcatgtgcgcaacaacgggcactgggcgctgttcgactacctgggacgccgcctcacggagttccggacggaagtcccggagccctgcgggcctgaaatttgcaggtgacaacggcaatattagatatttcgccgttatcggcgccttccggctgcattggcaaacccggcccggaggggcgctgcccggcacaaccggaaaaggcgaccggcgggacttcggagcatataatcacgataacaaatacaaaaaattacaagtcatggaagaaacgatcaaatgcctgattatcggcagcggccccgcaggatacacggccgccatctatacgtcgcgtgcaaacctccagcccgtgctctacgagggcatcgaaccgggcgggcagctcacgacgacgaccgacgtggagaatttcccgggctaccccgacggggtcagcggccagcagatgatggccgacatgcggcgccaggccgagcgcttcggcgccgagatccgcacgggcaccgccacgcgcgtagacctctcgtcgcggccgttccacgtggtaatcgacggccagacggagatcagggccgaaaccctgatcatcgccacgggcgcctcggccagatacctggggctcccctcggagacaaaattccgcggcatgggcgtgagcgcctgcgccacctgcgacggcttcttctaccgcaaaaaggacgtagccgtggtcggcggcggcgacaccgcctgcgaggaggccacctacctcgcctcgatctgccgcaaggtctacatgatcgtgcgcaaaccccacctgcgcgcctcgaaggcgatgcagcagcgggtgttcagcacccccaacatcgaggtgatattcaaccacaacaccgccgaggtactgggcgacgagtcgggcgtgacgggcgcactgctgcgttgcaacgacggcaaggaggtgaagatcgacatctcgggcttcttcctggccatcgggcaccaccccaacacggagttgttccgcgaccagttgcagctcgacgccgaaggctacatcaaggtcgaaccgggcacgtcgataaccaacatcgaaggcgtcttcgccgcgggcgacgtccgcgacccgcactaccggcaggccgtcacggcggccgcttcgggctgcatcgcggccatcgactgcgagcgtttcctgttaagccgggccaactaaaaacgcatgagtttcagcgtcaccatactggggtcttcctccgcgaagcccaccctgagccggcatccgtcggcacaggtggtcaacgtgcacgagcagtactacctggtcgatgcgggcgaaggggtacagcaacagttgatccgttacggcatcaacccgctcaggctacgtgccgtgttcatctcgcacctgcacggcgaccatgtattcgggctgttcccgctgatctcgacgctggcgctctacggccgcaagaccccgctgcgggtattcgccccggcaccgatgggcgagattctggcctgccacctcaaatatttcgacagcgaactgccctacccggtcgtatggacggaggtcgacacgaccaagcatgcgctgctgatggaaaaccgtacgctggaggtgtggagcataccgctgcgccaccgcgtgccgacggcggggttccttttccgcgaaaaggagccggcgctgaacgtcgacaagttcaagattacgaaatacgggctttcggtcgcacagatcaccgccgcaaagcggggcgaggacgtcacgctctccacgggggaggtgatccccaacggggaactgacctaccgtccctacgcccctcggtcgtacgcttacttgtcggacaccaacttttcggccaaggccgcagcgctggcagcaggcgccgacctgatgtaccacgaggcgacctacgccgcagcggagcagaaggcggcgcgggagcgcgggcactcgacgacgaccgacgcggccaaggctgccctgaaagccggggcgaaacggctggtgatcgggcattactcgtcgcgctacaaggatgaaaacatgctggtcgaagaggcccgtgcgatcttccccgaaacctaccccgccaccgaaggggtgacgttcaccttagaaaaacaacgatgacaaaagccgacatacaactcgtccgcgcgctggccgacaaacgcgggcgcacggagcacggactgttcgtcgccgaaggggagaaactcatcggcgagctgcgtacgtcgcacctcggggtacgcaagatattcgccctggaagggctgttttcagggccggaagtcgaggtcgtcagcacgaaggagatggagcggctgtcgctgctgaaaacagcctccaactcgctggcgctggtcgaaataccgcattacggactggatatgcgggctctcgcgggacggctgacgctggcgctcgacgacgtgcagaaccctggcaacctgggcacgatcgtccggctggccgactggttcggcatcacggacatcgtctgctcggaggcttcggccgactgtttcaaccccaaggtcgtgcaggccacgatgggcgccatactccgcgtgagggtgcactacaccgacctgggagggttcctgcgccgagccgcggacgccgggctgccggtgtgcgggactttcctggagggggagaacatctacggggcatcgctcccggaggcggggatcgtcgtcatgggcaacgaggggcgcggcatttcggacgccgcggccgcgaccgtcacccgcaaattgttcatcccgccttacccggccgaccggcggggttcggaatcgctcaatgtggcgatggcgacggggatcgtctgcgccgaattccggcggcaggcaggcaccgggggcccgggacaggcccgaaggggtaaaaaataggcagggagaagccgcaaacaggcggcgggaaggcgtgccagcccggtttcatcatcgtatttcagctgttatccgccgaataaagtcgattacacccgcttaccggagcatgacaccggaagcaacgggcaggaggtcgccgcactcacaccgggtcggcacaccgttcgcacagcccggcaaccatgcggcgcacggcttccagggcttcggcacaccgctcgggcggcaggaggcgcgccgcatcgagccgttcgatgctccgcaggaggcactccacggcatagcgcatttcgtccagctcgccccccgaggcggccgcaaggtcggtagcagccagccgtatcaccgcggagcgggcgcagagttcgaaatccacgaccagggcattgcatttgcggcggtcgtatggcggaatccaaagggtctcgaacatcagccggaaaaccgcggcgaccagggccgggttgtttttccgcgtaattttttttgcgcaaggttccatctttcagagctgttgctccggaaaaaagcgcgggcaaagataccgaatccaccatcgaggtattggacgacctgtaacgtagaatgcggccaatgcccacgccgaaaaacagcgagagcatcaaccttcgttccttacgctacacgaaagtgtccaatttccgatggtaagaaaaaagccgatgcgcctttatccgaatatgtcagcaaccctaacaggctgcataagacaaaggtaggaaaaataagcccatccgcaaaacattccgggccgcaggaatgcaaaatttcatttaaattcgatccggcgcattgccaattctgaataatatgtatctttgtaagttgaaatatatgtatctatgtccgaatgcaaactcaaaataggcatcacgcagggagatccgaacggcatcggctgggaggtgatcctcaaggccctttccgacccgcgcatgacggagctcttcacgcccgtcgtctacggttcgcccacggcggcggcctattaccgaaatacgctgggcgacaccgaaccggtggcgttcaacaccgtgcccgcggcacgcgacgcccgccgcggcaaggccaacctggtcgtatgcggggaggccgggcagccggagccgggcaaggcttcgccccaggccggacgcgctgcggtcgaagcgctgcgcacggcgacgcaggatttgaaggaagggacgctcgacgccatcgtcacggctcccttcaacaaggagagcgtacagggcgaggatttcagctacacgggccacaccgaattcttcggggcggagctgggcggggagccgatgatgatcctgtgcagcgacgtgctgcgcgtggggctggtcaccaagcatatccccgtgtcggagatcagccgcagcatttccaaggagaagatcgtgcacgacctgcacacgctgcgccgctcgctcatcgaggatttcggcatcgtcgagccgcgcatcgccgtgatggcgctcaacccccacgccggggacggcgggctgctcgggcacgaggaactggagatcatccgcccggccatcgtcgaggcattcaggcagggcgtgctggcattcggcccctttgcggccgacgggctgttcgccgggggcggatacgccaagtacgacggcatcctggccatgtaccacgaccaggggctggcgccgttcaagacgctctcgcccgacggcgtgaacttcacggcggggctcgccaaggtacgcacgtcgcccgaccacggcacggcctacgacatcgcggggcaggacaaggccgatgcgcagtcgatgaggtcggcgatctacgccgccatcgacatcgtggagcaccgccgcgcctggacggaatggagccgcaacccgttgcagcgcgccgagcgcgagaaaggcggacgcgacatctcggtcaaagacctgccgcagaccgaacgggaggattagtatgacgccgcaaaaaaagatccgcatcggggccgggttcgtggccatatgggtattgctcggaggagcatggctctgcgattactttttcggcgacacggagttctggaagctggcatccggggaactgaccgtactgctgggtatcggcgccgggacggcgatgatccgggaagggcgccgcggacaggaggctgaaaacgctgcgggcaaagacgcagcacccggaaatccggccgaaggcacggcgggcaaagacgcagggtcgcaggccgcagagacacaggcctaagagaccaggctggagaaacacaggccgcagggtcgcaggccgggaacacggcagccaaaagcacggcagcccgcacggcgcggcagccggaagagaaaaacgataaacaccgggcaacccggaagcgtattccgtctcgtaattgtggaagcgccgaaggccccgaaaacttaactttataatttttttatgatcaaaatcacttttcccgacggttcggtgagggagttcgccaaagggacgactgccttccaaatcgcagagagcatcagccctcgtttagctgctgactccctggcggcctcggtaaacggcgcaaccgtggacatgatgcgcccgatcgaggaggacgcctcggtcaaattctacaaatgggaggacgaagagggcaagcacgccttctggcacacctcgtcccacctgctggccgaagccctcgaggcactctacccgggcatcaagttcggtatcggcccggccatcgaaaacggcttctactacgacgtcgattcgccgacgccgatcaccgaggccgacctgcccaaaatcgagcagaagatgcaggagctttcccgtaacaaggagcagctcatccgccgcgaagtccccaaggccgaagcactcaagaccttcaccgagaagggcgaccagtacaaggtagaactgattacggacttgcaggacggcaccatctcattctataccaacggtgcgttcaccgacctctgccggggaccgcacatccccaacacgggctacatcaaggccctgaagctgacttcggtagccggggcatactggcgcggcaacgagaagaacaagatgctgactcgcatctacggcatctcgttccccaagaagtcgatgctcgacgaatacctcgtgatgatggaggaggccaagaagcgtgaccaccgcaagctgggcaaagacctcgaactgttctgtttctcgcagcgcgtgggacagggcctgcccctgtggctgcccaagggcgccgcactgcgcgaccgtctggagcagttcctgcggggcgtgcagaaggagtacggctaccagcaggtaatcaccccgcatatcggcaacaaggaattatacgtgacctcgggccactacgccaagtacggcaaggactcgttccagccgatccacaccccgatcgagggcgaagaatacctgctcaaaccgatgaactgcccgcaccactgcgagatctaccgttcgaagccccgctcgtacaaggagctgcccgtccgcctggcggagttcggaaccgtctaccgctacgagcagtcgggcgagctgcacgggctgacgcgcgtgcgcgggttcacgcaggacgacgcgcacctgttcgtacgtcccgaccagctgctcgaagagttcgagcgcgtgatcgacatcgtgctttacatcttcaagacgctgaagttcgacaactatacggcacagatttcgctccgcgaccccaataacaaggagaagtacatcggttcggacgagaactgggagaaggctgaaagcgccatcatgcaggcagccagggagaaagggctcacgaccgtcgtggagctgggcgaagccgcattctacggcccgaagctggacttcatggtcaaggatgccatcggccgcaaatggcagctgggcaccatccaggtggactacaacctgccggagcgtttcgacctgacgtacaagggcgccgacgacaaactgcaccgcccgatcatgatccaccgtgcgccgttcggctcgatggagcgtttcgtggccgtgctgctcgagcacacgggcggtaagttcccgctgtggctctcgccccagcaggtcgtggtactcccgatctcggagaagttcaacgattatgcgcagaaggtggccgaatacctgaaccgcaacgacgtccgcaccgaagtcgacgaccgcaacgagaaaatcggccgcaaaatccgcgacaacgaactgaaacgcgtcccctacctgctgatcgtcggcgagaaggaggaggccgagggcctcgtatccgtccgtgcacaaggcgagggcgacaagggccagatgacgatggaagcgttccgcgacctgatcaccgggctggtcaaagaggagatcgacgccaacaaactggaaaagaaataaaagaacacattattaacttaactaatacgtacaactatcgcagcaccgaaaccattcccgccgaggccgtttacccccgggaataacagaccgaaaccggcagccaatgccaacaaccgcttcgggcgccgtccgcccgtcaaggagaacccccaccggatcaacaacgagatcacggctccggaagtgcgtgtggtcggcgacaacgtcggccagccgcaggttctgccgatccgcgatgcgctcaaactcgccgacgaactggaactcgacctgatcgagatctctccgaaggccgagccccccgtatgccgcatcgacgattaccagaaattcctttaccagcaaaagaagaaagccaaggaactgaaggccaatcagacgaaagtggtcgtgaaggagatccgcttcgggccccagaccgacgaccacgactacaatttcaaactcaagcacgcgcagaacttcctcaaggagggggccaaagtcaaggcttacgtcttcttccgcggccgttcgatcgtcttcaaggagcagggcgaaatcctgctgctgcgctttgccaccgatctcgaagagttcgccaaagtggaggcgatgccccggctcgacggcaagaagatgaacatgatgctcgcgccgaaagtgaaaaagtaacaaatgacaagcggccgcaggccacgtaatacccgtgaaaacaacgacggcggaacggagatatccgggccgcaggttgttgttttcgcatttacaggaatgggcagcccggatcatgtcgttctgctccggcgcccagctcctctatctcctggaacatatcccgcaagataactttatgagcgttttggataaccgaatatcgaaaactattcccgatctttatccgataaatgattaaactgaaaaaaatgatgaagaaatggttattatccggatgtctgctgactttgatggcctgcggacaagtgccgcaggagcggatcgattcactgaaggagaccatcgccgattatgaagagaacggcgcaggagccgaaatgccggaagaattccgtgcattgcaggaatcatttgccgaggtggagagatcggtggaagccgaaaaagaaaaaatgttcagcagctactccgcagtcgaacagaagatggcacagatcgaaaaacagttggacgacatggcgtttaccatcaacgcgcggagtgagcgatttcagaaggtatataaaaaatttgcgagagaggtcagcctggggctcctcatgtacgcaagcctgcccaaagacaaagcccggagcctgcccaaagagatgaaggacgatttgcagcgcgccctgcagcctgcactcctgctgagagaactcatgaaagccgaaacctatgcgcaaaaacatgagatactggatccgcacgtcgaaaaaatggagaaattgaaccaaacgatgaagccctggctttcggagcagaaatacgacgagatcctgaaaaaagtcgaagcccagctgaaaaagacaaatctcagcgacgacagccagatcgggttcggggcgttttaaacatcccggcctttatcccgcacggaatcggacgcaatccggtcttgaacccgtccgacttttgcgtgtcttttgcatccacaaaagcgtgaaaaactgaatacaagaaatgtttcgtaaatgaaggaacttatcaactttttgacagattggggcgatataagtgttggagtggtttttgttctgataccattttcggcttttgtggcactttttcatcatgttattttaggcggaatatacggttgggactataaacctaaatggcttctctttgttctggaaccaactcttgtatgcttcttaggggttattaaaccgggctttggcttgtgtgcgttggtgcttctttttgtacttacttttgtgttggctattgtcggccttatcataatgcctttggtgaggagattaagaaaagtcaaagctgaataccggaaaaccggaaaaaaagtttccgtcttcactgcgggcaaagtaacgggaacttatatatcggggattattggaatgctcgttattatgtttattatggaagtctcgttgccgctaatatttttggtggtatttattatccttcctcttttcgcgctgaaaaatcccgggggtgaccgtcattttatgcgtttacaggcaatattgcctacctctcctatacgttctgtggctatggggcttgccgaagtggaaggaatagttgttcccggaggaaaactcattgctcctatcggtgacacggagtgtattgcatacgaatacgaaatagaagatatagaccacgacagcgaaggacgaatttcgtataccaccgttcacagcgagaataaatgcaacgcattctccatacaggacgaaacgggcatattggacgttacacccgaaaagctgaatcttttgtgtctgcccataaacaagcggtatcaaaaaggaggaaagcgatacacgcagcggttgttgttgcccggcgataaagtactgcttataggaatggcagatacacgaggaggcaaaacggttttccggtacgaagaaacgaagaaggtatatacgctcatgccttcacaaacactcaacaaatacaacagggcaaagccgcttatcaatagtctgatctgttatacctccgtttggggtattatcgcttcactgatactgctttgtcacatcgaataccgtgacggagagttgcaaataaacctgcctttcggcaacaagggtatttcatccggtcagtatggatatatactcccttccaatcaagaaaaaacaatcatctttaagcatcagtgaatatgggaattattattgctttcgttattttgggagttatcattgtcggcattgtctcgggaggcgttgccatttacaaccggttggttatgctgaagtacaatgtagataaaaattttgccaatatcgatgtaatattaaagcagcgtgtagatgaaatacccaaccttattgctgtggtaaaaaagacacagggatacgaagaatcgctgttaaatcagcttacagagctacgaaccgcttttctttcctctcgctctaccgatgaaaaagtacaactggctaatgaagtcggcaaactgctaaattcctttttcgccgtttcggaaaactatcccgagctgaaagctgtggagagtttccgcaccctccaacttcgggtgtcggatttggaagatatgctttccgaccgccgcgaactctacaatgaaagcgtgaatatgtataatatcggtattcacgaaatgcccgccttgttgtttgcccgtccaatgggttatactgacaaaccgttgttgcacatatctgaagaggagaaaaaatatgacggaattcgtttctgatattctaaattatctgcaaaataacgagaatgcccagggagttgtagttgcattggctgcgtttggcgtacctttattctcgttcctcttgtatctcttgtttcgaatactgcggatcaaggtgggggcgatggcaagcagagctttggcggcattagtcacggggtatacgcttttcgggtttattacgcaaataattctccttttcagcggtgtgcctgctcttaaaatggcactcatttggcttgccatgataattgtttacggaatatttgtcctttttaatcgtagaatgatatacaaaatattgtctacttttaacgaaacaaagaacagcggacaagagtcattagaatcataatacatatccgtattatttttttacaacccacacatagtggcagtaacatatttgcttccaagcaaccaagacactgctttccctccaattttcacatgcaccttttttgtctccgctctggttacgggccagaccacgaccacaatacaacttacagtccttagggaaatgcacgatgcccttgccatagacttcagcggattccttaaagcctttgagatcgtcttttttcgtgctgtctcttccgccttccgaaaattcggttacatttatagatgaaacagcctttgaaagcgtgtaaatcagctctttggaaaccatctgaaacttttccgccagcccaaaaagtaacaggatagtaacgtaattccggtttgagttggctttttgatggttttacttggctgcgcccgtttgtccaatcttcgtctaaatcgctattcgccagtcttatcacaccggtttgctctcactttcatttttatttcctatctttacactcgatgagcacacccgacgacatattccgcatcgcggacgaggcggcattcgaagcggcggcgctggaggtattccggcgccaggctgcggaatgcgcgccctaccgcgagtatctgtccctgatcggcgtacgacccggggaggtgcggacggcggatgcgatcccctacctgccgatcgggctgttcaagacccacgaagtgtattgcggcggcacggagcccgaagcggtcttcacctcgtcggccaccaccggcatgacctcgtcgcgccacccgatgcgctcactggcgctctacgaacaggcattccgcgcttcgttccggacattctacggcgaaccggcacggtggagcctctatgcactgctgcccaactacctgcggcgcaaaggctcgtcgctggtctacatggccgaccggctgatcgccgactgcggctcgggcggcttttacctcgacgactacgaagccctgctggaggcgatgcgccgcgaccccaagcccaagatcctgctgggcgtaagctatgcgctctgggatttggcggagcgttacgccccgaagctggacgacacaatcgtcatggagacgggcggcatgaagggataccgcgaggagatccccaaagcggaattccacaaaatcctgtgcgacgcattcggagtagacaggatacactccgaatacggcatggcggaactcacgtcgcaggcctactcgcagggcgggaatatcttccgctgcccggcctggatgcgggtcgcggcacgcgacgtgaacgatccgttcgaccgcctgccggcaggctcccgcggcgggctggacatcaccgacctggcttcatggtggtcgtgcgccttcatccagacccaggacgtggggcgcgtggctgccgacggggcgttcgaggtagaagggcgcatcgaccacagcgacatcaggggttgcaacctgctggtgcaataatttacctgcaaagctcccggccacagtccgcgggccggtgtccttcgcgggactccggcagcagcgaccgacaagagggggggggcattgacacagaccgacaaaaaagagagataacgatgaaaacagtagcattcgtccccttacgcctcaacagccagcgggtagcgggcaaaaacctccgcctgctgggcggcgagccgctgatgtgccatatcctgcggacgctcgccggcatcggggagatcgacgaggtgtacgcctattgcagcgacgaacgcatctgcgaatacctgccccaagacgtgcgtttcctgcgccgcagccccgacctcgaccgcgacacgacgctcgggcgggagatctacgacagtttcacggccgacgtcgaggccgacctctacgtgctggcgcacgccacctcgccgttcatccgcgcggagaccgtggcggacgccctgcggcacgtgcggtcgggggaatacgattcggcgttcagcgccgagaagatacagaccttcgcctggttcgaaggccggccgctcaactatgcgctggacgacatcccccgcacgcagaccatagagccggtctatatagaaaccagcgcatttttcattttcccgcgcacgctctggtgcggccgcgggcgccgcatcggggagaagccctacatggccgtcgtcgaccgcatcgaagggttggacatcgacaaccccgaggatttcacgatggccgagatcatcgcggcaagccggcggctggggtgacgggagcgggaatccgagatgagcataaaaaagcgacctttcctggtcgcttcctttatttcaaaagggcggggttactccgccccgcgctcgtaggcgtcgatcatcgagccgcgggtacggttgacgatccgcgcaccgagcgacgcggcatagtcgcgcagcacctcgtgcccgcggaagagttcggcgacctcggccaggtataccgacatcgtatagggcacgtgcggcaccttcatgtagataggctgcggcgcccggggcccggcatcgtaatagtggcggtcagcacggcacaggcggttcgcgtcgtcgacgcatagcccgtcgagcaacgtatgatccaccccgtagagctcgatctgccggtaacccaataacagggcgacgtattcgcccacctgcacgaccgtgccgaaattggcgctgccgaggccgtggcggaaaagccagaagccgacgctgccaaaaccgcggtagacctgcgtatggaagcgaacgatgcggatacgggggttgggaagtgcggcgcggtagtcgaacttttcgggattatagaactgtacgtagagcgtcatcggccatgtgaccttgctatcgagcgtgcggtagagcgcggctacgcggtcgcggcactcgctgtcgcggaagaacatcgggtcggaaaggacgtaataacccggtctgaccacctcgaagcggtcgtcctcggcaaaaaagttgaccgccatgaaatccttcgcctcgtattcgcggcgcgcgatcaatcgcggcaggtcgtccgacaacgaagggccgttgcccagaatgaccatcccgcgcgacgggtcgcccgtcgggcccgcacggcggatatagttgcggaaattctccttgacggccatcacggcgaagtaaagcgccgtgtcgaacgtattgcggatgaatgcgatgagcttctcggatgcggtcatgaacagggttttatttgcaaatgtagcaaaagatcggtatcttcgcaagaaaccaaaccgtaacaaatggcatcggcaaccatctcggtcatcatacccctctacaacaagcaacgcgaaatcggcgacaccctacggtcggtgctcgcacagactttgcagcccacggagatcgtcgtcgtggacgacggatcgacagacgggagtgcagacgccgtgcgtgccatcgcatcgccgctcgtgaagctcgtcacgcaagcgaacgccggggtctgcgcggcacgcaaccgcgccatcgccgagtcgacaggcgacctgatcgccctgctcgacgccgacgacacgtgggaaccgggattcctggaggagatcgcttcgatggcggccgaattcccgggctgcgggatttattcgacagccttcaacatcgtcagccatgacggacggttccccgcccccacccccacggagcgcggcgtggtcgccgacttcttccgcgactcggcgcaccgttatatctcgatcccgtcggccagcgccgtcccgcgcgcggtattcgaatcagtgggcggattccccgagggaatgaagatcggcgaggatctctacatgtggatcaagatcgcccggcgctacaaggtctgcttttcgcccaagccgctggcaaactattcgaaggtggcctcgaaccgttcgtcggccatctacacgcccgagcggacgcgctactcattcgaggagctttacgacccggcggcggcagacggatacaacgagttcgtggcccgcgcagccctgggaaaagcgctcatcatcagcgcaaaggggggcacgaaggatgcggcgagggcgatccggttcttcggctacacgaagacctaccgccgcacgctgcgcaaggtacgcatcctcaacgccctgccccgcagctggcgggggccgctaatcgggctttacaacagcctggcatggcgcatcgcccggaaaggactctgagccccgaaaattccgacagcatgaaatacctttcgaccccctccgtcataaagggtctttttacggcactcctcctgctggcgtcatccgtcgcccggccccaatccgcaaatccggacaccccttcctacacgatgcgttcaggcggtaccgaacgctcgtacaacctccacctgccccaggggctgccccaaggcgccccgctagtggtcgtcctgcacggttacggcgcgaacaacgacccgggccgcttcgggatgaatgccgcggccgaccgccacggctttgccgtctgctacccgcagggcgcgaaggacggccggggcaagacgtgctggaacgtgggctacccgttccaggccgacatggccatcgacgatgtggagtttatcacgcaactggtacggcatttacagaaaaagcacgggctgagccgccgcaacgtcttttgcacgggcatgtcgaacggcggggagatgtgctaccagcttgcggcgcagcgcccccgcctgttcgcggccgtggcacccgtatcggggctgatgctcgaatggctttacaaggccgacgattccacgcaccccgtgcccctgttcgaaatacacggcacggccgaccgcacgtcggcgtgggagggtgacctcgacaataaaggcggctggggcgcctacgtcgccgtaccgatggccgtgcattactgggcagccaagaacaaatgcaccggcatgcagacggacacgattcccgggcgtacgccggagaacggccgcaaggtcatcgcccaccgcttcacgggcggcacgggcggcagcgaagtctggctctacgagatcgtcggcgggaaacattcgtggggcgaacaggacatcgacacgggcgaggagctctggaaatttttcagcaagttcgtgaaatagacggaacgacagccggcaggggcaaggaacctgtgcaacacctcgcagaaggagatggtctacatatatatccaatcccgggaaaattcgcgggaagaacacacctacgacgacggaacccgggtcgcatgcactcccgggtgggaaacccgctaaaaaacacccggctttacgtccatgcgtaaagccgggtgccggtttacctctccccacccctcacggggccgagtcgttgcagatcagttcgcgaaggtcagccccttgtcgtcggcgtcgatgcggatcggctgctcgcggttgacgtcgcccgcaaggatgcgcttcgagaggtcgttgaccacatagcgctggatggtacgcttcacgggacgcgcaccgtagagcgggtcgtaaccggcggcagcgatccattcgcgtgccttctcgctgtattcgaggcggatgccgttttcggcaagcatcctgcgcacgacaccgagctgaatgtccacgatgcgcccgatatcccggcgcgtcagcggctcgaacatcacgatctcgtcgatacggttgaggaactcgggcttgagctgctgcttgagcaggtcgatcacatcccggcaggtcttctcgaccacttcgggggcgagtctctcaccgttgaacgcctccgcgaaattctcctggatgacctgcgaacccatattcgaggtcatgatgatgatcgtattgcggaaatccaccgtacgacccttgttatcggtcagacgaccgtcgtcgagcacctgcaacaggatgttgaaaacgtcgggatgggccttctcgatctcgtcgagcagcacgaccgaatagggtttgcggcgcacggcctcggtgagctggccgccctcgtcgtaaccgacatatcccggaggcgccccgaccagacgcgacacgctgtgacgctcctggtattcgctcatgtcgatacgcgtcatcatcgagtcgtcgttgaagaggaactcggccaacgccttggccagctcggtcttgccgacaccggtggtgccgaggaagatgaacgagccgatcggtttgcgggggtcgttcagcccggcgcgcgaacggcgcacggcgtcggaaatggcggcgatggcctgctcctgcccgatgacgcgcttatgcagctcgtcctccatgtgcagcagtttttcgcgctcggaagccagcatgcgcgtcacggggatgcctgtccagcgcgacaccacctcggcgacgtcctgcgcatcgacctcctccttgatcatcgagccgttggccgacgccagtttgtactcctcctggaacgcggcgatctccttctccgcctcctggatcttgccgtagcggatttcggccaccttgccataatcgccctggcgctcggcctgctgcgcctcgatcttcagggcttctattttgtccttgttcgactgaatctttttcaagaggtcgcgctgcccctgccacttggcacgcatctcggcgtcacgggccttgagctcctcgatctccttggtgaggtgctcgacgcgctccttgtccttctcgcggcggatcgcttcgcgttcgatctccagctggcgcacacgccggtcgagggtgtcgatctcctcgggcacggagttcatctccagccgcagccgcgaggccgcctcgtccaccaggtcgatggccttgtcgggcaggaaccgcgaggtgatgtaacgcgtcgacaactcgacggcggccacgatcgcctcgtccttgatccgcacctgatggtggttttcgtaacgatccttcaggccgcggaggatcgaaatggcatcctcggggctcggttcgtcgaccatgaccttctggaaacggcgctcgagggccttatcctgctcgaaatacttctggaactcgtcgagcgtcgtggcgccgatcgtccgcagctcaccccgcgcaagggcgggcttgaggatgttggcggcgtccatcgcacccgacgacttgccggcgcccacgagggtgtggatttcgtcgatgaacagcaggatgtcgccgtcgctggccacaacttcctgcacaacggctttcaggcgttcctcgaattcgccctgatacttggcacccgcgatcagggcacccatgtcgagcgagtagatcaccttcgatttgaggttctcgggcacgtcgccgtcgacgatccggtgtgcgataccctcggcgatggcggtcttgccgacgcccgcctctcccacgaggatcgggttgttcttggtacgccgcgagaggatctgcaacacgcggcggatctcctcgtcacggccgatcaccgggtcgagtttgcccgaacgggcctgttcgttgaggttgatggcatacttgcccagcgcatcgaactgctgctcggaggtctgagaatcgaccgtagcccctttgcggaaggtgcggatcgcctcaaggagctccttctcggtggcgccgctgcgcttgaggatgtcggcggcctgcccgcgctcggcgacgagccccagcagcaggtgttcgaccgacgcgtatttgtcgccgaagttccgggtaaagtccacggcgcgctggatcaccttcgaggagtcctgcgaaaagaactggtcgccgccgccctcgaccctcggcagggacgcgacggcccggccggcctcgtcgcgcaggccgcggacattcaccccgacacgccccaggaggaacgtggcgagcgaatcgtcctcgcggacaagcacgctcagaatatggagcggctcgacagcctgctgtccgcgctcccgggcaagagacaatgcactttgcagagcctcctgcgcttttacagttaacgtattgatgttcatatctctgataatttgtttttcaaactttcgtatactacacccgcaaaacgcctgccaacccggctttccggccaatgtgtcatcctttgtcacacacgggactgacacgaggcgccaaaacggcagctgttttgcagaagagttacacaatacggcataaaacagcaggacatcgcccgaaatgtattatcttcgcaacacctaactctcactcttcacgttcatgacataccgtaaacccccgttcctgctgcgcaaatggcagcggttgcagatgcgctactatgcgtaccgtaacccggaaaaactggtcaggatacgctaccggcaacgattcggcaacgaccccgacctcgaaaacccccgaaccttcaacgaaaaagtcctctggatgatgctctactcggacacttcgcgctggtcgcagttggccgacaagtaccgcgtccgcgagtatgtcgagcaatgcgggctgggatggatgctcaacgaattatacggggtatgggaatccgcagaggagatagacttcagcgggagggggaatctccccgacacgttcgtgctgaaaaccaacaacggctacggacaagttatcatcgtgaacgacaggcaaaaagccgatatccggtcgatccgccgtacactcaaccacaccctgcgaaagaaattcggccgcatgacggccgaacaccactattttggtattaaaccccgcattatcgccgaacgcctccttccctcagaaccagcattcggcaattcgctcatcgactataaattctactgtttcgatggcaacccctattgttgcatggtctgctacaaccgtaaatcgccatccgacgtcaaaacaggattgtacgatgccaggacatggaaaaacataggtcattacgtcaccggaaaatattacgaccaacatcagtgtgatatcccgcgtccggcatccctcgaccggatgctcgatgcggccaaacggctctcgtcaggattcccccaagtacgggtcgacctttacgaagtcgccggaaaccccgtattcggggaactgacattcacctcatctgcaggtatggatacgggattcagccaggagtttcaggaattgatgggatcgcaaatctccctgccgcccgccaagcggacgcaaccgtcgcacccgggactgctcgggctcctcggactgcggaaggccgccgccaaataaaaacggcaggcagcccggaggggcgggtgcaacaggctgcccggcccgccaggcacagccctttgcccgggtatggggagagggctgtcattttgtaggcgggtttcatttttaatttaattcttaattcgtatctttgcgctactatgagtgattttatcgtcagcgcacggaaataccgccccgcgaccttcgcctcggtcgtcggacaaaaacatatcacctccacgctcaaaaatgcgatcgagcgcgggcagttggcacatgcctatctgttctgcggcccccgcggcgtgggaaagaccacttgtgcccgcatcttcgcaaaggccatcaactgcctgaaccccaacggatcggaggcctgcaacgaatgcgaatcgtgccgttcgttcaacgaagggcgctcgctgaacatccacgagctggacgccgcgtcgaacaactcggtggaagatatccgcacgctgatcgaacaggtgcgcatcatcccgcaggtagggcgctactcggtattcatcatcgacgaggtgcacatgctctcggcggcggcgttcaacgccttcctcaagacgctcgaagagccgcccgcacatgcgatcttcattctcgcgacgaccgaaaaacacaagatcatcccgaccatcctctcgcggtgccaaatctacgatttcaatcgcatccgcgtcgaggacggcgtcgaatacctcaaatacatcgcctcgcaggagggcatcgcagccgacgaagagtcgctcaacctcattgcccagaaagccgacgggggtatgcgcgacgccctgtcgatgttcgacaaggccgtgtcgttctgcggcaaggcgctcgattaccgcaacgtcgcccagacgctcaacgtcctggactacgacacctacttcagcgtcacggagatgctgctcgcgggcaactatgtcgatacgctggtgaccttcgacagcgtgctgtcgcggggtttctcggggcagaccttcatggcggggctgaaccgccacatgcgcgacctgctgatggccaagcgccccgaaacgctgcggctgatcgaaatgaccgggacgctgctcgaacgataccggacgcaggcgggcgcctgcagtgtcgagttcctgttcggggccatctcctgcctgacggagctcgacgggaagatccggcaatcgtccaaccaacggttgctcgtcgagctgggcctgatgaagatcgcagggctcggccaaaaaaaaaatgactctctgacatcttccggggaatatccccttcctaccctcaccccccgcacggcaggccccgcatctgcggcggctccggcagcggccgggcagccggcagccgcaacggcacaatcggcagggattaccgcgaccggcaatccggcaacgaacgccccggcagcaagcgcctccggcaacccggaagccccggcagccgcaacggcacaaccggcaggggttagcgcgaccggaaatccggcaacgaatgccccggcgacaagcgcctccggcaaccccgcagccccggcaagcgcaacggcacaaccggcagcgcaagcagcaggagccgcaacggcacccctttccgcagcgacgtccgcagcaatgcctgccgcgtccccggccggaaggccggcagcgggtacatccgccggcccgactgcacagggaacactcccggcacagcctgcgccggggatgaaacggcggccgctgatctcgggcgcatcgctctcggagctgctcgcctcggcaggcagcgaccccgacgaggagctgtcggacggcgaaacgcccgacgaacccgaaaccgtgcgcatagacccggactgtgccgaaaagttggagcacgcccgaggcaggatactgaacctcatcaaagagaaacgcccgcgcttcgtgccggctttcgagctgatgacgttccgcgacaacacgatctcggtgagcgtaccgacgacggagctgcgcgaggagatcctgcgcagcaagaccgggatgctgatgcgcatcgccgaactggcgggcatcgagggtatgatcgaactggaggtcacggtcaatgaagagatccgggcggcacgcccgatcaagctcgaagaccgcgtccgctacatcacggagaagaacccgctcgtcgcggaactccgcaaagcactggacttggaagtagaataaaaagaacgaacaataaaaatggcaacaaagaatttcatcgaagaactcgaatggcgcgggatgatccacacgatcatgcccggcgcgaaggaacaactcgaaaaagagatgacgacggcctacctgggcatcgaccccacggccgactcgctgcatatcggccacctggtgggcgtaatgatcctcaagcatttccagatgtgcggacaccgtccgctggcactcatcggcggtgcgacgggcatgatcggcgacccttcgggcaagtcgcaggagcgcaacctactcgacgagcccacgctgcgccacaaccaggaggcgatcaagcgccagctggccaaactgctcgacttcgagtcggacgccccgaatgcggccgtgctggtgaacaactacgactggatgaaggacatttcgttcctggaattcatccgcgacatcggcaagtgcatcaccgtcaactacatgatggccaaggattcggtcaagaaacgattcagcggcgagggcgacggcatgtcgttcaccgagttcacctaccagctggtacagggcttcgacttcctgcacctctaccagacgatgaactgcaaggtgcaactgggcggcgccgaccagtggggcaacatcaccaccggcacggagctgatccgccgcaagctgggcaacgaggccgaagcgttcgccatcacctgcccgcttatcaccaaggccgacggcacgaaattcggcaagaccgagagcggcaacgtatggctcgatgcgcgctatacctcgccctacaagttctaccagttctggctcaacgtcagcgacgaggatgccaagcgttacatccgcatcttcacactgttagaccgtgaaaccgtcgaggcgctgaccgccgaacacgaggcggcgccccacctgcgcatcctgcagaagcggctggcacaggagatcaccacgatgatccactccagggaggagtacgaaaaggcggtcgaagcctcggcgatcctcttcggcggctcgacgtcggaggcgctgcgcaaaatagacgaaggaaccctgttgcaggtgttcgagggcgtgccgcagttccgcatcgcccgcaccgagctgggtctgccgttcgtcgatctgtgcgccgagaagacgcaggtgttcccctcgaagggcgaatgccgcaagatggtgcagggcggcggcgtgtcgctcaacaaggagaagatcgccgacccggcacgtacggtgggcgaagccgacctgatcgccggcaaatacctgctcgtacagaggggtaagaagaactactacctcgtaatcgccgagtagcatggaataccgcatcgtcctgacgcgcatggaattccacgcgctgcacggctgctacgagctggaacgcaaggtgggcaaccgcttcacggtcgacctggaactgacggccgaactgggccatgcggccacggacgacgacgtgcgcaagacggtcaactacctgacggcctacgaagtcgtcgagatgcagatgcgaatcacgcagcacaccatcgagcgggtggcgacgaacatcatcgaggcgatttacgccaccttcccgcaggtgcggcacgtaaaatgcaccgtctcgaaactggcgccgccgctgggcggaaagctcgagaaggtgagcgtcgtgctggagaaatagggcgggtgtgcgcatgcatgcgcacacccgttcgcgataataaacaggttaggttatgcatcacaaggagagtcgcgccaccttgggtggcaaattgagcgctgtgctggtcgccgcgggaagttccgtggggctgggtaacatctggcgcttcccctatgtagccggggacaacggcggcggggcatttctgataatctacatcctttgcgtcctgctgctggggctgccgctcatgatcgcggagttcaccgtggggcgtgcttcgcaccgcaatgccgtgggtgcctaccgggcactgaacccacggtggagttttctgggttacaacggcgtgctggccgcattcctgatcctggggttctacttcgtagtatcgggatggacggccgaatacatggtacactcggtgacgggcagcatcgcccgtttctcgaccgccgagcagtacaagagtctcttcgagaactttatcagcaatccctggaggccggtcgtctacacctgcctgttcgtcctcgcaacccatttcgtgatcgccatgggcgtgcagaaaggcatcgaacgctcggctaaaatcctcatgccgctgctgttcctgattctgatcgtactgtcggtacattcgctgctgatgccgggcggggaagccgggctgaagttcctcttcgcccccgacttctcgaaggtgacgcccacgaccgtgctcgtcgcactggggcaggcgttcttctcgctttcgatcggcatcggcacgatggtgacctacgcctcgtatttcaaaccggacacgaacctgcgccacacggcgctcaacgtcaccatcctcgacacgctggtggccatactggccggcgtggtgatcttcccggcggtattcagcgtaggcatcgagccttcgtcggggccgtcgctcgtattcatcaccctgccgagtatcttcaacggcatgccgctgagcatggtgtggtcgtcgattttcttcctgctgctggtcgtcgcagcactcacctcgaccatctcgctgcacgaggtagtcacggtctacctgcacgaggagtggcacctgagccgcaaggctgcggcatggctgacgactgccgccacggccgccctggcgtcgctggcatcgctgtcgctgggtgcgttgggcagttggaagatcgccgggctctcacttttcgattcgctcgacttcctgacggccaacatcctactgccggcaggcgggcttttcacctgcatcttcgtgggctggaagctcgaccaccacatcctcaaggcacagatcaccaacgacggagagctgaaattccgcatctacggcctgttcagcttcctgctccgctacgtctgcccggccgtgctgctgctgatcttcctcgacaacctcggcgtattctgacacggccgacacgcgtttccccgaccccggacttcggaaagtccggggatttttatttccgcggccaggatggaatggagggcgtacatttcgattcaaaaccactctttctcaaaaaagcagacatttcgcccagtttttttgtgttttattttggaaaataaaattaaagatttatttttgtttcataatgaaattaaaaatattacacatcacaataaaaaacacaaatacaaccgaaaaacccaaaaaaggtaaaaagcggcacgagatccaatcacgaccgtaaaaggcaaaccgcgggcagcacccgcggcctgcatccgtctcagagacaagctttcgcagcggcagccgattgccagggtatgaaaaaaggattacattccggtgacaacgacgcacgaagccaattattaaaatatttttgcagccggagcgacacaggctcccacctataatataaagaaaccattcgaaaagacccggccatgaaaaacctgttacttttcctgctggcctgcagcctcggcgccgtagccgcagcccgcccgatacggggatcggtcaaatgcggcggaaagccgatgggcggcgtggccgtaaccgacggttatacgttcacgcaaagcgatgagcagggcatattcacgctcgatgccgacgaccaggcgctgttcatcagtctggtgaccccgtccggctacctggctccgctcgatgggggcatcccgcaattctaccgcacatacgacccggcggccaaacgctacgacttcgaattgcaaccgtggcccggcccggacggatgctacgaactgctggcgatcgccgacccgcagcctaagaccgaagagcatttccggcggttacggagcgaagtcatgcccgcattgcaggcggcaaccgataacgggaggacgcggggcgcgaaccaggccgcgatcgtgctcggggacatcgtatgggactcccctgaactcttcgcaggcgtgaaagcggagttcgccgggctcggggtacccgtatacggcgtgatcggcaaccacgaccacgacctgaacaaatacaccgaccgcgaggcgacggaaaactaccgccgccatttcggccccacctattatgccttcgacatggggcgcacacactatatcgtactcgacgacatcgtttaccacggcgcgaagaaatacgaggagcagatcgacacaatgcaactgcgctgggccgccgcctatgcggaacgcctgcctgcagggtcgcgcgtctgcatcgcgatgcatgccccggccatgaaatcgtggctcgggaaccgcgtcatggagtcggccgagaggctgatggacgccttcgccgggcacgaactgcacttcatcaccgggcatacgcacctcaactcgaattacgacatccgcgagggggtcacggagcacaacgtagcgcaggtctgcggcaacctctggtgggatccgatcaactgggacggtacgcccaagggcttccagctgttccgcgaatgcggcggggaattctcgtgggaataccggagcctgggcgagtccccggcacggcagatccgcgtatggcaccccggccaggtggccaagcacccggccagcgtcgtggcaaaggtgtggaactgggattcgtactggacggtcgtatggtatgaggacggccgttaccgcggcgccatgcagcgtacgacgctcgacgaccccgattataccgcacacatcgactcgctgaaggccgccgggaggaaaatctccaaagtccagcgcccacgcccgacgaacttctatttcacggcacgcccctcggcatcggcccgcgaggtggaggtggtcgccaccgaccgattcggccgccgctactcggagcgcatcgcactcgggcacaccgactgacatacaggacaccaacaccaaaatcatcaatagcctatgaaaaaactgattactttaatcgccgggttgctgctcgtcgccctgccggtcggactggccggttgtgacgacagcgacaaggagatctacaacgatggccggctggtcaccgatgtagttattccgacctcgatgaccgtctaccgcgggatggaggtttccgtttccggctacggcttcgcccaaggcgacgccatcgcgttacgcgccggcgaggatctcccggcagcgaccacggtagcatcggaaaaactgctgacgtttgtcatacccgacggcgcggcagaccagaccgtctataaggtcgtgctcaaccgggcacaggactaccaagtgctcggatcgagcaagatgaccgtacaactggccatcgacgtcgacctgggcaagaccatctcgggcaactggggcggcgacgccgtgatccgcggccgcgggttcatggctacggacaaactcctattggagcaagggggggggaagttcgaagcgccggtcaagggtgctgacgattcttcgctgaccttcaccattccccagaacgccgccgacggcgactgcgaattcaccctgcagcgcggcgcagaagagcaggcactgggctccgccaaactcaacctctccctgggcggcgtcaccgtaccggacaaggagggcgcgacgatcaagggtatcgtccacctggcaggacaaggcatcgccgacgtccttgtctcggacggcgacctgatcaccaagaccgacgccaacggtttctattggctcaattccgaaaaacgcaacgaactcgccttcgtcatcctgcctgcgggctatgacgtccccaccgtcaaggcgatgccccagttctggcagccctgcacgctcgacacaaacaccgtcgaacaactcgacttccagctgctcagggccgacaacgactcccacaccatgctcgtggccacggacatgcacctggccaaccgcaacaccccgaaagattacgttcagttcgccgacggcttcgtcaaggagctgacatcggcctacaatgccgccgcacccggaaaggtatactgcctcaacctgggcgatttctcgtgggacggctactggtacgacaacaagtgggcgctgcccgaatgcaagcagaccgtcgaggatttcaatttccagatgtggtcggtgatgggtaaccacgacaacgacccctatgtagcctccgatttcggcgccgaaggcccctaccgccaacacatgggcccggtttactacgccatgaacatcggccggatacactacatcatgctcgacaacaccgagtacctcaacacgggcggctcgcagggtacggtcggttcgcgcaattacaaccgccgcttcgacgaccggcagctggcatggctcaaggaggaactcacccatgtcgacaaatcgaccccgatcgtcgtgggatgccactgcccgctttactcgtacagcggaagcggcggcgtgagcgtagcgctccagacccaggctgacatcgacaaaatcctgggctgcttcgccggcttcagcaacgtgactttcgtcacggggcacacgcacgtgaaccgcaatatccagtcgccgacctatgcgaacgtctacgagcagaacatcgcggcggtctgcggcacctggtggtggacgcagcagtacggcaacaacaacgtctgcaccgacggttcgcccgcgggttacaagatcttcacggtcgacggaaccgacctcagatggcagtacaaagccacggggcttcccatcgaaaagcagttcatcacctacgacatgaacgaggtcaaggagtactgggccaccgacgccacggcactcaaggccttcgccgcaggcaacgacatgcgaaaccgcgacaaggattattcgacggtgggcgaaaatgccgtctacatcaacgtctgggcctacgagccgggctggacggtcaccgtgacggagaacggaaccccgctcgacgtgaaacaggtctggagcaagaaagacccgctgcacagcatttcgtacgacatcccgcgcggcgcggccaacaacggcacgctcaccttcccctcgacctcctgcatgcatatgttcgaggttacggcctcctcggcgtcttccacgctggagatatcggttaccgaccgcttcggcaacgtcagcacggagtcgatgacccggcccaaggcgctcacgaccgacgtgaccaaataaccctcaaaaaaccttaagacaatgaagcgtataatgaacaaatggttgtggtcgttattatgcgtcacgctcctgggagccgcggcatgcagcgacgacgacaccgaaggggattcggggaaccccatccccccggcactctccaccgaaaacctgcccgatgcagggctgaagttcctctattcggcactgaccccgcatacatttaccatgagcgtcgacgcgccctgggagatcaccaagaccgcaggctggttcgtcgtcaccccgaacaagggcgaggcgggccagaatatccaggtcaccgtcaccccggccctgaaccagggcgaggcgcgcgacggcgaattcaccatccgcgccaacagcggcaacaacctccatccctgcctgacggagaagagcatcccgctttcgcaggacgcctacctggcggccggcatcgtgataacggggctcgaagaacgcctgctggccttcgaagccgaagatacggatccggtggtcttcaccgtcgaggcatcctacgactggacgctcacggtggagaacgagacctggctgacggtagcgcccaagagcggcaaggccggctctgcggcccaagtcaccatcacgcccaaggccaacaccaccgacgaacgccgcgagtcgaaaatcacgatcacggccggcgacgccgaattcggcgagaacaccgccgaagagatcatcgagctggttcaggcgccctacatgcccaaggacacgcatgccgagggatacgtcttcttcagcgacgacttccagtggattcccgacaactgggtgagcccctacaccaagtacggctggccgagcgtatcgatcgacggcacaaacggcaacgagttcgccctttcgaccgacgggatgaaagaggccgtagcggccaagggttacacctacacgccctcggtatatgcccgttacgaaggccatgtcaagctgggtaagatcgccaacatgggcgccatcacgatccccgcgctcacgggcatcgacgccggcaaggccgcgacgctgctcgtgcagttcgacgcagccgcctattcgtcggcaggcggcccggtggacaacggcgacgaccacatggacgtcacgatcgaaggccccggcacgatcggcgacctggtggaaacctccgcgctggtcgaagtgaagaacgtctgggagtggacgcgctactcgctgatcgtctacggcgctacgaacgaaacccgcatcaccttcggcagcgagcgcgaagtgaagtgccgcctctacctggacaacatcaccgtgacgcgcgccaaggacgagaaccccgaagccccggctccggaggcactcgtaaccccgctcgacaaggagatcgtcaatacctccgatgcgagcctcttcgatgccaacaagatggtggtcgccgaaggcggcacgctgatctgctcggtgcgcgtcaacaaggcctggacggcggagaccgactgcgactggctgacgatcaccaccgtacgctgcggcgacgcagatccgtcgacggtaacgggcgccaacaacggcgcatcgctctcgaacggtgtggcgaccgtcaaggccacggggctgccctacgtcaccaccaaggtcgaagtaggcaggaactccggaggcgaaagccgcacgggccatatcatcatcaagtcggaaggcgcagagatcgagaaggttgctgtcacgcaggcttccggggcacagatcaccatcgaagggctgacggacaatacgctggagctcagcgacaaccccacagaatcgggtgccgaggtgaaattcacggtcaacgccccctatccctggacgatcgccccatcgggcgctgcggcatggtacgaggtgagccccgggcagggtgccgccaacaccgacgtggaggtaacggtcaaggcgcttgagcagaacctctcgttccgccgcttcggcgagtttacgatcacggcggccgagggcgatgcaacccttaccgagaagatcgcgctttcgcagcagcccgtatcgcccggaacggtgaaatgggacttggcgtctcccgtacaatggtcgttctcggaagaggatatgggcaactacgcccaggacttcaagggcgggcccgacagcccgtacaacacggtgctggcccaatcggggccggggtacctctcctatacgcacacggcaccgagcgatcccgacaagaaatgcgaacgcatcgtcggcagtacgggccatccgtacatcacgggcggctggccgggcgactactggacgttcgccgtcccggtgacgaacctcgacgcaggcaccaaagtccgcttcacggcgatcacccgcacctcggccaccggccacaaattctggcggatggagtacaacgacggcggcacctggaaacccgccgcggcattacaaacgaccacggaaacgggggaagaggtctcctacacccacgccatgaaagccgacgggacgacctacatcacggtcgacgtgacggtcacctatgccaatgcgatctccggcggcaacatcgaattccggttcgtctgcgcagccaactggcaggccaacggcaagggcgcactcaccaagcccaacggcggaacgatacgctggggcggagccggaacggccgacagcccgagaatacagatcgtaccctaaaccgaccttgacggctgcggccgcccgcaggacgaccgcagccgttcgacaaaaaaaaccgaattaaaaaatcaacaatatgaagcttaaaacatacatacggaatgctttggcaaccgcggtaatgttgctggtcgcttcggccgcctgggcccaaagccgcaacatcacgggcatcgtgttcgacacggacggcaaaagcccgctcgtcggggccaccgtcatcctgaaggggactgcgacaggcacgatttcgaacgcagacggaacctatacgatccatgtgggcagcgacaacgacgtgctggtcttccagtcgctgggctatgacccgcaggaggtcacggtcggaagccgcaccacgatcaacgtcacactgaaagaatcggcgcagaagatcgacgaagtggtcgtcacggccctcggcctgacccgctcggagaaatcggtcggctatgccgtttcgaaagtctcgggcgacgaactcaccaaatccatatcgagcaactgggtgacggggctcaacggcaaggtcgccggtatgtcgatgtcctcggcgggcaccggccccggcggtacggtacgtgtgacgctgcgcggcgacacgtcgctcaactacggcgccaacgaagcgctgttcgtcatcgacggtatcccgatgagcaacggctcggtagcatccggttcgggcgccaactacgccaacagcaacgccccggtggacttcggtaacccgatctccgacctcaaccccgacgacatcgagaacgtctccgtcctcaagggccccgccgcagccgcgctttacggttcgatgggccagaacggcgtggtgctcatcaccaccaagtcgggccgcgaacagcgcggtatcggcgttacctacaacggttcggtgaccttcgagaccgcaggcttctggcccgaattccaggaggaatacggcccctcggccgtcaccacgtcactcaccaaccgcgtcgcatcggcatggggccttcccggcacgatgacctatgacgggcagcccgtccgccagcagatttcgcgctacacgtacggcgagcatttcgactccagcaagctgcgctacctctacatgtcgaagaactgggagaccggggagttcacccccctgccgtgggtatacgccgacgactggttcaccggcctcttcgaaacgggcgttacgtggagcaactcggtgaccatcgacggttcgacgggcaagggtacgagcacgcgcttctcgttcaccgacctgcgcaacgactggatcatgcccaactcgggctacgaacagcagaccttcgcactggccctgaaccagaagatcagcaaggccatcaaactggcggcaaaggtcaactacatccgcaagaacagcgacaacatgcccatgtcgggttacagccagggttcgcccatgtacggcctgatctggggctacaacaccaaccccatctcggcttaccgcgacgagtacatgcagggccgttatacctacgccaactacctggcaggcagtggcgaggacaagtacaacaccacttcggggcttatctacaacagcctcgagggccacaacccctaccgcacgctgtacgaggagctgaacaaactggatcgtgaccgtatcttcggcaacgtgagcatcgacttcacgatcctgcccgagctgaccttcacgctgcgcggcggcttcgacgccaatatcgaatggcgctcgcagcagaaacccttcatgtcgctcgacaaccgctacggcatgtaccgcgagaagaccatccgccgctacgactacaactcggacttcctgctcaagtacaacaagctgtgggatcgcttcggcgtcacggcggcgttcggcggcagcgtcctgcgcaacaagtactactcgaccaccatcaccgcctcgcagctgagcagcgaaggccccggcatgtattcgttcgccaacgccgcagtagccctcgacacgtcgccctaccgcagcaaccggcagaccaacagcctttacggcttcgtcaacctgtcgtgggacgacacctacttcctcgacctcacggcccgcaacgactggtcatcgacgctggctccctccaactggagctatttctacccgtcggtatcggccagcatcctgctcgacaaggcgttcaagatcaactcccctcatgtcaacatgatcaagctgcgcggttcgtgggcacaggtgggtaacgacacttcggtcttctcgctctacgacgactactcgaccacggactatccgggcggcgtcacgctgcctacggccagcaactacccgtacatcctccccgaaaagaccagcagctgggaagtcggcctggaaaccaagttcctgggcaaccggctcaatgtcgacgtggcgctctacaagaccagcacccgcaaccagatcatcagcgccgaaacgagcgccgaaacaggcagtacgtcccgcaagatgaacgccggcctgattaccaacaagggtgtcgaggtcacgttccgcatggttcccgtccgcacaaaggacatcaactgggagatcaacggtaactggtcgctcaacaagaacaaactcaacgagctgcagaacggatgggatcccgcaacgccgttgcagacctcgacctcgacgaccatcggcagccgtatattcgtctactcgtacgtgggcaagtccatgcaccagctctattcggccagccactacgagtacgcaccggaaggctcgacctacacggacgaaaacggtaaccaggtcgactgctcgggcatgcagatcatcaacgccaagaccggctacccgctgctgaccaaggagaccgactccaagaagttcgagcacctgggcagcgtaatccccgactggaaggcaggcttcggcacgacgttccgctacaagaacctctcgctgagcgcgcagttcacagcgcaggtcggcggcgtagcctactcggtgaccaacttcgcactctcgtaccagggcaaactgaagaactcgctcgccggacgtgacgacggcctggttctgcaaggcgtcaacgctgtggacaacggcgacggcacggtttcctaccagaagaacaccaccgtcacggagaacatctacacctactaccaatcctacaaatgggtgcgcgacaacggccgcgaaaacacgttcagcaccgacttcctcaagttcaaggaactgcgcatcgactaccagctgcccaaacacctgatggccaagacccggttcctgcagggcgcgtcgatcgggttcttcgccacaaacctcttctgcatcaccgactggccgcagttcgaccccgaggcggcaggtctggtcaacggtacgaacatttaccccggtatcgagaccgtcaccttcccgatgacgcgtacctacggtatcaacatcaaacttcagttctaaaactgcaaacaccatgaaatacgcaaaacatatcctgatactcgcgctgctcgccgcatcgggcgcatgtacgaacgatttcgaggattacaacaccaatccgaacaaacaatcggaagggtcggtagcccccatcgcactgctcgaaccgctgatttacagctccacgaacagctattcgtcctacatgctgagcatcgccaacgaaatttcgcaggtcaccgtggccaagtcgacaccgcgccgcgaacactgctacaaccttgccgacggcaatttcaaggccatctggaacctcgggtacaaatgggccggcaatgccaagcacatgtacgacctggccgtggcgcagaaccagcccaacttccaggccatcggcctgacgctgaaggtctataacatgtcgatcctcaccgacatgttcggttcgatcgcctaccgcgaggcacttaagggcagcgagggcatcaacaccccgcatatcgactcgcagcaggaggtctatacggccatgctggaggagctcgaactggccaactcgctctacaacgccagcctggggctggacgaccccaccaaggacggcatctacggcggcgacatcgccaagtggcagaaattcaccaacacgctgcgcctgcgcctgctgatgcgcgtgagcggccgtaacaacgccttcacccccacggtcggcgagcagatcaaccagatcatctccaacccaggcaaataccccgtcttcgaatcgaacgacgacaacgccaccgtgaagttctccggcagcgcggagtattacaagacctatttcaactccagttcgttccccgacgacaagagcctgtcgagcgaccaccacatcgccgcacagctgctcgacctgctctacgacgcttcggacggcttcgtcgacccgcgcctgcgcatctggatcaagccccgttacgtccagtatcccagtgcgaccgagcccgacgtgatccgcgaaatgatcggcgccgtctcgggctgtacgatcaactacaacggcatcacctccatcagcgaacgcgaaccctacctgcattacgaaacgctggtgggcgacacgcgccccaaccacatgctcgactacgacgagctgctcttcatcaaggccgaagcagcgatgaacggctggatatcgggctccgccaaggagtattacgaagcggcgatcaccgcgtcgtgccagaaatggggcgaatacggcatttacgcctcctaccccgaactcaacgcgtcgaacaagatcgaactgaagaccgtagccatcacgcagaagcacatcgccgcactgctggcgagcgaccacgtaaaatggaacaatacccagcagcgcctcgccgagcagaaatggctctcgctgttctgggtcatcggcttccagatgtaccacgaaatgcgccgcacggggtatcccgagtgcaagaccggcatgggaacgatcgagctgaacgccacgggcggaaagttcatcgcccgctatccctatccgtcgatcgcgatcgccaacaaccgtgcgaactatacggccgcattcgaggcacagggcggtaccatcaacgacaacaccatggtcttcccgatatggtggagcggccaggccgtcgccaaggatgccgggcagccgtgggaacactcgttccgcaagaatgtcatcgccgaagagaacctataatctaaaaacgaacgcactatgaacgcgaaaaacataatccgcaacatgaggggcctggccatgtcggcgctgctcctgatcccggcggccttcgtctcatgcagcgacgacgacacggagggcggcagcccctacttccggctggagaataccgtcgtatcgagcaagctggtgaccgcctcctccgacctgggtttcgacgccgaagccatcatcggcgacgccacgctcgaactgatccgttacgacatccgttcgaactgcaactggagtgtcgaatgcaactccacggacggagactggatcaaattctaccccaagacaggccagggcgacggcaaggtacgcttctgcctggacgataacgacgccaacaccccgcgttcggcgacggtcgtattccgctatgcggacggcaggcagaccgaaacgaccctcgtcgtcaaccagagcgccaacgaaccttacatcaggttcgtcgtcaacaacatcgagacgaacgagatcgtagcgggacgctatgccgcccattacgacatcaaggtcgcgtcgaacgtgacgccgttctacgaacccgaaaaagccgaatgggcaaccttcaccgagacgggcaacgggactttcacgctcgacatcgaggagtatcccgagcagccggcatccctgagccgtgatttcagcatcgccttcaagggcagcggccagtacaaggacatcagagccgacctgaacatcctgcaggacatcacgccgcagatcgagattacgagcgaggacatcggcgacgacctggcactgcccccgttcccggcctaccagcccaatgcattcaccttcaaggtgaaatccaactgggactggacgatttcggttgccgagaacgcatggatcgaggtcacgccctcggccggcgaagcggacaaggagtatgtcatgacggtgaaagcgaccagcaacctctcgctcgacgaacgctccgcttccttctcgatcatctcggacgaggtgctcggcaccaaagccgtcaaggagatgttcgtgacacaggaaagcctggcggaaggcgggccgctggaaggtctggacgctccggtaaagtggttcttcaacggtgcctcgggcacggactacacggttccgaaagagcagttcgagcagaacaacaagctcatggcctcgtcgggcgtaggctatatctcctacttccacaccttcaaccccgacggcagcctgcaccccaacagcacgcgcatgatcggcggtacaggacagccttacgtcacgggagcatggaagggcgactactggttattcgaagttccggtcaagaacttcaagtcgggaacgaaggttcgttttacgggtctcacacgtatctccggcaccggacagaagtactggagcctgcaatacatggacggtacgagctggaaaccggcgaccgacacacagaccgcaaccgtcaacggggaacagattacctacacgcatctggtaccgacggccaacatgcagatcgacgagacaatgaccttcgcacgcggtatcagcgacggcagcgtcaagatccggttctattgcgaagccaacaccacgggcggcacggaacccaacggcggtacgatccgctgggcaagttccgccgataacgggtacaacgacagtccggtcattcaggttgtcgaataacaccgttcgatccccataccgaagagggaggcctgaaggcctccctcttcttttattccgccccgggtggcaacggcgatggcggtggtacaggcctccgaaggccgggcccgccgggcccgaggcacatgcctttccgtccaagccgtgaatggcgccccggagcatatcaggcggcggagagggacgcacgggcgccgacacggacacacaacacgcgggcacacgagttcaagactcacagcgcacggcgctggacacccggttcacggcgcaaggcataccggcacacagtacacaattcacggagcaccggagcatcagcgcacagtacacaattcatgacacaccgaaaaaacggaataccaacgcacagcacccggttctcggagcacggttcccagagcacaggacacggatcataggtcatgacacacggacgcaactgataaccgctacgcaccgccggaaacgccgcaaaaaagggagcctatgaaaggctccctttaatatctgtaccaaagtcgtcagttgatgttccgccggtcgggttcgtggtcgggggaagcggcttccatgtcgatctgcaacttgaccatgttgatggctgtcgcagccgcttcatcgcccttgttgccgtggcggccgccgcagcggtcgagcgcctgctgcatgtcgttgacggtcagcacaccgaatgcgatcggcatgttccactggatctgcagctgggtgataccctgcgtcacgccctggcaaatgaaatcgaaatggcgcgtatcgccctgaatgacacacccgagcgcgatcaccgcgtcgacatcggtatattcggcgaaaaactgtgcgccgagcgccagttcgaacgtcccggggacatatttgatctggatgttcaggtcggggcatccggcggcacgcaacgtgcgcacggcgccttcgagaagggcttcggtgacctcgcggttccactcggccacgacgatgccgaaccgcatctcggcggccgaaggcaggggtgaatcgaattgggaaaggttatgcttcttggtcgccatagtctccggttattttatgctgccgagaagtttctccgcgtcgcgtgcgtccatcgacgccgggtacgaagtcagtatctgctcgtagtatgcggccgctttcgcgccgttgccctgggcctgctcggccaggccggctttgcggaggtacatcggagcggtgaggttgttgtcggcagccgctacggctttgtcgtagaatttcacagccttggcatagtccttctgctcgacggcaatgtcaccctgcaacccgtagttctgggcgttgatcaatgcgcccgggataccctttacgggcgaatacctggccaggaatttggcagcattctccaggtcgccggccttcaggtaacagatgccggcgtagtgtttggcaaggttgcccgaaggggtcgagccgtacttctcgatcacctcgaggaatccggcgccgttggcatcgccttcgagtgccagcgcatagtccgcattctgatcctcgaaacggtactgcgcctcggcgatcatttcggcggccttctcggcacgcggcgacacgatcagtgcgcggtagccgaaaacgagggctgcgagcaccagcaatccgaggaaaacatacgacaacatacggccgttcttctcgaagaaaaactcagttttgttcattgcttcgccaagggtttcctgctcggcgacatgctgttttgccataaaaatctatcttgtttagtttataattccgtacgttaggcagcaaagatacaaaactattcacaatgtacaatgccgcatcccgattttttgcgactcgggatacatgcgacgggcgcaatgcccaaataaatttggcattgcgctcggcttgcactatctttgaaccatgtatctgaagaaaatatcgctgctcaacttcaagaatatcgcacaggaggaactcgccctgtgccccggcatcaactgcctggtgggcgacaacggggcgggcaagaccaatgtcatcgacgcggtctattacctctcgatgtgcaagtcgtcgctggcgatgaccgacgggcagagcgtccgccacggcgcggatttcttcctcgccgaaggacagtacctcaccgatgcgggcaagacggagagcgtcgtgtgctcgttctcgcgcaagggcggcaaggtgctcaaacgcaacggaaaggagtacgaacggctgtcggatcacgtggggctgattccggccgtgatcgtgtcgccggccgatagtgcgctcatcagcgacgccgcggacgaacgccgccgctacctcaacggcttcatctcgcagctcgaccgcacctacctggccgccgtaatgcgttacaacggcgtgctggccgaacgcaaccgcctgctcaagaacatgcccgacgaaacgatgctccgcatttacgacctgcaactcgtcgagcagggcaaccggatacacgccctgcggcgggagttcacgcaacggctgcaacccgtcgtcgcggactattaccgcaccctctcgggcgaccgcgagcaggtcgaactgcactacaagtcggagctgaacgaccggccgttcgacgaactgctcctcgcggcacggcagaaagacctcgccaacgaattcaccacggcaggcatccaccgcgacgacctggtgctgaaaatcggcggctaccccctgcgcaaatacgggtcgcagggacagcagaaatcgttcctgatagccctcaaactggcgcaatacaccatcgtcgcccgggaaaagggcgaaaaaccgatcctgctgctggacgacctcttcgacaagctcgacgccgggcgcgtggagcagttgatccgcctcgtgtccgaagattcgttcgggcagatcttgatcaccgactgcaaccccacacggctgcgtacgatcctcgacaaggcgggcggcgaatatgcgcttttcacggtcgggaacggggcggtgacgcaggggaatgcaacggcaacggctgccgcggcaggcccggacaaaggatcggccggaagccggcccgggaatgcggtaacggacggggctgcggaaccgatggaggaaaaaataccgggacagaccgggactgcggccgcggatcggacagaagggcaagccggggaatcgccggcgggagaacccgcgcggcggccttcggaaccagtcccggcaccggagcctgccgaagaaccggcagcagaacccgacggcaacggggcacgccccagggatgcagcatcggaaggaggacggccatgagacggacgaagaccatgctgatgggcgacctgctggaggagtttttcaaacgcccctatgtcgccgcgaaagtcgccgaagggaaactgcccgacacctggcgcgagatcgtgggcgaccgcgccgcggagattacgaccgagctgaaaatcgaaaaccacatcctctatgcccgcatccagtcgagcgtgctccgctcggagctcttctaccagcgcgaggcgctcaaggaggagatcaaccgccgctcgggcgtgcggctggtcaatgccgtgattatcaggtaaaacacacagccgacaccccggaatcagcacaagaaaaaggtgcaggacaatcctgcacctttttcttttctacttcgggggaagcccgcagcctcgctcccgattactggatgatcgcggcacgattggcggcctgaaccttcttgaacggatcgggcgagttgcccttgccctcgtaattcagctgcttggggttgacgcccttcgatacgaggaagtcgaatacccgcttggcacggtgctcggcgacacgcttgtttccggccttggttcccgtctgctggtcggcatggcccacgatctggtaaaccatgtcctgcgggccgttcttgatcttctcggccaccagctcgaggcgggtcttctcctgcggggtcagccacgacatgctgtaatcgaagaggatgatcgaagtatcggctgcaacctgctcctcggcggcaacgacggtagcggccgcggcggcagtagctgccgcagctgcggcatcggccgtggcggcgagctcggcctgcgaggcggcaagctgctgtgccagctgggcattctcgacctccatggcggcggcagcggccatgctggcggctacggcgtcctggaaagcctggatgtccgcaacggtatagcccgcaacaccgcgctgccagccgcgcttgttaaagcggtaggtgaaacctgccgtagcgctgaagccgaacaggtaggagccatccatcgcaacggggctgacccgcgaaggcgctatcagccctttgagttcgatattgaaatcgaacgacggcgaaatgcggaacttgttgagccagcccaaagtgaacgcgaacgactggtgcgtacccgaaccgttgttctcatggctcttgtcggtgaagttcgaagccatatatccgaaaccggcgaacggcacggcatagtaggcacggtcttcacggtaacctcctgcccagttggagaagttgagcatgaaatcggcatgcacgaacaaatagggccatttcgccttgcccagcacatcgtcgaaattggcgaactggccgccctgcaactgaaggcgcataccggtcaccggatggaaccatttggtaaggccgaagttggcctcgaaattaatacggtcgccgaaactcccctggttggtaccgttggaaagggccgtaccggcaccgcccccaagcgtaatttcccagttatcccagaaaccgttcgacacgaaaccggcgaagctcggttttttgggcgtgtcctgcgcccacacagacgtagccaatgccacggctgccaacaatagaataagttttttcatggtcaataatatttaatcccaataataaagtttctcttttcccgaaaccgttaattgacaggtcatagcacaaaaacagcgccgaacccgcacaaaaaaggctggaaacgtatgtttccagccttttaagctcaggattaaatccttacggaatcaaccgcacttcgaataaccgcacgacatgcacgtaaggcagccgttctggtaggccatattctcctgtccgcagctcgggcacttgcctttcgacttggtgccgtcgacgatatactgcttcaaggcgcggcagacgcctgtcttccacgtgttgatcgactcgctgttcaggtggagcgattcgatcagcgagacagtcttttcgatcggcataccgtggcgcaggacacccgagatcagtttggcgtagttccagaactcctcgtcgaacagacgcgagataccgccgatggtattcgtatagccgtagcggtcagtatactggaagtcgtaacgcttggtgccgtcctcctcgcgtacctttataatatagcccttgtcgatcttgcgggggatatacatggcatcctcctcgatcttaccggtgaaaacctcgtaggggcggccgtcctgcaggcccacgaaggcgatccagtcctcggtgccgttcttgaaacgcacgatgtcggccgggatcgacttgggacgcttgggcacctgtccgggatgctcctcgcacttcggcttctttttggagcccttttcgagcagcacaccgtcgcggcagccgtcgcggtaaaccgtgacgcccttgcagccgcattcccaggccgtgcggtaaacctgcgctacgagcccctccgaaacattgttcggcaggttgacggtcaccgagatcgagtggtcgacccatttctggatcgcaccctgcatcttgaccttggccacccagtcgatgtcgttggccgtagccccgtggtagggcgaagcggccacccactccccgagctcctcgtcggagatcgttgcgagcttcgacgtgtcgtatccgttcgcctcgagccacttcacgaagttgtggtggtagacgttgtattcctggaacttttcgcccgtttcatcctcatagtccacatgcgtgtccttgtcggaggggttgatcttgcggcggcgtttgtagaccgtgcggaacaccggctcgatgcccgacgtggtctgcgacatgagcgacgtggtacccgtgggggcgatggtcagcatggcgatgttgcggcggccgaccttctccatctcggcgtagagttccggatcggcctcgcggatgcgggcgatcatcggattgtccttctccttggctgcgtcgtagaccgggaaggcaccgcgctcggcggccatcttcaccgaagcccggtaagcctcgacggccagcgtcttctgcacctcgacggcgaatgcgatcgcctcctcggaaccgtataccagtcccagtgcggcgagcatgtcgccttcggccgtgatgccgaggcccgtacggcggcccttctgcgccatgccgaggatcttcttccacagctccagctccacgcggcgcacgtcctcgtcctcggggtcggcggcgatcttctcgatgatctgctcgactttttccagttcgaggtcgatgatgtcgtccatcatgcgcatggccatggccacgtgcgaccggaacttatcgaaattgaacttcgcatccttcttgaacgggttgtccacatagctcagcagattgagcgccagcaggcggcacgaatcgtaggggcagagcgggatctcgccgcaggggttggtcgaaaccgtcacgaagccctcgtcggcatagcagtcgggcacgctttcgcggatgatcgtatcccagaacagcacgcccggctcggccgacttccaggcattgtggatgatcttgtcccaaagcttccgggcgtcgatatcctgctcgtatcgggggttgtccgaattgatcgggaattgctggtggtatttcttgccggcgatggcggcacgcatgaactcgtcgtcgatcttgatcgaaacgttggcgcccgtgaccttgcccgtgtcgaccttggcgtcgatgaaacgctcggcatcggggtgcttgatcgacagcgagagcatcagcgcaccgcggcggccgtcctgcgccacctcgcgcgtcgagttggaatagcgctccatgaaaggcacgatacccgtcgacgtgagcgccgagttgagcaccgggctgcccgtgggacggatgtgcgagaggtcgtgccccacgcctccgcggcgcttcatcagttgcacctgctcctcgtccatgcggaagatgccgccgtaggagtcggccggatgcttgtgcccgatcacgaaacagttcgagagcgaggccacctggaaattgttgccgatacccgtcatcgggccaccctgggggatcacataccggaaatgatccagcaggccgaagacctcctcgcgcgacatcggattgggatacttgcgctcgatgcgctcgatctcggctgcgatacgctcgtgcatctgtcggggtgacgtttcatagatattgccgaaagagtctttcagggcatatttgctgacccataccgtcgcggcaaggtcgtccccgtcgaaatactttttcgactcggcaaccgcatcgttgtaatcgactttctgcggcgcttcgggttttacggctttagacataactgttattgcttttatttcagatttttagcgtcgatccgggcgaaacccggttctacaaaattcattcttttctatggaataacccaatgcacggcaccaaacttatccacaaattatttacaaaaaggtaaaacatgcgccccacatttatggggcgcacatttgctgcggacgggatgtccggcaacggctatttcgccgcgacggcgtcgatctcgaccagcgcccccatcgggagtgcggcgacctggtagcatacgcgcgcgggcattcccgaggtgaagaacccggcgtaaacggcattcatcgcggcaaagtcgccgatgtcctgcaacaggacggtcgtcttggccacgtcgccgagcgtatagccggcctcttcaaggatatggcgcaggttggtgagcgactgccgcgtctgggcctcgatgccttcggccatcttttgggtcgctccgtcgatgggaagctgtcccgaaacatagagcgtgccgccggcctccacggcctgcgaataagggcccacggccttgggggcgtggggcgatgcgataatcttcttcatagcggggtgtttttcaaattccacacaaagataagatatattccgtatatttgcacaacacatttaagaatatgctatgaagattttgctgaaaatcgcggttatcgcatccgtagcggcactcgccgcgggttgctgcaaatgccgctcctaccagaagaaaactcgccggccgctcgtcggcaccgaatggcagctcatacagttggacggcagggccgtcaaacccgaagagggcaagttctatgtgatgttcctcgccgaagagaaccgctttgcgggggtcggggcctgcaaccgcctgatgggcaaatacgaaaccaccgacaagggcgcgctcaggatcgggccgatcgcctcgacgatgatggcctgcccgggcatggaacaggaggacgccttcaccaaggcgctcgaagccaccacgcactacgatatggacgggccgatgctgctgctgctgagcgacggcgaactgaaagccgtattccaggccaaaccctgaaacagcggtcggagaaaatcggaaacaggggccggttcaaatgaaccggcccctgccgtaacaagatgcatccgccgcctatttcaggtgcgggttcaggccgcgccactcttcgacgggcgggatgatccccatcgagatcacctcgtcgcgcagtttgcagaggtgcccgtagctgtcggcaagagccttgttctcctcggccgtaccctgcacgtttttgtagctgataccgtccttcgtgatttcggtctccatcgccatcaggatatgcttgaaccggtcgttgtgtacgaacacgccggccggatagccgaacggcctgccgcccattgccgcggcaatcatgcagatcgacaggtaggccgggctctggaacgacgaacgtccgcgcaggtcgatgatatgtttgccgccctggatcacccgctgttgcaggtcgtgccagtcgccttcgggcatctcgcggccgatcagctccgacagggggcgtccggcaacgagcgtcgtcgaagcgaagaccgccatctgctcgccgtggccgccgtaggtgcggcagttgcggatctcgtcgggcgaaatcctgaaatatttggccagttcgctccgcaggcgcgtggagtctagcgccgcgagggtcgaaagctgcgacgggcggatacccgcatagatgagcgtcaccagccccgtgatgtcggccgggttgaagaccacaacgacgtgtttcacgtcggggcagtaagccttgatgtccttgccgaactgtgcggcgatctcggcattgcccttgagcaggtcttcgcgcgtcatgccggccttgcgggccgcgccgcccgacgaaacgacataggccgctcccgagagcgcctccttgacatcgctcgtccaggtgatgttcaccccttcgaacgcacagtggtaaagctcctcggccacgccctcgagcgccggagcatagggatcgtaaaggcagatgttgggcgtaaggcgcatcatcagcgccgtctgggccatgttcgagccgatcatgccggccgcgcccacgatcgtgagcttgtcgtttgtcagaaattccataacagaaatattttacattggtacaatcctgtacccgggtcttacttgcaaaaaaacgggcgacagttccggccgtattccggcatatgtcgtgccgcaaccggggatgccccggaatgcgccccggccgcaggtcattcgacctcgcggcggttcagcagggcgtgcgtgatggtcagctcgtcgacatattccagttcgtcgccgaagccgatgccgcgggcaatggaggtgactttcaattccgggaactgccggaggcggttcatcaggtagaagagcgtggtttcgccctcgaccgaggtggagatggcgaggatcacctccttcacgccgccgcgggcgatgcgttcggtcagcaggtcgatcttcaggtcggagggcgaaataccctgcatgggcgaaataacgccgcccagcacatggtacaaccccttgtactgccgcgtgttctcgaccgacagcacgtcggccacctgttcgacgacgcagatcgtcgtatggtcgcgctcgtcgtcggcacagatcgggcagacttcctcgtcggagaggttgttgcactgcgtgcaatatttgacctcgttgcggaaacggtcgatgctttccgtcatttcggcgaccgattcgcgctccatccgaaggatgtggatggccaggcgcagtgccgtacggcgccctatgcccgggagtttcgacagctcgccgacaacgtcctgtaaaagcctcgacattcagatgatttcgattttgcgtccttcgacccaacccttcttgccgtcggcgattacgacctcgcaccacccgtcgaggcggtcggtgatcgtcacgaccgtaccctcgtgcagcacgaagaggtcggtcgacgacttgtcgggcgaactcttcaccgccgtggaggcggtcatcaccacggccgaggtgtcgtcgagcatctcacggcgttcccccacggcgaaccacgtggtcagcatgaacagcagcgccgcgacgaccgtgccgtagaaacccgccttgcgcagcgaaatgcgctgtgccagcaggtagaccaggaacagccccagcatacaggccagcaatgcgagcgaaagcaggctccacgccgtgcatcccatcatgtggcggatgtcgcgcatccacgtgacgaagaagaactcggggatatcttcgatgttgtctttggtgcgggcctcggcgacgctgaggttgtaacggatgtcgtcgttgcccggcgcaaggcgcaacgcccgattgtaatagaggatggccttgccgatacggtcatccttgaaataggcattgcccaggttataatagagtttcatggagctcaccccgcgcgaaagcaactcttcgtaggtatcggcggccgcatggaaatcgccgttgatataggccgtattggctttgttccacaactgctccgcagtctgctccccgggggcctgcacctcggcagggacttcccgcgaaacctgttgcaggctgtcggcaggctcctgcgcaaaggatactgcggccaggcccagcgacaacagaaaacacaagatcattcgtttcatggcgttcttatctttttatcaccgcttcgatccgggaaatgatgtccacgccctcggcgtacacctcgctcatctgtgccgatgccgcgggcgaatactgcgcctcgtcgcacttggtgatgatggacgtgaagcgctgcgactcttcggccgacacgccgcgcttgtgcagctcctcgcggacgttctccttggtgaggttggccaccgggatgttgaacttgtcgcccatgtatccccacagtgcccggagcatctcctcatagaaggcatggcggttctgctcctccatatagcgtttagcgacccggaaacgctgcacggcgaccttgttggcacgcttgccccgcaccagtgcggcgttctgcgactcgcggatctgcttgcgcagcgccacgtagaccgccgtgaagaaggccaggattccgaagagtagcacccagtagaccgcaccgaaaaggaacggctcgcgtaccgggcgcaactgcgcgttgcccagcttgatgaaacggatgtcctggccgagcatcttgacctcctccttggacatgccgcgtccctgcacgacataggcgtcgcctccgccgcccttggcatcgggcgtgatctccagttcgagcggacgcgagcgcagcgtcatgtactgcatgcgcgccggatcgaaatagctgaattcgacgggctcgacttcgtacgtgccttcggcgcgtgcgataaaggggtattcgaactggcggtagccggaaatcccggccgccgaggcgttgatcgactcggtcgtcttgacgttatactgctcgaacgaggcgggcagcgtcagcttgggtgcctgcacgaacgtgaggttgcccgtacccgagatcttcaccgtataggtcgccgcagaattggctgccagccggtcgggcggcagcaccgcatccatcgcaaaactgcctacggcgccgctgaagctggcaggagcgcccgccggcagcggtttgaccgtgacgtttatccgcgggctctgcaccttgcggggtacgttcacgaaatcgtgcccgcccccgaagaaggggtcgaggctgcggcggctctggatgacgacctgcgccacggcggtgatctcggcaggctcgatgacgagcgtaccggcctgctgcggatagagcaggtactccttggccacgagcgtctcgtagacttttccgttgaaggtttcgcgttcgcggcgggcgttctccgtattgagttcctgcgcccagaagccgttgaacgaagggaatttcacctcgttataccccactaccggaacccgttcgtaaagcttgaaggtcacgcgcagcggctcgcctttgaaaaccgaagtccgcgacacgatggcccgcaacaggatgtcgtccttggcgacccgactctgcgccgcactctcagaggaggcttcctcgcggcgctgcggctgcccgccggcggcggaaccgccgcctcccggcgccttgccctcatccaccacctcgatcgccagcggcttggtacggtaggtagtcccctcgaccgtcacctcggccgcaccgacggtgacgttcccagcgccctgcggcacgagcacgtaggtgatcgtgtagttgataacccgcgtcatcgaattgttcacgatctggatcgactgtccctgcgcttcggccgggccggcgatcacgtcgaacccttcgaacgaaggagctttgaacgagcccggctcgggctgcgcgttcagtgcgaactccacgcggaacggctcgccgacagcgaccgtcagcggagaattagcctcaaaagtgatcttctcggcagccgatgccgagaagatcgccagcacgaagagtgccgtcagggatattttcgcaatgaaatctctcattgagctttacaataaaaccttctttcagattttacaacgtaaacttttgcccgttagtatatccgcgggccggtttttaatgcttgaaatcggcaaaaaaatcgttgcctttgtcatcgacgatgatgaacgccgggaaatcctcgacgtagatcttgcggacggcctccatacccagctcggggaagtccacgacctcgaccgatttgatggaattcttggccagtatcgccgccgggccgccgatcgaaccgaggtagaaaccgccgtacttcttgcaggcgtcggtcacctgctgcgtgcggttgccctttgccaccatcaccagcgaaccgcccagcgactggaacaggtcgacgtagggatccatacgcccggccgtcgtggggccgaacgatcccgaggccatgccgtccggggtcttggcaggcccggcatagtataccggatgtttcttgaaatattcgggcatcggcttgccctcgtcgatcatctgcttgatgcgcgcatgggcgatgtcgcgggccacgatgagcgtgcctttcaggttcagacgcgtcttgatcgggtatttcgaaaggatttcacgcaccttgtccatgccttcgtcgaggtcgatgtccacggcgggcgacatgttgggcgcctccttgggcaggaaacgcgcgggattcttctccagctgctcgaggaagatgccctccggggtgatcttggccttgatgttacggtctgccgagcagctcacgccgatggccacggggcacgaagccgcatggcgcggggcgcgaatcacgcgcacgtcgtgcacgaggtatttgccgccgaactgggcgccgacaccgctctgctggcagatcttgagcaccttctcctcccactccaggtcgcggaagcagcggccgccctcgttacccgaggtgggcagctcgtcgagatagccggccgaagccttcttcacggtcgagaggcacatctcggccgacgtaccgccgatgcagatggccaggtggtagggcgggcaggccgacgtaccgaggtcgaagatatgggtcttgatgaaatcggtcagcgatttctcgttcagcagcgccttggtctgctggtagaggaaggtcttgttggccgaaccgccgcccttggtaatgaagaggaattcatactccatgccggggtggccgccgtaaatgtcgatctgcgccgggaggttcgtaccggaattcttctcctcggtcatcgtgaaaggcacgacctgcgaatagcgcaggttgcggtctttgtaggtctcgtacacgcctttggcaatatatttcgcatcgtcggcgcccgtatagacgtcctcgcccttgtggccgatgcagatggccgtgccggtgtcctggcacgtggggagttcgccctcggccgcaacgacctggttgagcagcatggtgtaagccacgaacttgtcgttgtcggtggcctcgggatcgtcgaggatgttgcgcaacttctgcaggtgggcggcacgcaggtagaacgacacgtcgctgtaagcggctttggacaagagttcgaggccagcggggtcgaccttgaggatcttgcggccgtcgcattcgacgactttcacgtaatccttcgtcaacagacggtactgggttttgtcttccccgacggggaacggctcctgataaatgaaatcagccataatcgtgatatgttttgtgtttgttaatgtccgtttgtcccgtgcccggcatgccgcgcggcgcttttccgcaggcagcccctgcagccgggaggcatcctgcgccaccctgccgcccgcaatcaaccgcatgcaggccgcaccgggcataccctacccgcacaccggggcttaaggccatgcaaaaatacaaaaaactatccggattgcacaacaatttcccgccgactgttattattttcacaaaaagagaataaaatagccggatcggacgcaattaattagaatttttattaaatttgtgcggtttttcgagacaaacaattcactgcataaattaaattattatggtatcgtacaaagaattgggacttgtgaacacccgtgagatgttcgcaaaagccatcaagggcggttatgccatcccggcattcaacttcaacaacatggagcagatgcaggccatcatctcggcttgcgtggaggcttcgtcgccggtcatcctccaggtttcgtcgggcgcacgcaaatacgccaaccagacgctgctgcgctacatggcacagggcgccgtcgagtatgccaaggagctgggcaaaaacattcccatctgcctgcacctcgaccacggcaactcgttcgaactgtgtaagagctgcatcgacatgggcttttcgtcggtgatgatcgacggttcgcacctgccctacgacgaaaacgtagccctcaccaagcaggtcgtagactacgcacaccagttcgacgtaacggtcgagggtgagctgggcgtgctggccggcgtggaggacgaggtttcggccgagcaccacacctataccgaccccgctgacgtgatcgacttcgtttcaaagaccggcgtagactcgctggccatctcaatcggcacgtcgcacggcgccaacaagttcaagcccgagcagtgcacccgcaacgccgagggcatcctcgttccgcccgaactgcgtttcgacatcttggccgagatcgagaagaagcttcccggcttccccatcgtgctgcacggatcgtcgtccgtaccgcaggagtacgtgaagatcatcaacacgcacggcggtgcgctcaaggatgccgtaggtattcctgaggagcagcttcgccgcgccgccaagagcgcagtctgcaagatcaacatcgactcggacggccgtctggccatgaccgcagccatccgcaagatcttcgtagaccagcccgcagagttcgacccccgcaaatatctgggcccggcccgcgacgagctgaagaagctctacatgcacaaatgcgaaagcgtcctgggttcggccggacaggcttaatccgaaattcccgacagaaaaatcccggaccatcgcggcccgggatttttaggtaacggaatgtgtataaaagagtaagcatcatgatttcagacatttaacattttattctgcatgtgctccgagcaataaaaaagcaaaatcgggcaggtttaacggtgagttatgttacttatccgttacctgcccgaaatgctttgatttgcatttaaggcagtcgttttcagtttgttgcatcgaatttccgcataacaaataacttgacttaacgtttaacaaatcctcaaagttcaagttatcatgcaacgcagcactttcaaagtccttttctatgtgaaaaggcagtccgagaaatcgggtcaggttcccgtcatgggtcgtatcaccatcaacggcacgatgtcgcagttcagctgcaaactcaccgtccgttcctccctctgggatgccaaagccaacaaagcctccggcaaaagtctcgaatcgcagcgcatcaacgagaagttggaaaatatcaagaccaatatcggcaaacaataccaacgtctctgcgaccgggattcgtatgtcacggccgaaaaggttcgcaacgccttcctaggtatgggtgacgactgccgcctactgttacagaccttcgacgaatacctcgtaggcttcctcaaacgtgtgggcaaagaccgcgcctattccacctatgaggattactgcctgcggcgcaggcgtcttgccgctttgcacgaatacgaataccatgtcaagaacatttcgttcaaagagcagaaacgtgatttcatcgaaaaaatcgtcgtttacctctccacggtaaaaggccttgcttccggaacgatctgtgccgggggcaagaaactgcgtctgatgacctatacggcgtataagaacgggtagattcccgccgatcctttcgccgggttccatgtcaggcccaaatacgccgaacggcgttatttgtccgcttcggaattgcaggccgtcatggacgcagaattacccaactacaaaacagatatcaaccgggatgtcttcgtcttctgcgcttttacgggcctgagccattcggacgtagcaaagctccccacacagatatccatacggacgacaacagggatcgttggatcatcgacaaggatcggaaaacgggtacgcaatttcgggtaaaacttcttcccgtcgctgaaatgatcaacgaccgttataaagacctacatctggaaggtaataaagtctttccaatcaaatcctactatcggacgatgaatatgtcgctgcgtcaagtggccagacacgccggattaccgttcaacccgacaatgcacatggcgcggcataccttcgccatgacagtcacgcttgcgcaggaagtacctctggaaaccgtaagcaaatgctggaacataaacatatcaccacgacctaaatctacgcccaaattaccaatgacaagatcggccgggatatggcggcgttgagcgagaaactcgacagcatcttcaggggcgcgcagtaagccggcgcgatcccggaatagcgcatatctaatatcctcggaatttatttccacaggccggtaatttatcgccggagatggaaatacgcaaggccatgcgaatcgccctaggggcgagccttgcatatttccatccccggcgttttgctggacactaccgtcggaaaaggcggctttctgcggctcggacgctacccaacgggcgggctgctccacagcacgcatatctgaactctgatagtcgcagtctacgacaagcatgtcatgctgcaaagtgtaatgcaggtaactggcgagtgtaccgtgaaagtcgattttccgacgctgcctttctgattgcagacggcaatgtttataggggtgatgttcataatacagttaaaagatttaacaacttgcgtttggggatagccattctgtcaaattttgcacttttgctgcattcagaaatgcactctttcagaaattcagagtctatgaatatcctttattccgaaagagggaaaaaacaattttaacaacgaatttcgccccggaacaatcgccatcgcgccgacacgatatccttttaggatgattcgatttcatggctcacaaacgctttcttttattcctgccgtaatatacaacaggataaaacgcttcggtttcgatgtccgctcacgaccgcttcagtccgcaccgagggcttattttggcgcccgcacggttgtaatattgcacatggaaaagacccgtcttcgggagctgtagcggaggtttttcaaagttttcacaaaaaaaaatttcgccgcggattcttaccctcgccagagggtagcgagctatacctttgtccgacaaattagcatttgtccgacaaaggtgctcgctctgcgaggccggagtcgttcccgagactcaacccttttttaagccatatatggataccatccggaaagcccccctccgaaatgctccgaaaccgaaaactgcgagttacaagtactctttccggctcaatgaagagaaaaatatccgtttcaatgagttgctttgtaaggcaggactggagcataatcgcagccggtttatcgtaaaacgcatcttcgccgaggagttcgtagtcgtcaaacgcgacccgtcgaaagtgcaattcgtcgcccggctgaacgacttttatttccaaattcaaaaacggagaaacaacaagattgtaaaggctatcaatacgcacttatccaacgttgcgattccgcatcagatcgccgcattggaacaacgcacacgcgagttgaaagcccaaagtcacgagattctgaaccttgaaaacaagctaaagaatggttgcgaatataaggtcgggctcctcgcccggcggagccttgtactacaacaaggagaaagtagataaagacgaggcagaagtactcttccagcagaagatgctggaactatacgataaacgcggtgccttgatattgctgcctgcatggatagtttccggttcaacctcgaagccaaccgcaggactacgaacacggttttccatgcttcactgaatccttcgccggcggacaaacagaccgacgaaggactccgggacatcgcccgcgagtatctccatatcgtatcgctgcggggcggtgagaacggtcggaagattcgcaacccgcatgattatgaccgttccatgtccgtattgcaggagttgaaacggaaatacaatttgcatccgagcgtcaaaggtcaggaattaacggacacccccggacttcgaaaggtgaactataaggcggggaacgtcaaacaacaaatttcgtccgtcgtgcaatcatgcctgcgaaattacaaatgctcctcccacggtgagttgcgcacgctgctggagcagttcaacgtctcggccgaggagcacacgggaaccgtcgacgggcgaagttgtgccggaatcgtcgccaacggttcactgcagggcagggagttcacgaccaatgtcttcgacacattgcatccggcgccgaaaaaagtgcataacataaaacagcagcggattcggcaacgaaagagacgacaaaaacgccgaacgctgtaattttcaattataagataaaatcatttatccggcggtttgactgtatcgaatgtcgtcccataatgctgggacttctcttcgttccattccgataagtttgcttatggcatagagatcgcaatagtaaatatacttagaggttcgtcgaaggattcaaccaaatcagcgtatcttgaagcctttatgtgctatttgcgacacgggcgtgaaaacaagaaaatgcagatacagggagcggttcattctccgtgacggacctccggtcatgccttcggaggatatgtagggattgtttcctgaggcgatgttttcgggttttcgcagcctgcgtccggtcttcctataaaccgatttaagtataaccgaatgaaaacgacatcgatcacagcccggctcaattaccgcgccgacagcgagggctgtcatgcacttattattcaggtgatccaccgccgtcgccgcagtatcctgaccactccgtaccggttgcgtcccgaggaattcgacgcgcaaagggggcgcgccgtggcagtgaaccgcactaaatcccgccgcacgctgatccgcgaggcgaacgaatgcgttgcactttgcacggaagagctacgtgctgtctgcgcgcgtctggcagcctccggaaaaccttatacggcatcggacatcacgggagcatacaggtcgggcaacgacaaccgctacgtggaagctttcgcgaaacaactggcatccgatctcgaagaggcagggcgctttggcacagcccgctcataccgttctcttgcgagtgcatggagcaaattcgcggcacagtcccgttatcgtttttctcaactcgacgaacacacggtctttgctttcggagaatacctcgaacggcgcggcaaccgtcgcaataccgtttcgttctatctgcgcaccctgcacgccctttataatcgagcccggcggtgcggctatgctccgacacaccgtaaccccttccgggaggtatcgttcaaaccggcccgaaccccgaaactggccgtaccccgaagcctgctgcgaacccttgccggcagggatttcggggagagcgaactgaacgaagcccgcgatatgtttctgttcagtttttatgcccgggggatgtctttcgtggatatgtgttacctgcggaaaacgaaggtttggaacgaagcgctgcactacgaacgccaaaaaacgcatcaggtgttcagcgtagcccttacgccgcagctccgggagatcatctcccgttacgacgatccggcctccccgtgggtgctgccctgcatgcagcgcggaatgctctcttcggcgaacaaacaggaagatgtgaacggcgacgtgccgcctgcgtcgctgtataatttctactgtatggcgctccgttattacctcacgttgctcaaagagatttcccggcggctgggctgccggaatctgactttcaatgtggcgcgccatacataggccaccgaggctcggagtatgggcgttcccacaccgcatatcagcgaaggactgggccacacttcggaacgcaccacgcgcatttatctggcaagtctcgacagacagaccgtggacgaagtgaacgaaagggttacgaaactgtaatgggaaaaataaattgcccgaccgatataagccttaattcgctatgcaaagcgaattacgtctgatttcatatacttgccgtcaacaaacagacaaaatcggactatttcgaaattacgatgcaaaaatatggattatctgcatcttgtgcaagaaatatcatcagaaataatcttttatacgctctatgtaggatgtcttttatgattgtaaagccatttttcacgctattgctgttttatcgtatcatgttctgcctgaaatgtcaaaacgcacatttgccgaagatctatccgccctagaacatattacaaacggttccggggcttctttttgccgaatcctgcacggacagagaacgaatgctttactgtttccagcatattgttgcactgcaatcgggtttacagccaacatcttgcctccgtatcagctatctgtgaaaaaccggttcgctccgataaaacaaatccgatgattatatatgctgtaaatcagcttactccattcgataattcctcgattatttcgctttgcatagcgaattgcagtacaggcaggcaatctgcctttcgttacgttgcggagtgtaaggcataatcgggctgttcccaagacccggtcaagcctgtaaatgaagagaaaaccgcatatcctgtacattgttttctgcctgtgcttcataggtacgggagtgtttcgtaccgctcatgcacagcatgcgggtatcaaaaccaacctgctgtattgggcgactactacacccaacgtcgggctggaatggcggcttgccccgcgatatacgctgtccgccaccgtaggctacaacgccttcaatttcccgaaccacaccgatgccaacggcgtcgctgtcaaccctaagctgcaccactggctcgtcatgcccgaagccaaatactggttctgccgggttttcgagcgccactacataggttttcacgccctttacggccagtacaacgccggaggtatgaagttcccgaaattcctcgaagacgcccgttacgacggctgggctgcgggcgcaggcctgagctacggctatcagtgggctctcggcaaacgatgggggctggaagcatccatcggcgcgggctatatctacctgcgttactacaaatacgattgcggagcctgcggcgacaaacagggcaattaccgccagcattggttcgggcctacgaaagccgcggtatcattcatctattacatccggtagccatgaaacatttgacgatcataatcgggctgttgtttttcagcctgttcgctacgatgcaacgtgccggagcgcagagacaggactccgcagcagccgaacagaaagaccgcccttatccgtcggtgcactatttggctgagccctgcgcccggtggcggggcgacagcctcgaagtgcgtttttcgggcgaggtggccggacggctcaaaggttcggaatcgctgcatctcattcccatatatatttcgggtagcgataccatccgctatccggaagtcggatattttacctcttcggaagcgaaatactacaaacgacgggaggccttgtcggatacgaaaacggacgggactgttcgcgttctcgaccgcaaggggcatagcgaagtcgactaccgggagagtatgctcgtcccgcaaacttttgcggggcgcgtacaactgcaacagctcctgcatacctgctgcgaagagcgcctgctggcttcggaagcaatcgccgttccggagcgtgccgtcacggtgcccgatacggtctatacgaccgttgcgggcatgctgccatttccggtggccgccgtgagcgtgccgctgttcgagacgaacgtgaccttcgtccggcccaagccggagacggtcaaggagcgcacggccacggctaccgtccgtattacctacccggtgaacgattggagggtctatcccgatttcgaaaacaaccgcgaagagctctcacgcatcgacaggatcctggcgccggtagcttccgatacggcgacctaccgcatcctttccgcctcgattacgggttatgcttcgccggaggatacctacaagcataacatggtgctctccgagcagcgcgccggcggtatgcgcgactatctgcacgggcgctacggtcttccggccgaaaaagtcacggccgagggcaagggcgaggactgggagggtctgcgcgaagcggtcggacggagcgacatgaaggctaaagacgaagtgttggacatcatcgacacttacgacattttcgacgggcgtgaaaagctcctgatggatctccgcggcggcgatccttaccgatatatgctggaacatattttcccgccgctgcggcgtatggagatgcggatcgactaccgcgtgcgggccttcgatccggaggaagccggggagctgatcggctgtcgtccgcaggatttgagcctgcaggagatgtacgaggtggcgcaggccgagaacgacgaccgcacgattgtaagacagcgcgatgcttatggccgtgagtacgacatcgccgtgcgctatttcccggatgacgacattgccaatatcaacgcttcgtcggccgcattggtgcggggggatctggaactggcgtgggtgtgtctgggccgcgtcagggagaatccgctggcggccaataacctcggcgtataccattggctgtgcgggaagatcggggaggccgaagcctacttcgaaaaggcccgggcgaccgatcctcagcgggccgcctacaacctcgaacagctccgcaagtggaaagaggaattcggggatgaggccgaagcaggaatagataacgtaagcgaataaagggatgcgggcccgggatgagaacggggccggacgcagcataacgacaggaacagacgcagacacgggaacagccgggcgatgcggaggcgacggatcacagcgacgcacggcaggctgaaaaaacgatgagatggacggcacgacatatcatacaccgcagggcggcgatgctggcaggctccgttgcggggctctgcctgctgttgtgtgcctgctctctggaggacgaccgggatatctgctgcgggaatattcgcatggagatcagatacgtcccctacggcgtcgaagagctcgcgacctatatccgctcgctgcgtcacttcgtcttcgatgccgggggccgtttcgtgcgggagattccctccggagagccgatccggatgttgcgtttttcgcttcccgacggcgactacacgctgctgacgctgggcaacgccgaaagtccgctggcgttcgaagccggcgaccggacgctcgcgacactcgaaatggaactggcgggcctcacgccctcgggcgaatacctcgatgccgacgaattgtattggggcgtgtgccgcatgcatgtggacggatcgcgacagcagacgtttacgacctacatgaacaatatccactgccacctgcatgtcaaggtcatgtggcacaatatgccggaagatgtcggagcgtaccgtatggaaatcgggcaggttcccgtgggctattcgctctgccccgaccgctgtcatacggtgggcgacaaactcattcccgcaggcaacggaaagttggcgacccatgtggagcgcacgcccctcaaggcgcaggagttgcgcggggagttcgtcacgatgcgctataccgcggagcatattcctgtcttccggctttggttcggcgacaaggccgttacggagcctatcgacctgcgacgggctttccggacgtggggctggaatcccgacgctgcggccgtacaggaataccgcatccagctcacgctttttgccgacggcagcgtggaggtgcgcccgtggatcgacgccgatgtcgaagactggcaggacggaggaacattcaactgaccggggcggatgaatacgataatgattgatacgataattttttaatgattttttatgttaagagtaatgaaacgaatctgtttgcaggcttttatcggaatgataacggcctggacggccgtgtcgtgctcctcggagcccgcggcctgcggatgtggagacgacggaagcaccattcccgtgagcttcacgatgaacaccccggcgggggaagccgtcccctacggcactacgcgcgccacgcacgacgaggccgagtggacgatccaccgccttacgctttatgtctattcggtcgatgacaccggcagggggactttcctgcgccgctatgccacggatgcgtcgggcgatcaggccatcagcatcgtctcgaacggcgccggaacctacaatttcacattgaaggccccggtgagcgacctgaaagcccgccagcgtttcgtcttcgtggccaatgacgcctttgacgaaccgtctcccggagagtcgcaggacgagctggaaaacaaactggcaggcatcactctcgaagaggggcattcggccgacaagctcgctgccaaagacacgggcatcgccatgtcgggcatcgcacgaagcaattcgaacgacgtcgtgaccatcacgcccggcgtgaagtgcgaggtgtccctccggcgtatcgtggcccgcgtggatgtgcagaacaacacgccgaatctggtcatcggctccatcgagctgttgaatgccgcgccccggggctacctctttccgcacgatccggtcgccgctgccagcgaaagctacattaccgaggcgatgaacgccgaggtctccctcggtgcgacttacgatgaacagaaggatctcaaaaaggtgttctacctctacgagcggcataacgaagacggcaacggcgccgaaatcaagattacctacaccgtcaacagcagcaagggcgaggtcgtcgtaccgttccgcaagacttccgacaccaaggagttcgtggatgtcgagcgcaatacgctctataccgtcgtgctcggaaacggcgatcccgtgacgaccaacgaagtgaagttctcgctcaggatcgaggattggaacgtcgtggatatggacgaagcggtggatcccgacgaggacgagcagatgaaacgcaataaggcgttaaaagtcaatatgttcaccccgttcaatgccaagaacgtggatccgggggcgaaaaagatcaatgcgttcttcgacaaattggcggtttcggcggacgactgcccgcccgattcctatttcacctatacgcagttgaaggatgccggaatgatggccgccgatgcggtctttaccggtcccgacggcggaaaataccgcctgccgaccgagggcgagctgaatctgctgctgcccatgtggacggaagaagccgaccgggctactgttcataaagaaaaggacggcttgtatcatccgtattggaacgacaatctctcgaccaatacgttcccttacgtgactgttgaaactccttttaccgagacgatctacctgaaaaacggcgtggacaatctgcccgacaagtcccatcccgacgataccgacagcgaatatacgctcaaagggcagtcgcagttgaaagtcggagcgctgagcgaaacggtgcactattcgacggagccggatgatccgcagaaaggcaattacaacatccggcccgtttacggcctgcggttcaagggtacgagccagtacgcggcctaccgttgggaaatatgcaagatcgcgggcaatccgttggaacgttacttctccattaagatcaaggcgttgaaacaggatgatacgcagaccacgatcgaccaggtggcgcaggaggcgttttggaaggacggttttattgaatttaagttccccgcttcaggctactatgctccggagaatgccgataatcccaccactgagaatatcacgtaccgcggagtcactggctattgctggtcctcgtcgctgtggacgggaggctcgtacgcccgcaccctgggcttctgcctcggtgatgcgagcgtgtaccgcaacgttcccggccacaggttcccgctgcgctttgtaaaagtatcggagtagcgaataacagcaaacagaaaaaacgaaataacgccatgaaaacaagatttataaccgcactcctcgctgccgcctcgctgctgaccggatgcagcaaggagacgaccggtccgggcgatacggacgacagccgtattcccatcacctttaccctcgccacgcccggcagcgaaggggtgatttacccccgcagcgccacgcgggccacgcacgacgcagcggaatacgccgtccgtcagctgacactgctggtttacgacgcgaccgatacctccgcgcccaaattcctgcgcaagcacgacatgacgagcgacatcacgctctacgacaacggcaacggcacctacaccttctcgctcgaagcgccgatttccgatatgaacgccaagcgcaaattcgtcttcgtcgtaaatgacgatgccgccgtggctgcgacggcagcgggttcggccgaagccgatctgcacgagaccgcggccaccgtcgagctcgccgacggcgatacggccgacaagctcgccgaagccgatgcgggcatcgccatgtcgggcacggcgaccgcagacgggcagaaccaggtgattaccatcgtgccgggcgtgaagtgcgaggtcaagctcacgcgtatcgtagcccgtgtggatgtgcagaacaacacgccgaacatgacgctcgaaagcgccgtactcgtcggtgccgccacccgaggctaccttttcgcgcaagccccgctctcggctccggtcgccgaccggatcgtgctgggcagcaacgcgacggtggatcttaccgaagagcatcccgcactcaaaccgggcgaggtgttcgctccgaagaccttccgaaagacgttctacgcctatgaacgccccaacacggccggagactacgctgccgtgcggattacctaccgcgtgaacgacagcaaaggtacggtcgaagtgcccttcatccgcaccgaagccggcggcgcacagacgcccgtcgatatcgagcgcaaccacctttacaccgtggtgctgggcaacgggaagcctgtgacgaccaacgaagtgcagttcacgttcaaagtcgaggactggaacactgtcgagatgcccgaagagatcggccccggcgatccgctcgatcccgagtcgcagcaaaagctcaacgctgcgctcaaggtcaatatgttcaccccgttcaacgccaagagtgtggatctgggggcgaaaaagatcaattcgttcttcgacaaactggccgtttcggcggacgactgcccgaccgactcctatttcacctatacggagttgaaggacgccgggctgacggccgccgatgcggtgctgaccgacggcgagggcaaccaataccgcctgccgaccgagggcgagctgaacctgctgctgcccatgtggacggaagaggccgaccgggctactgtcaataaggaaaaggacggcatgtattatccgtattggaatgataactcctcgactaacaccttcccttatgtgaccgtagaaacgccctttaccgagacaatctacctgaagaacggcacggacaatttgccggacgaaacccatccggccgatcccgaatatacgctcaaaggcgagtcgcagctgaaggtcggtacacagacggaacaaattgcctatcctgctgacctggtaacgaatgtttacaatattcgtcccgtttacggtctgcggttcaagggtacgaaccagtacgccgcttaccgctgggaaacgtgcaagatcgcttccgacccgttggagcgttacctctcgatcaggatcaaggccctgcatccgcaggacaatgcgacgaccatcgacgacgtggccgacgagacgttctggcaggatggctttatcgagttccagttccctgcttcggggtactattcgccggagaatgcaggtaatcctacccctgagaatatcacgcaccgcggagtctatggctattgctgggtctcgtcgctgtggacgggagactcggactcgggcgctcgcttcctgggcttctacctcaatgatgcacacgtgggccacagcgttcccggcagcaggttcccgctccgcctcgtaaaggtatcggagtagtctcgtagcagcccgaataacagaaaacagaaaaacgaaataacgcaatgaaaacaagcttcataaccgcactcctcgctgccgcggcgctgctggccggatgcagcaaggacgctccggacggcggcccgcagccgtcggacggcaaccgcgtggtcttcacgctgggcggagcgacccgcgccgcaggcgacaacgacgcctccgcgccgctggccgctaccgacgaagaaaagaaaatcgacggcctgctggccgtagccttcaccgacgacggcaactattacaaaacgttcgacgccgcctacgatgcggattcgcagaccgcttcgttcgacgtggaaaagaacggaacctacgatatttggttcgtggccaatgccgacgaaacgcttgccgcggcgctgctggccctgaccgaccgaaactccgattcccgcgttacggaggacgacctcgcggcgctgctcgtaacgcagcaggtcggcaggaaagacggcgaagaggcatggcatccgttcgtgatgttttcgacggaagcccggcgcatcgtctccaaacacggggtggtaacgaacggcggcgtcgtgacgatgcgccgtctggccgtgcgtatcgacctcgtcaatgccgctacgggcatcacggtcaattccgtgaagttcgtcaaccgcacgaagcagagccgtctgggcgcttcgaacgacatgacgttctccaccccgcaggatctctacgaagagaaatcctacgagggaatcgacctcgcgggcgatttcgccaagccgaccgaatacaaggcttcgatctactcctatgaaaacgtggatgtcacgcccgacggagagcatctgcccgcgctggaggtcaaatacacgatggacgggctgaaattcacccatacggtaaaattcttcgattcgaccgaccccgccggaaaaactccgctggcgctcaaacgcaactccctctaccgcatcgtgctgaccaagcagctcgacgtgtctttcgacattaccgtcgaagactggaacaccgccggggctttccagatcgaggacatcccgttcgacaagcacgaccaggcggcgctcaacgctgcgctcaaggtcaatatgttcaccgaattcaacgtcaagagcgtggatttgaattcgaaaacggtcaacgcgttctacgacaagctggccgtttcggcggacgaatgcccgaccgactcctatttcacctacacggagttgaaggatgccggagcgacggccgccgatgcggtcttcaccggtcccgacggcaagaaataccgcctgccgactgccggcgagttgaatctgctgctgcccatgtatacagaaccgggtgaccagcctgatatcgacggaaaaaagggccagtattgtccgtggtggaacgacaacgcttcgactaacacctctttggtaaccgtagaaacgcccttcaccgagacgatctacctgaaaaacggcgaggacaatctgcccgacaagtctcatcccgacgataccgacagcgaatatacgctcaaaggccagtcgcagatgaagctcggagtactgagtgaaacggtgcactattacacgacggagccggatgatccgcagaaaggcaattacaacatccatcccgtctatgcggttcggttcaagggtacgagccaatacgccgcctaccgttgggaatcgtgccggattgccgacaatccgctggaacgctatttttcgatcaagatcaaggcgctgccggcggattccgaactgacggtggacgatgtggcggataacgtttctttctggcgcgacgggtttatcgagttcaagttcccggcttcgggctactatgctccggagataggtcaaccaacctccgagaatatcacgtaccgtggagtcaatggctattgcaggtcctcgtcgctgtggacgggaggctcgcacgtctacgacctgcgcttcagcctaaataatgcgcacatggatcatagcgctctcgacaataagtactcgctgcgcttggtaaaagtgtcggaatagtcccgtagctgcccgcataacagcaaacagaaaaaaacgaaataacgcaatgaaaacacgaatcatatcgacccttgcgctggtggccggagtactgctgagcggctgtacgcgcgaggatatgcccgagggcggcgctccgggcgacggcaaccgcgtggtcttcacgctggccggcatcacgccgcagcaacagaacggcagaacccgcgccgcaggcgacaacggagcggcgaaacccgacgcctcggccgctaccgatgccgagaagagcgtgacctcgctcctcgccgcggcctatgaaaaacagccttcgggcgggatgggcttctaccgggctttcgacgtgacggttacggacgacggctgctcgttcgacatcgccaaggacggccgcttcgacctctatctggtggccaatgccgatccgacactggagggcgccgtcaaggccctcggtgccggatcgcccgtgaccgagctggaggaactgctcgtggagcaggcccccgacgccgacaacgccttcgtcatgaccacccccgaggtgttgaagatcatttcgtacagcggcgaggtggctgactgcggcgaggtgtcgctgcgtcgtctttcgatgcgcatcgacctgctgaacaaggccgaaggactgaccatcacgaaggtgacgttccgcaaccgcgccgtgaaaagccggcttttcacgcccaacgccatgcttgcggaacccggagcggtcgaggacaaggagtacccggatctgaacctcgtgggcagcttcgacgtgccggccgaatacaaatcgaagatctacggctacgagaacctgagccgccgcggcgaggcgaccgtgccgacgctcgacatcgagtacacctaccgcgaccagccctacacccatacggtcgagttcctcgaccggaacgaccccgaggggctggcgccgctggctctcaaacgcaactacctctaccgtatcacggtgggccggaaggtcgaacccgaattcggcatcgaagtggtggactggacgaacgaggagtcgttcaacgtcgatgacatcacgttccaggctgagatgaacgccaaactggccatcaaccatttcgccggagccaacgtaaagacgatagacgaggcgcagggaacggtcgccttcacgactgccgacccgaacaactcctcggcctatgtcgcctggaacgagaagtgggcgacggccgtctactacaacgagaccgacggaacctattaccgcgtgccgaccagggacgaaatgtatctgcttttccccgacgaaacgaaccatgtccgtttcgacgaagcgatggacgggacttcggagatcaccgagaccctgcccgaaaagctgttcggcagcaaggagacgaacggcggcgagggcaagtcgtggttcaaaaatgctgctgcggctgtgacctcccgggccgaccagccggcctatccgatcgtctatgccatccgtttcaaaggtacggcgcagtgcgcggcctaccgctatgagaacaaaaacagcggtgacgctgcgaacggcgagctggagatccgtatcaaggctttgcaggcgaactcgctgctgaccatcggcgaagtggccgacgaagcgtactggggcaatcccgctgacggcgataccgatgccgagaaccagcttgtctatcatatcgccgctacgggatataaacagcctggtcatgaggatattggaagtcaaggaagcaattcttttttctggacatcgaccgaagcagacgaatcgaaagcacatagtgcaggccataatgtaaacgaaatcctgatgacttcttattctaaagttgctgccggcaccctgcgtctggtgaaggcttcggccgaagaattcgctgcaatagaccaacagcgccgcaatgccgcgctgaaggtcaatatgttcaccccgttcaatgtcagttcgctcgacaaggcgcagaaaaaggtggctttcttcgacaagctggccgtttcggcggacgactgtccggtcagcacgtactttacctatacagaattgcaggacgccgggctgacgaaatcggacggaactgaaatcttgcaggacgacgaaggcaataagtaccgcctcccgaccgagggtgaactgaaccttttgctgcctatgtggacggaagctgcatcgcgggaggatttaggtaacaggcattgggggatttatcatccatggtggaatgacaatatctcgaccaataatccttcaaatgctgatgccaatacttatgtaatgtccgacaaagtgtctacgaccggttggactgagacagtctacctaaaaaacggtgtggacaatctgcccgataagacgacgaatgccggggagaccgacggggattatatcgtttcaggcaaaagctggatgaagaaaggtgcacagagcgagatggtgcattattacaaggccgagccggatgtagcggaaaagggcaattacaacatcgctcctgtctatggtctgcgttttcaagggacaagccagtatgccgcctatcgctgggaattttgtaagctcgcttctgatccgttggagcgttatctttcgatcaaaattaaggccttgaaaaaggatgatacgcacactacgattgatgacgttgccgacgaagcattttggaaagagggctttgtcgagttccagttccccgcttcgggctactatgctccggcaatagatcagccaacttctgagaatatttccaatcgtggcgtcaatggaacctgctggtcctcgtcgttgtgggtgaaagactcggattcacgttacttgaatttcaatctcattaatgcacacgtggggcacaacactgttggtgatcgtttcccactacgtttggttcgtgttcagaaatgacctatacggagtatattccgaatgtatcgccaagggctctttgagagcccttggctctattgccgggctcccgaggccgggtagctccggcacaacatccggagaaaaatgaagaccatgaccagcaaaagatatccgaacctgccggcggacgtgccgtattgcggcacagcatggagaaatatgccgaggcagtacccctgtacggaacgacggacgagaacctgcaaaccatagcgcagcatttggagctggtatgcgacaatctgggaggctttatgtgccgcccctcttcccggaacagctcgcccggcataaaaagacaagggcgacggacggaaaggataatgaacggcttttgactacttatttaattactcaatatttataattgctaaaatcaatatacggacaatggaagatgtgttcgaaatggccgcaccggaggtgaattttcttgtattgctgctctgggtggcgatggcggccttgctgattgtcttgatcgtcatgggggtcaaaaaccggcgtcggaggcgcctgtgcgatccgcgcaaggatcactatcgccgggaaccggatacccgaagttcccgatagtgcaggtgcgcgcatccatgatgtgtaagtaagtctgcctcctctaaaataacgcgcaacacactcatctcagcaccttgatcgcaggccgtccctgccagatacgccgccacgtgctgcgatcggcggtgcgatgtgcgcatactccggggagcctcgccgccataaggcagcgaggctccttcgctttcgatgccgcacgccgaggtatatcccggagcgggcgtgtgccggggagattcacgccgacggacttgatggagttcgttgcccggctgaacgttcctatttcaccgttaggccatagtcataaccaattggctgaagatacttgaagcattcagcatagagaaatttggttggtgaaagacctcaacaaggtattcgggcagtatctaacaaaaagagacttccgagtaatgatatacccggaagtcctttttacggttgtctttgcacagattaaacctgcggtatcatcaagcaggataagaatattgctaccaaactatttcgagccttcgatcgcgcccggtgaagcagtttttcagcatcatcggctgcggggttttcatcgtgaaacggatggtggaattgggcgcaatgtcgtaacaggcctcgccgaccaaaagttcaaacggcagttccgacgtattggtgatttcataacgcccttcggccggacaaaccggatgccatgtaaggcacgccttgacgaactgcgtgagcaaatcggcgcgtccgaccaatataccattaaaataggccagcgtccggctcgcttcgattgcttcgcgcaccccagcgagagtatgttcgcggcagaaaagaattgtcatcggccgcaggccccgccccacaccgtagcggtcggcgatcggctggtggatgtcggaattggacatataggccactccgcgttcgctgataaggtctgccgcattaggataggcctcaagccagttgtaaatctcaatggcatggaatcgtttctcatcgaaccaccggcgttggatgtcgctcaatttaaaatgatcatcgggccaaccgggatgattgagcatcaccacagcgttctgccgccgagcctcgtccatcgcctgctgcggctcgtcgcacagcattggattggcatcctcgatgaaaagtgcattgatatgtcccaccggcttttggcgggtaatctcacagcccgggatcacaaggattcccagttgttcgccgcgcttggcggcaatacgataaggctcgttcagatcgccttcgatcttcttgccgtgcgggcggtattcgaggtggtcggtgacggcaatgacatcgagcccgtcgcgccatgcttcgttgacccgcacgtcgggccacactttgccgtcggagaacactgtgtggatgtgaaaatcccccgtgagagtttcataccccgcaatgtcgggcaaacggagttcattgcgggtgtagaaggcatcccgctcggggaatttgtaaacatgttcgttacggatttgagccgctgcaaccatggcagcagcggacagcaaaattgtcaacaggatttttttcatcgtttcaggtctatgtataacggtaaatggtcggaaagcattgcggcgtcgccttcgcgcagaatccgcccatcgagggcatgtgcccggagatcgcgactcagatagatgtaatcgagacggcatgttacggggtcaggattgcccgcggcacgcgccggactgggataagaggcgacgtattcagaatgaaacaatttgaaggcgtcgcagaaacccgcgtcaagcaacgcctgctgggtcgtgaagtccaattctccatccacaaggttctgccgtttaccgcccacgcggggatcgtcaccccggcgatttagcgcctgcaggcgaccgtcggcatatccttcgcggtcgagcggcgaataggagttcaggtcgcccagtacaatccagcgccggcattctccagaggcttcgatccaggccagaatcgtcgccacctcctgttgccgtttacaccaattgaaaggcgagaggtgcgccacgacgatgttgtaaccacccgtgctggcaatcaggaatccgtggtgcatattatccgtcacccgtttcgctacgatcgggtatttcgatgtaagggccacgggataccctgtatccttgagcaatacggcataagaatgaccgtagtctgctgcaagtttctccaaacgcgcttgcgtgaatccattcatctcctgcaaggcagccatgtcgggatcgagttcgcgcatccaagcgacaaatcgttccttcaaagccgtcgtatccattttcaacccctcacaaacattgtaggtgagcacccgcacaaaagatcgtttctgcgccgaagcgcctgccgccgcaatgagcgcgaacaataggaacaacttgcgcatggtttattcgatttgggatttatacttcgcatagagcattccagcaacgggtttcactgcggaatgttccgcgttcaggccgtttttatccgtggaattgacccatgcccattcgaaatccttgcaccgctcggtgaaagcggcttcgtcgaacggctcgtccgattccacggcttcaaggacggcatcgcagaacaactcccagcggggtttgtagtaggtagcaaccaatccggcccatgtgcggttggcataatcgttaaggctctgatcgcggtcgccccaggtggtgaggatattgcgggcatttcgttcgtaatagtcgctctcggctccggacatgccgacggcgcgcgccgcctcgatccatcgggaaagcgagaatgtcggatggcaagccagcagtttgtccagatcgtccagcagagccatcatctccgctttccgggtacgcatagccagcacatcacgccgttcatatgcagccgtgaaggcatcgcgcaggactgcaaaatggttgccgagaacctgacggcccacgttcaccagatcgaagtcgtacatcgcaccgtgtccttcggcacgaagcatccgtccccaggcacggcacaacccggcgttgtcgtaggagtttccgggctgtgtccagcggatcacaccccgcagcgacggccgcgagttggttaccgtcccctgccccagccgcgcacagtcgacatagacagagtcgagcatccagcgccatgcgccccgaaaatcggcatcctcgcatccggcgtgactgtcagcataggcgtcgatccacgtcgcatcgtcaccggtatgccgccaagccttatcgaagaggtattcatacatcagcggattgacatccaacgcttcgagcgtcgaacccactccgcagaggttgtcacctcctgcggcaaaagcctgctcgatacggcgtcccgtttcgcgaaggttgcctttgagcatcgtattgccgccgaagtttcccaaatagcaccagatatagggcttgccgtaataacagtcggtcatacgccagacctcggtattttcgcagtaatagtccagcgatacgaggcggtcgccgggcacggcacgcatgaacgcttcacgcaaagcgtcggtccactctttgtcgtagtagaaatgccaggtcatctgcagccacacagcttcggaatcgaccgaggcgagcgaactgtaaatatgcccggccaccgaagcgaggtattcggcatcccagcgcggcagctgcacctcgttgagcggatcggccccataaatgtggtcggtgccgtacaaacgggtctgctcggcgagaaattcacgctgaatttcggcgaacagcggatccgtcgggctgaggaatgaacagcggtatttgtcctcgaacccgccccacgaactcatggtcataatatccgcttcgggataccggaccttcagcgcagcgggaacatgcccggcaaaagcagggagcacgggcgtcatacccaacgaccgttcgcgttcaaggatacgtttctgcaatgtttcctgcccgtcgatccatccctgcggcagcgggccaccccagccgtcgacattcgacatacgatgccacggaagatgtgcggggccggtaaagtaggcgctgatttgttcgtcggtcaggcccatccgtcgccacactcgctgccacacggcttcctgtcccgtaatggccagaggcatattcactccgttgagcgccatccagtcgatcaggcgttcccactccggccaaccccaccacggcatcgtgtaaccgaatgtgcaatagttcagaaaaaaacgccggtcgcatcgtgcctcggccgccagtttcccagcaacggccggaaggtgttcgggcagcgagaccgtatcatgggcaaaccatgacacagaggcgtggcagacgtttttcaggtattgattcaggccgacagccatcgcgccagcatcgttgccgcggataacgacagccccctcggctccttcgacctcgtaaaagtccgtttcggacggcgtgtcgattttctcgaagcgaacctgtccggcccgctcacccagtacccgggaagccagttcccgggccgcgcgcacgtccggatcggtacatgccccgagcaggagcaaagccgtgagtcccgcgagcaaattacggtatagattcattttttaacggttatagtagttttcaacaggtttcggtcagccgacgacgagccggccatgatttcgtagtcgcccgcttcgacggtgaagcgcatgttctcgtccaatgcaccgagacgctcgacgggcagtgtgaactccacacgcttgcgttcgcccggagccagtgcaacgcggcggaaatcccgcagttctttgatcggccgggtcacaacactatacaggtcgtggatatagagctgtacaacctcttctcctgcacggtcgcccgtgttggctacgtcgaccgacactttcaacacatcgtcgacacacaccgaggttttgtcgatcgtaagcgcgtcgtaagcgaacgtcgtatagctcagcccgtagccgaattcccaaagcggctggttgtcaccctcgacgtatccggcccagagactcgacaacttgcggttgtagttgaccatctgttgtcccacatgtttggggaacgacatcgggagtttccccgaagggtttactttgcccgcaagcatctcggcgacagcctgaccgcccatgcagcccggttcccatgcttcgacgacggccggaatgtgtgccttgatccacggcaaagctaacggacgcccgtttatgagcaccacaacagtcggcgttcccgtggccgccacacgttcgaccagctcctgctggagcccgtaaaggcccagatcccagcggtcgacgttctcgccgcaggtcttggcgctgcggtcataacgcaggccgttttcacccacgaccaatacggcgagatccgacgtacgcgccgccgcaacggcacggtcgacatccgccgcctgcattgttttggggttattgccgaagcagacttcacggaacgcacagtcgggagcgatctgcttcaaaccagcgagtacggtaacgatgttttcagccggctgcggcaacgcccagtcacccagaacggcatgactgtcggcattcggccccgccacgagaatccgtcggtatttcgaaaaatcgagcggcagaagcccgtcgtttttcagcaggacgatcgacttgcgggccgcttcgagcgccgtggcgcggtgctcggaggtattgcaaagctcggcagtttgcgcggcatcgacaaacggattttcgaaaaggccgagccggaactttgcttccagaattccgcggcaggcttcgtcgatccttttttcggagatcacgccctgctccacggcccgctggatcacgtcgataaagaccggaccgtgcatgcgcatgtccatcccgcaggcgacgctgcggataaaagcctcctcctcggtggcgacctgcgcatgtttgtccaccagccgttcgacgtccttccagtcgctaacgataaagcccttgaagcccatctctccgcgcagcaggtcggtcagcagccatttgctaccgtgcgccggatgaccgttgacctcgttatgtgcagccatcacactgtgtacgcccgcttcgatgcacgcccggaacggcggcaggaaaacttcccgcagcgtgcgttccgaggcgtcgaacggtgcgccattgataccgttgacaggctgcgagccgcctacaaaatgcttggcgcaggcgatgacgcgatccgttccggtgaaatcagccccttgataaccgcggacagatgcggcgcccattctgccgaccagcagcgggtcttcgccgaacgactccccgcagcgtccccagcgggcgtcacgcgctacctcgacattggggttgaaggtccactgggcgcccatggcccgcatttcgagcgccgtttcacggcagaggcgttccaccagtgcgggatcgaacgtcgcggcctgtccgatcgaggtcggataaatcgtcgcaccgctataaaggccgttgccgtggatggcgtcgataccgatcagaagcggaatctgcaagcggcttttttgcgccaagccttgcaggtaattggcctcttcgggggttacgacatggaaaaacgagctggcctcgcccgcctcgaccatccgcagaatgtcggtcgagtggtagcctgggtaatatccttgggcgtgcccatcgcgaatctcctcgggcgtggcgttctgctcagccatgcgcaggtgttccagtcccacgaattggcacatctgcccgatcttttcacgcagggtcatgcggcccatcaagtcgtcgatacgccgttcgacaggttgcgaaacatctttgtagagcggctcagaactgtcggaacagcatgcactccccagaacggccaccgccagcagcgaccgtccgaacaatcttcttttcattcgttcgaaaaaagctgaattactgaattatggaaaaaggagcgccgcttccgaccggcgcaagcggcactcctttttcgttgagactctgttttcgcgacgttattcctgtacttcgactttcagatcgtcgatggccagtccgggattccagtccgccgcattataacgataccaccagcgtaacaggatcagctcattgggagcgagatcgacttccagatcaccttcgatcagcgtccggttggcatcggcatgtccgtcgagcgcaccgatgcctttcccgtcagaacgcacgggagtcgtgtcggcattcgccgtgcgcggataggagagatagccgatacggttggggccttgagacagatcgaccgtcggaggcatcgcctcttcggtgaaagagaaggggtcggcaaaaatttcgggattctttacatagctgaagcgcagttgatgcaggtcagtcgaatctttcgatttatcgaaggctatgttgctgcctgaacgccatacctcgccgtaataggatatgcgaatctttttaatcgtcttcccggtgttgtttttgagaaggacaccccacagcacctcgcggatcgatcccgaagtcagtgcacccaatgcgcgatcggagctcccgatctgaccgaaattcttgaatgctcccgccgcagccgagccgtcctgcgattgatagaccatcgaactgccgctcttgaggacacaatccattcgccaacccttgattgtcgagccgtcggtccacgggaatgccgcggtggctgtggccggagccggaagcgtgttgaaatcctcagaatacagccatttgccttcgaactgttcgaacatggccgtcggaacgactacttggccgggcgttccggcatcggcgatttctgccgtataggttttgccgaaaaggttgttggtcgcctcgatacgcaccttggcatgcggttgcggcttgcagaggaacatgtggtcggaaaccttggcgaacgcggcatcaccgagataatagttgtagacgtcgggatcctcgatgttggacagactcggagcgagcgcacccttgtccaccccgttctcataccatttcaccgtccatgttccggggtcccagtcccagatgttgacttgcaggttgctcgccacccgggattcgttcatcgaatagatcttcatctgatagtcgcgttcccgtcccaagctcttatagtagtaatccgaaaaatgctttgcctgcgtcggatcgacgagggccacgccgtaaccgcagggcgttccgtcgtgattggcacgattttgactccagaacgttccgcacaggcctccgagtgtacgctcgtagatgtccggacggatttggtcgctgaaattggcatgggcatgggccgaaaagatctccacctgataacccgccagcaaatcgtacagttccgtcatttcacccaaccccttgttcatgcgctgacgggtggcgatgtgcaggcaaaccaccaatttcttgcttttggggactaatgcgaggtcttttttgatccattcgatctggttgccggtgagtttcttttcgaacgtaccgccctttttcgacatgtacacattgtcgagcatcaggaagtgcatgcctgccagatcgaacgaatagtaggtcggaccgatgaaactttcgtaatcgtcatcggccgcaggatcctgcaattcgggttcatctacagcatctacggcatttttgtcgtgatcatggttgccgatgatatggaaaagcgggatgcccagttccgaaagcgatttcacataagcgtcgtacatgcccatctggtcgtaaaccaaatcacccaatatcagggcgaaatagcgtttcgaagcatccgcagccatcagcttccgcatatcggcaataccttcttcccggaaatagccgacctgttcgttattcttgacctgcgggtcgccgacggccagcatcacccacggtttcgaaccatccagtttctcaagcgtgaaatcgcacgtctgcgtcgtttcgaacgaaccgagcgcccggaaaaaatcggggatccccgactctttcaacggggccatatagccttcgggagccgaaacccagacaaatgcggcacagcggggcgccgtaatctcataacgtccttccgcgtcggtttgcgttacggtataaccgtccgaaacgacgaccccttccatcggtgcgccatccgtatcgacgacgcatccgttcacggccagcggctcctcgggcagacgcacgccgaaatcatcgaccaccggggcctcgcaggaaacaaggatcaggcacagggccgaccaaatcaaatattcaatccgtttcatcgtaccaattatttaagaagccacatgacacaattctcattatccagcccgtcatactgacgtgcgattgcctccatgacattagcgttgttgcggtcgtattcggtctgaggatacatccagcgcacgggcatcttcgacgggtcggtgttcatattggtcgaagggttgaccggcaattcggggactcccgtccgacggcattcgaagaatgcatcccactcatgctggagaaaatagagtatgtacttctgtttgtaaatccggttcagattctcagttgccgaagcgccgaacttcacctgcggcccctccagataggaggcgatataggcatcgtcgatcttcacgccgtgctgatacttgaccggcgtgttggctgccgtgaattccatcgcagcgcggatgcccgacttgtaatagccctcggcaccttcacccgtaatccatttgcgcagggctgcttcggcaagaatgaactgctgttccgcatagccgatgcgtatgaacggctctccgacctcggtttccagataccgattattgagtttcgagcagctgccgcgcatataggcgttcacgatctcagaactctcggctaccggatccacgccttcataggcctcgtatgtatcctctccggccgaaagcagcgtctgggccggttcggcataatagaacaaccgacggtcttcatgctctttgagcatctccacaagcgtcgaggaaaccagcatgtacatactgaacttgggatactggttgaaaggatacatctgatcgggacgcgaagagtagaccaactggaaattgtccgcgttcgacgcgagcagtttgccgcgcccgaagaccgtggcaaaccgggcggcagcgtcgatctccgcatccttcgccgcacaatacatcagcaccttcaattcgaacgagttgaccacgcgcatccacttgtcgggcttgccgccgaagacgaagtcacctgcgaaagccgacgcctgcgagaacagttcataagcctcgtccaactcgtcaagcactcccgcgatcacatctttctgcgtatcgtaacggggtgtaaagttgcctttctctccgcccagagcttccgaatagggaatgtcacctacgcgcattgtaagatagaaaaggttgtaggcccggacgaaatgcgccagagcacggtaagccggcttctcgacctcggcagcgcattcaaccattttttccgcttcaatgagcgatgtataggcgccgaatcctgtccggccgatacggttgtaggcatagtcgcggatcttctcgccacaggcaatatgtttggagagcatgcagtgattggcaaaaccctcggaggagttgctgcgtgagtccatcatgctgaagagaatctgcgtggcgagcatccccggcgtgggacggttggtcttatcgggatcgacgttgatttcgtcgaaacccatgcaggcggtcatcatcgacgccacgatgagactccagaccgtatgtttgagaaatttcatggtatttccggttagaagttgagtttgagattataaccgatcaggcggagcgacggtgacgagaggttctcttctccggtcgaaaggtcgatggagtcgggatcgctgtacttgaatcccttggtccacatcagtagattctggccgataaacgaaagcgacgcggatttcaggcccagtttcgcacaccacggctgcggaatgttccaagtcagcgaaacatctctcaacttgataaatgactgatcgaaatagttctgccagcgaggacgataggctgtcgggttgtactccttgacgtaagcctcgtaagagaccacccggtcgttcggcgcaaaaacccggtcgtcgcgcaggatacgtccgtaagcgtcgtagtccacgctgcccgaaatgactttcacaccgcggcccacgaaggtcttgcgaccgttcacaacctcgtcgtaacggaactggttggctgatttggggtgtgaaccgccgttccacagcgcttggtcggtcgtcgagaaaccgatgccgcctacacggccgtcgaacgagaatgaaagcgtaaagttcttccacttgacggtgttgatccagccccatatccagtcgggggtatagacaccgcgcttggacttgtactggctcagcaccggaagtccgttgctgccgtggacgatattgccgtcgggatcgcgctcccaatcctgaatggcgatccagtcccaacgcgctccttcgtacacccacggcgaagcgttcgaatattcgggatcgagcttgtgataataatagcggtcgagcgaccagttgacgcccgtgtcccaccgccagtccttcgttttgacgggcgtcgcagaaagcatcacttccgcgccgcggcgcagcagctcctccttcgtattgatcttcttgtgcgtgaaacccgaagcgttgctgaccgtgccgtccttcacgaaatcatagctcaaagtctggtaataggttacgtcggcacgcaggcgattgccgaagaaaatacctgcaacgccgatttcataggcgtctttggtctcgggattgaccgagccgcggatcttgtcgggatagtccgccccggacatgccgccccagcggtcggccgagatcgtatagctgcggtctatgtcatacacgccgagatccatcttggttcgggtccacgaaccacgtaccttcagcagatcgacaccccgcatcttcgggagcacctccgtaaggatgaagctgccggcgactgacgggtagaagtaggaacgcgactcagccggaagcgtcgaggaccagtcgttgcgggccgtcacgtcgacataggccatgctcttccacgaaagagtcgccttgccgtagagcgacatcgatcttcggcgcgacatcgtgctcgaggccagggccggattgaccgatgctttgagcgaataatagccgggaatcgaaagtccgccctgcgtatagccgctcaacgtgtcccagctgcggtaaaaagcattcatgccgaccatggcattcagcccgaagccgccccaggtcttatcagcagtgaacatcacgtcctgattgatactgaatcccgtgcgcttctgaatctcataatagcctttcttgtggctctcgcccgaacggggagcggccgctgagctccatgcctcacgccactcttgacggccgttcttggcatctacgcctgtacgggccgtcaacttgagccacgatgtgagatcgtaccccagcgtcaggtaaccgctcaccaaatgctgcttgtcgccgtgcgtgttctcattagccagaaaatagggattgtcgtaccacgagccgttgaccacccagttctgctgctcgtcgggcttgacccagtagttgcggaagtcgcggatatcgtactccgtaccttggaagatcacaaggttgtaaatgtaactgcccttaccgtagcccgtaccataattgttcggataggtagcatagttgtaggtcagacccgccgagagcgaaaatcgcttgtatttcagatcgccgttgagactgtaattggtcttgttaagtttcgtattgggatactggccgcggttgtagatgtggttgacggaggtacggaagctgcccagcttacccttgtaggcgatactgaccgtattgttggccacgaaactcgtctgcaggaagttttcgaaattgttccgcccccgcgatacgagcggctgatccggttcgttttcataggtataggggttgtagagcgtcgccgtgcgaccgatgtcgagtttgtcgccccacacagcatcattcaggagatatttgccacccgcgccggagctgtactgggtctgcacgtcgggaaatgccagaaatcccacatcggccatcagactgctgttgacgctgacatcgaatccctccttctttgctttcttggtcgtcaccatgacagcgccggaaccgcccttggcaccgtagagcgccgaggccgaagcacctttcagcacgtcgatcgactcgatgtcatcggccaccagttccgaaagggctacatactcgtaagggacgccgtcgaccaccaacagcggcgattctccgcggatacgcagcgtcggagccgatccgaactccgtgctgttacgcacctgaagaccggcgaccttgcccgtgagagccgttccgacaaaggtagtcttcaccgttcccaactcgtcgccggaaactttctgtacggcatatcccagcgctttctcctcgcgtttcacaccgagggcggttacaaccaccgcatcaaccagttgggtatcttcctccagacggatattcaattgcgaagcgcctgctacggcgacttcgacaggtttcataccgataaatgagatttgcagcacagcgtccgcaccggcatttttcaggtcgagcgagaacaagccgtcgccgacggtcgtcgttccgttcggggttcccttgacgatcaccgtggcgccggccacaccggtgcccgaaacgtccgtcacgcggcccgaaatcatttttcgatccggttcggcagcaggtttctccttgatcggagagagcatgatgttcttgcctttgagttcataacccacgcctcgtcccgcaaagagttggtcgagtatctcacggatcgttttcttttgagcatcgatatgcaccggacgcttcacgtccacctgtgcgttaaccacgaaaagatagtcggtctgcgactcgatttcatggaggatctgttttaccgtaccgcttttcgagatcgttaccacggcatcctgcgcgtggagcggtccggcaaaaagaagcatcacgaacgccgcgattcctgctgccatccttgccggacgcacgcgccgggaagcgggagttgtggcttccgaatgtaaatatggattcataaatttggagtttataagatgattaagcagttttccgggctgccgaatctgccaaacgatccggtcccgggaggtttgtttgtcgtgtactgatttttccaggtttgaagttcttttttaaggttagatttcggttatttgataattatcagctgatttttgtcatcgaaaacatagtcgaatccggcgtctgaagccagcacgcgcagggcatgctccacaccgtcggcctggcggaacttacccatggccgagtaacccgccatgcgtcggttgtctacccggatttttacgccgtagaattgctcgaagcgtttcataagctctataaagggtgtttcggcgaaactcaggataccgtcacgccaaaggaattcgtcgttgtcggcaatctccgagatcacgaacgtcccgttatgcagcgtcgctgactcgttgggtttgagcaccgtccacgcatcgcccgcctcgatacgtaccgaaccttcgaccagcgaggtgcggaaattacccgtcgagcgtgaaaccgccaaatcgaactctgtgccgagcacctcgactgcggcacaggccgtttcaacacggaaaggatgtctggcatctttcgttactttgaaatagccctcgccgtcgagcgttacccggcggtcgctcttcgaaaaagtcgtggaataggtgaattcgctgcctgaattgagccagacatcggttccgtcggccaattgcagattcacacgctgacccatcggaaccacgatgcgctgcataagcccctcttcagaacgggtattgaaatactggaacaaaatgcccagtacaaaaactgcagcggcagcagcggtcattcgcccaaggcgcattaggcgcactttgagcgggcggcgcacctcatgcggcgagagcagcagcgaggcgtcgaagagtttacgttcgcggatatattcgtcgtagtggtcggcggacgcttcgacccacgtgcgaatggctttacgctccgagggcgatgcgtctcctttgaaatacttgtatagcagactcttgtccatagtttcaggttctttgcgcaacggactttgagtacccgttacataagaataacaagaaacccggggcgaaccctaaacgaaaatgcgttttcttgaaaaattttgtatccgggaacttcgaatcgcaagagatcttaccgaccgaggtagaagattagcgcagcgacataacctgcaaggtcggcgcgcaacgtacgcaaagcgatgttcatataatactcgacgcttttgacactcaatccgagttcgactgcgatttcacgatgagaacgtccttcgagacggctcattgtaaaaactttctgtgctttgggcggaagtttacgcaacgaacgtcgcaccagttcttccatttcagccgtgaagatttcctcgggatcacaggcccgcaatgatgccagttgcattcttaattcccactgagcgtctgtctgagacgatgcgacgaacttctcgtgcaccttgcggtgttcgagttcattgatacacttgtttttaacgatggtgagaatataggcgggagcgtttatttcggcaggaggagactgtcggaatgcctcccaataggccatgaaagcatcggtcacaatgtcctcggccaactgcatatcgtgaatgtagctgtcggcaaagagcgtaaaccgacgtttatactccatgaaaagggcatcgaactgtagcatagccgtagtaaattcctctgtagcttcgtatgccggacggcggaacgttccgccagtacaaataacaaccacctccgagggatttcccgaaggtacggatcgtttggcaaacaaagaaaggaaaaaaattccggaaaatgaaatcacagggcatttattccgaaaaacatactttttcattactatccttgaccacgtctcattaaggcagatacaatgaaaaaatgggctttggataggacggctatggcgaaaggaggggctttagtgacaaattattagcaatgcaattcattctacaaaaaaaatgcaataacctgacaaatcaagccgttacatcatttcgactccgcgcacaccggccggaagtttagcgatgccctccttcagaatccggtagaaggacttgacttgctgttgattatcgttttccatagtatgtttcatatatcaagaggggcatactccgaaccggcagaagcgcccggaagccgccccgggcccttttcaagcgggcccgatatattttccgacgaactccctgacgcggcgcgtgtattcctcccggttgtcgcggtaggaagcggcatgtccggcacccggcacgagccacagctccttgtcgcccggcttcgcctcgaaaagcgggcgaaccatccaggtggggacataatcgtcggcatcgccgtggatgaaaagcatcggcaggcggcattttgcgacctgtgccagcgacgaggcctcgcggaaattccacccgtatttcaggtcgcacagccagctggccgtatacagcaacgggaatgccggcagcccgaacgacgacttcagttccttggagaactcgtcccagacgcccgtatagccgcaatcctcgacaaaacacctgacgtagggccgttggggctcgcccgaggccatcatcgtcgtagcagcccccatcgagatgccatgcacgaccatccgcgtatcgccgccgaaaatcccgtcgacaatctccatccagcgcagcagatcgaagcggtcgagccaccccatgcggattgcccgcccttcgctctgtccgtggtaatacagatccggcagcaggatgttataccccaggtcatggttatagaggtagccgatcatcagcatccgcacggcgcagtccgtataaccgtggacgatgaccgccgtgcggtcggtcggcacgggagccgccgcgtagagggcgtgcagccggacaccctgcggatcggcgatcacggtgtcgcgcaacgccccggccgtctgcaaactgtccacccacgggcgcaggaatgggtattcggcatacatgtattcataggccgtggcattcttttcccgcatcctggcgtcgggccgcagcgagaacgcgagcatatagaaactcccgccgataaccgcagctaccagcaacaggataaaaccggtaatgattcgcgcaattcgtctcgtcgtcataacttctggttataggtctgcacgctcggaaagcgacatgccctgtgttccggcataaaacatcaccagctccagctccccgtcgccccggttctcgccgtaatggcgcgtaccgaccagctccacgatgccctctccggcccggcacatccgttgggcaccggtttcggcaatgacggtcagctcgtcccgcaggatcacccccgcattgaccagggcgtgcgtatgcatcgccagcgcagtatgcggcggcaccgttgcccggagtatcgtcacccgcggcgcaccccgcggataggagggcagcggcgccccgtcccaactggccgcggtttcgacgacacgggatatggcaacgccatcgtcccccggattcacttcgcggcgactttggcacggatatgctccagcatatcgtccgtcatgcgcgagagatcccattcgggtttccacccccactcctcgcgggcgcaggtatcgtcgagcgagttgggccagctctcggcgatctccttcttcacggggtcgacgtcgtagtccatcgtgaagccgggcatccgcttttggatttcggcgcagataatctccggcgtgaagctcatcgacgcgatgttgaaactgttgcggtgcacgagcttcgcgggatcggcctccatcagttcgacgcaggcccgcagcgcatcgggcatgtagatcatgtccatatagacgtccgacggtacggggcaggtgaatttacccgactttacagcctcgtaataaatctccacggcatagtccgtcgtaccgccgcccggcagcgtgacgttcgagataatgcccggaaaacgcaccgaacgggtatccacaccgtacttatggtggtagtaattccccagcatctcgcccgtgaccttacagatgccgtagatggtcgtgggctgcatgatcgtgtcctgcggggtcttgtccttgggggacgagggcccgaaggcgccgatcgaactgggcgtgaagagggcgcaatggtgctggcgcgccacctcgagcgaattgttgagcgcccccatattaacgttccaggccatctgcggattacgttcgcccacagccgagagcaaagcgaccaggttgaagatcgtatcgatgtggtaacgcgccacgaccgacgccatcgccgtcgcatcgagcgcattgagcacttcgaaagggccggcctcgccgagggccttgcattcgcgcatgtcggtagccacgacattgtggtcaccgtaaattttgcgcagatagactgtcagctcggaaccaatctggcctccggcacctactattagtatacgtttcatgtgcatgggttataattcaaaagtaaagatagaaaataattatgaattattcacaattttttggtcttttcatttttcttatgtacttttgcaccactcgaacgggaaatgttgctgttgtagctcagtggtagagcacttccttggtaaggaagaggtcacgagttcaatcctcgtcaacagctctcgaaatcaagcggttgccaaaacaaggcagccgcttttttcgtgcatatacggcaaaaaaggcatgattcggagcggtttttcacccgaatttttacccgaatccgacgggtaaacggcgaatagaaacgcgcgctgcaaataacgtaaagctatgaatatcaacattaacgttgtttgtcgcaaggataaggcaaacaaaaacggaactactcccatccatctgcgatttacccgaggctcgaaaattcgctgtgtcagcaccggaacagcaatcgttcctacggcttgggatgcccaaaaccgccgtatcatcattcagaacgaggagccgcaggaaatccaataccgcatcgacagcctgcttgcagaataccacaaacgcctgaaacgacttgagattttggaagcagacatcacgctcgataatcttctcgaaacaaacgggcggaaaaacgacggtacgacagccgaatattttgcacaagcgataacccggcaacaagaacagggcaagataaacacagccaccaaataccgtttcacactggtatcattgcagaaagtcctgcccctactcaaattcgacgaactgacactttcgcacctgcataatccggagcaaaagctccacgaaatgggctgttccgctaacaacacagcggctaagattagcgtattgaaagtcgtttacaaacgacaaaaccgacaatcggcaggcccttttccatctatttcaccaatattattcccaaacagaactatgcggaaaccgtgtttaccgtaactttgtgttgtaaacggactcacatatgaaaataacgatcaaccccgcaatacggcatgtgcagccattcatcgagcggctcccggaggtttttcccgtctcgggcgaagtgctccacgaagggcgcaaccagatacgggctttcgacatcgggggcgaaagcctggtcgtcaaacgctacaaacgcccccatctgttcaacagggtcatgtattcgttcttccgcaagaacaaggcccgccgcgcctacgagcacgccctgcgcctgcgcgggatgggtttcgacaccccggaaccggtggcatggagcgaataccgcaaggacggcctgatcgccgacacctatttcgtctcccgccggtcggagctcaccccgctcccgcagaccatgcgacgcttcccggcgccggacacgctgcccgtgctcgaagccttcgcccgcttcaccgtccgcctccatgagcaaggaatctgccacgaggatttcaaccagaccaacatcctctgggaatacgacggcacggcaggcaactaccgcttccagctgatcgacatcaaccgcatgagattccacgcacggccgctgcgccccgacgaatgcatgatcaacctgcggcggctgagctgcccggccgtcccgttcctgtacatattggatcgctatgccgacatacgcgggtgggacatcaacgacacgctgctgcgggggactttcttccgcctgctcttcggccgccggcagcagttcaaaaagcggttccgggaacggaaatcggccgcagcaggcaaaaaacagggctgagaatttggattccgcaaatattttactacatttgtcgctgttaatccccacaagagatgagactttacggttttgcatattactttttttactttttcttttatagcaggaggaagagcggggttatatgcaattagctgtatgatacgatagagtgaaaacacgaaggatcccgttctgcaaagagcgggattttttaatgcctaaaattcgattatgaaacgcatcaccatacagggacaacccggatgtttccacgagaccgcagcccggtgcagtttccccggcgagcaggtcgaaatcctgccctgcgacagcttcgaccagcaattcgcccgcatggccgccgacccgacgctgctgggcatcgcggccatcgagaacaccatcgccggcagcctgcttcccaaccacgagctgctgcggcgcagttcgctggccgtcatcggagaatacaaactccgcatctcgcacgtactggcggcactgccgggggaggcgccctgcgacatcggcgaggtacactcgcacccgatcgccctgatgcagtgcggcgactacctgaaagcccatccggcgatgaaggtcgtcgaacgcgacgacacggcgggcagcgcccgcgaaatcgccgagcaacggctccgcggcacggccgccatctgcggcgccggggcggcggagctctacgggctcgaaatcctggaacggagcatcgagaccaacaaacacaacttcacgcgcttcctcctgctggccgaccgcagccgcgccgcagggttcaccgacccggcccgcacgaacaaggcatcgctggtcttctcgctgccccacacccagggaagcctctccaaggtgctctccctactctccttttacgaaatcaacctctcgaaaatacagtcgctgccgatcatcggccgcgagtgggaataccgcttctacgtggatgtcaccttcgacgacccggtgcgttatcggcaggccatcgaagcggcgaggccgttgacaagcgacttccgcatcctgggcgaatacgccgaatgtcccaacccggcaatctgacaaggaacaaacgataaaaacgaaaaacataaaaccatgaacgacttacaacccatcaatttcccggggctcgacccccgcaggccgctggtcatcgcggggccgtgcagcgccgaaaccgaagagcaggtaatcgaaacagcccgcgaactggccgcggaaggcttcaagctattccgcgccggactgtggaaaccacgcaccaaaccgggcgggttcgagggcgtaggcgtcgacggcatagcctggctgcaacgcgtaaaacgcgaaacggggatgtacacagccacggaggtcgctacgcgcaagcacgtcctggcggcgttagaaggcggcatcgacatgatctggatcggggcccgcacgacagctaacccgttcgccatgcaggagatcgccgacgcgctgcgcgggcacgatatcccggtgctggtgaaaaaccccgtgagtcccgacctcgaattgtggatcggcggcgtggaacgcatctacaacgccggcatccgccgtctgggtgtcatccaccgcgggttcacgtcgatcgacaaaagcctctaccgcaaccacccgatgtggtcgatccccatcgagctgcaccgccgcctcccggggctgcagatattctgcgacccgagccatatcggcgggcgccgcgagctgatcgcccccctctcgcagcaggccatggatctggggctcgacggactgatcgtcgaggcacactgctcgcccgactgcgcatggagcgacaaggcacagcaggtgacgccacagggactggcctacatctgccgcaacctcgtgatccgtgaaaccaacgccacgaccgaaagcctgaccgaactgcggtcgcagatcgacaagctggacgacgaactgctcgaactgctctcgcggcgtatgcgcgtctcgcgcgatatcgggcagtacaagaaagagcacaacatgcccgtgttgcaggcgcagcgctacggggaactgctggcccggcgggcggatcaggccgtccggatgggtatggatcgggaattcatgcgttccgtcctgcaggccatccacgaggagtcgatccggcagcagatggccgtgctgggtgagtgagagtctgttacatttcggttaaatatgcggcacgagaggtgcaaaaagcggtttgttacgtacttttgagacggattccaatccgtaacagttatgacaaagtacaaaatcctggtagtcgacgacgaagaatcgctgtgtgagattctgcagttcaacctcgaggtcgagggctatgaggtcgacgtggcttacagcgccgaacaggcgctcaacatgcatcccgaacgctactcgctgctcctgctcgacgtcatgatgggcgaaacgagcggattcaagatggcgcggcagctcaagtcccgccccgagacggcaggcgtgccgatcattttctgcacggccagggacaccgaggacgatacggtggcaggactcaacatcggggccgacgactacatcgccaagcccttttccatccgcgaagtgctggcacgcgtacgcagcgtgctgcgccgcacggcacagccggccgccgaagagaaggccgtggcgttcgaagggctgcggatggatctcacgcgcaaggtctgcacgatcgacgggaagccgctggcgctgaccaaaaaagagttcgagatcctggcgctgctgctctcctcgcgcggcaagatattctcgcgcgaagagatcctgcggcaggtgtggagcgacgaggtaatcgtgctcgaccgcaccatcgacgtgaacatcacgcgcctgcgccgcaagatcggcccttatggggaacacatcgtaacacgcctgggctatggctacggttttgaggagtaggttttcctaccacaggcggctgttcctgctgctgctcgccttttcgtgggcgctggtggcctgcttcgtcaccttccagtacagccgcgaaaagcgtttcaaggccgagcggctcgatgcccggctgcaactcttcaacctgcggctgctcgacgcgctcggcgagggcaccgcacccggggcattcctcgccggtcatccccttccttacggcgacctgcgcgtaacggtcatcgacgacgacggggacgtcctgttcgacaactcggccgactcgctgcccgcagccaaccacctcgggcgccccgaagtcaccgaagcgatcgcccatggcaccggttacaccatccaccgccactcggaaagcaccgaccaatactatttctattcggccatgaagggcgacgggatcatcgtccgctcggccgtcccctactccgtttcgctgcgcgaagtactcgcggccgactgggaattcctgtggttcatgctgggcgtcacgctgctgatgagcattgcggcctacttcacgacccgccgcctggggcacaacatcacacgcctgaacgaatttgccgagcacgccgagcggggcgagcggatcgacgagcgggagaccttcccccacgacgagctgggcgacatctcgaaccacatcatccgcctctacgcccgcctgcaacgcacgacggccgaccgcgaccgggaacacgcgctggcgctgcacgaggagcaggagaaaatccgtatcaagaaacaactcaccaacaacatcaaccacgagctgaagacccccgtggccgcgatacagggttatctggaaacgctgctggccaacccctgcctgacggcggagaaacgcacggcgttcctcgaaaagagctgtgtgcaggtcgaacggctgcggcacctgctctccgacgtctcgaccatcacgcgtatggacgagggccgggagctcatcggcaaggaacccgtggtgctgaacgacctgatcgacgaggtcagggccgacatggagctgcgccccgaagggcagcggctgcgcgtgaactgcgatttccaaggcccggtcgaggtcgagggcaacccctcgctgctgagttccgtcttccgcaacctggcggacaacgccgcggcctactcgggcgggcgcgacatcttcatccgcctgctttcggacacggcagaggcatgcacgatacttttcgccgacaacggcatcggcgtcgacgaagaacacctcccgcacctcttcgagcggttctaccgtatcgacaaggggcgctcgcgcaagctgggcggcacgggactcgggctttcgatcgtcaaaaacgccgtcgtgatccacggcgggacgatcaccgtacgcaacggcgaacgcggcgggctggaattcgttttcaccctgcgcaaacattcataagggcgcaaccggactgtaacgtttttgtaatatttgtttcagacctttacggcggaaaaatccagaaacaaaacaaaccatgagtcccctattcacttgtatcgtaatcatcatgggcctgctggccgtgatgggcatcgtcgtgggcgtggccaacgacgcggtcaatttcctcaactcggccctggggtcgaaagtcgccccgcggcgcgtcatactttggatcgcggccgcaggcatcctcgtcgggacgctcacgtcgagcggcatgatggaggtcgcccgaagcggcgtattctaccccggacaattctccttccaggagatcatgatgctcttcctgggcatgatgctcggcaacatcctgctgttagacctctacaacacgctcgggctgccgacgtcgaccaccgtgtcgatggtcttcgggttgctgggcgccggggtcgcggcggcgctgttccatatttggggcgacgccggggcttccatagccgacctttcgcaatacatcaacacgggcaaggccatggccatcatcgcggccatcctgctctccgtggcgctggcattcgccgccgggtcgctgttcatgtacgtctcgcggctgatcttctcgttccgcttcgcaccggtgttccgccgctggggagccgtatggtgcggcatctcgctggcgggcatcctctatttcgccctgttcaagggactgaaaagctcggggctgatccccacgtcggtggcggactacgtcggggagcacgtgctggtaacgctgctggcattctgggccgcatcgtcggtggtgctgtggctcctccagcgcatgcggctcaacatcatgcgcatcacgatcctttcgggcactttcgcgctggcgctggcattcgcggggaacgacctggtgaacttcatcggtgtgccgctggccagctacgacgcatggcagatcgcccgcgaggccggcagcgagtcgatcatgatgggcgaactggccgaaccggcacgcgccaatttcctgctgctgctggcatcggggctggtgatggtgctgacactgttcttctcgaagaaatcgcagcatgtcaccgagaccgagctgtcgctcgcctcgcagcacgagggtgaagagcgcttcggctcgacgttcatttcgcgcagcctggtacgtgccacactggtactcaacacgatgtggacggggctgatccccgtccgcatgcagaaggccatcgaccggaggttcgagccgctgcccgcagaggagcgttcgtcggcaccgtacgacatgatccgcgccgtcgtgaacctcacggccgcatcgatcctgatcgccatcggcacttcgtaccagctgccgctgtcgacgacctatgtggtattcatggtggccatgggttcgtcgctggccgaccgcacctggggacgcgagagcgccgtataccgcattacgggcgtgatggccgtcatctcgggctggttcatcacggcgctcggcggattcctgatcgccttcggcgtgacactgctcctgctgtggggcggctggatcgccgtgacggtgctcgtcgcactctgcgcatggctgctggttcgcagccaccgcaacgtcgagcagatcaaggccgccgaaaccaaggaatcgcccgtcgtcagggccgagaccccggacgaggtgctctgcgtctgcatcggcgaggtctgcacgacgatggagcacgtgacgcgcatctacaaccgtacgctggtggcggtattcaaggagaaccgcaaggtgctcaaggagatggtacagtcgtcggacaagctcttcgaagaggcgcgcgaccgcaagtacggcatcatgcctacgctgcggcgcctgcaacagtgcgacatcgacacgggacatttctacgtacaggtggtggattacctctcggaagtgaccaaggcgctgatccacataacacgcccggcatacgaacacatcaacaacaaccacgaggggctcacgaaggagcagatcgtagacctgatgcgcgtgaacgaccaggtggaagcgatcttcgacaagatcaacgacatgctgcgcaccaaggatttctccgacctggacatggtgctggagatgcgcgacaaactcttcgaaacgatcgtcgaggccatcaagagccagctgcgccgcatcaacggcgacgagacggtgagcacacgcgccagcgtcctctacctgacgatcctcaacgaaaccaaaacgatgatcctgcaggcccgcaacctgctcaagtcgcagcattattttttggagcacaaaaaatagcacggggctcctatacggacaccacccgaaccctccttttcgaaggagggttttttgaacgccccggcaaacgcagccggaatacgacaggccgcccggcaaaagcggcacccgcaaaaagcggccggcaatcggccccgccggaggattttcccggacagggcggcatttgtcgccggaacgtaacggggccgtcattcacccgtaacgacggccccgtatctttgcaacgcgggaaccgaaagaaggtttccaagttggttttaggttacataagtaggttagtgggagatgcagtgacgggatgtcgcggcatcttcgttttttcagcgttatggcatgggaagcggaactgccgcggcatagccccgcatctctctgtagaaagggagaccagcgcgcaaccggacaagaccggcgaattatttctccatgtcgtgcaggtggatctccagcgcacgcaccgaaatctggatttcccaaatcgacacgccgagcgacccgatcagcagcaacagcgccgcaccgaagacataggcggaaaggaggatcaggccgatgtagagaaggaacatcgtcaccacgcacaggaacaggctcgtgacgcccaggatctgcatcgtacgcgtgaggtgcaggcggcggcgcaggttgtcgatctgcgcacgggtgactttcgaggggtgttgcaggtgttgttccttgagcgtgcgaaccaactgggcataggaaaggaaccggttggtataggccagcaggatcagcgaaacggcggagaacagcagcgccggggtggtaagtgtcagctcttccataacagggatattttactcccgcaaaactacgcaataatcccgccccgtgcaaacccgcgggcggaagctccctattgttaggtattttttaagtttttttaagaaaatactccgaagatttcggtattgtgataaaaataacatacctttgtggctcccaaatacgacaattttaatctcattttgaataacattctatggaattgaacaaaacctttatcgacgggctttggagcaaggaaatcaacgtcacgagtttcgtgcagacgaacatcaccccctacctgggcgacgcgtctttcctgcagggcccgaccgaacgtaccaagcacatctggaacctctgcctcaaggcactcgaagaggagcgcgccaacaacggcgtccgctcgctggacaacgccaccgtctcgaccatcacctcgcacaaggcgggttatatcgacagggaacaggagctgatcgtgggcttgcagaccgacgagctgctcaagcgggccatcaagcccttcggcggcatcaacgtcgtatcgcgcgcctgcaaggagaacggcgtggacgtggacgagaaggtcagggatattttcacccattaccgcaagacgcataacgacggcgtgttcgacgtctacaccgaggagattcgctcgttccgttcgctgggcttcctgacgggcctgcccgacaactacgcccgcggccgcatcatcggcgactaccgccgcctggcgctctacggcaccgaccgcctgatcgaagccaagcagcaggatttacgcaacctgaccggcccgatgaccgacgcccgcatccgcctgcgcgaagaggtcgccgagcagatcaaggcgctgaaggagatccgcacgatgggcgaatactacgggctcgacctgagccgcccggcgcattcggcacaggaggccgtgcagtgggtttacatggcttacctcgcagccgtgaaggaacaggacggcgccgcgatgtcgctgggcaacgtgtcgtcgttcctcgacatcttcatcgaatacgacctggcgcacggcaacatcgacgaggtgttcgcacaggagctcatcgaccagttcgtcatcaagctgcgcatggtacgccacctgaggatgcaatcctacaacgacatcttcgccggcgaccccacgtgggtgaccgaagccatcggcggacgcttcaacgacggccgcacgaaggtgaccaagacctcgttccgtttcctgcagacgctctacaacctcggcccgtcgcccgagcccaacctcacgatcctgtggagccccgacctgccgcagggattcaaggatttctgcgccaaggtttcggccgacaccagctcgatccagtacgagaacgacgagctgatgcgcgaagtgcgccattcggacgactacggcatcgcctgctgcgtatcgtaccaggacatcggccgccagatccagttcttcggcgcgcgctgcaacttggccaaggcgctgctgctggccatcaacggcggccgctgcgagaactccggcacgctgatggtcaagggcatcccggcgctctcggagggcccgctgcgcttcgaggaggtgatgcgcaactacaaaatggtgctgaccgaaatcgcccgcgtctacaacgaggcgatgaacatcatccattacatgcacgacaagtactactacgagaaggcgcagatggccttcgtcgacaccgacccgcgcatcaacctcgcctacggcgtagcggggctttcgatcgccctcgactcgctctcggccatcaaatatgccaaggtgaccacccgccgcaacgccgaggggctcagcgaaggcttcgacattcagggcgaattcccctgcttcggcaacaacgacgaccgcgtagaccacctgggcgtagacctcgtgtacttcttcagcgaggagctcaagaaactgcccgtctacaagaacgcccgcccgacgctttcgctgctgaccatcacctcgaacgtgatgtacggcaagaaaaccggcgcgacgcccgacggacgtgccaagggcgtagccttcgcaccgggtgccaacccgatgcacggacgcgacaagagcggtgccatcgcctcgctcgcctcggtggccaagctccgttaccgcgactcgcaggacggcatctcgaataccttctcgatcgtccccaaatcgctgggcccgaccgaagaggagcggatcgagaatctggtgacgatgctcgacggttactttacgaagggcgcacaccacctgaacgtcaacgtgctgaaccgcgcgatgctcgaagacgccatggagcatcccgagaactatccgcagctgacgatccgcgtatcgggctatgccgtgaacttcaccaagctgagccgcgaacaccagttggaggtcatcagccgcagcttccacgagaggatgtaaattttcagccgccactgccgcgccacaccacgccggatttccgccgcaggcggacacaagcccctcccttgggaggggtgcggagtggggtcggatttataaattgcggcctgcagccgcagattacgccgaccaaccgcgagcagggcgacaatattcagattatgcttcgaatacattcctacgaatcgatgggaaccttcgacgggccgggactccggctcgtcgttttcctgcaaggctgcaatttccgctgcctctactgtgccaaccccgatacgatcgacgcctgcgggggaaagcccacgcctgcggaagagatcctgcgcatggccacagaccagaaaccgttcttcggacggcgcggcggggtgaccttctcgggcggcgagccgacgttccaggccgcggcgctggtgccgctcgtgcggcagctgcacggggcgggcatccacgtctgcctcgactcgaacggcggcgtctggaacccggcggtcgaggagttgctggggctggtcgacctggtgctgctcgacatcaagcaggccgatccggagcgccaccgcacgctcacggggcgcgacaatgcccagacgctccgcacggcggcatggctcgaagaacacggcaagccgttctggctgcgctacgtactggtgccgggttacagcgacgccgaggccgacatccgcgcgctgggcgaacggctgggcggctacaaacaggtagagcgggtagagatactgccctatcacacgctcggcgtccacaagtacgaagcgatgggcaaagagtacaggctcgcaggcgtacaggagaacaccccggaacagtcggaacgtgccgcagcgcttttccgcgaatatttcccgacggtcgtcgtgaactgaccggcaggcggcgccgggcgcggcgaaccgtgcgtcccggcacaaaaaacggcgcaccgctgcgaaaaaaaaatcgtggcggcgcgctttttttcgtatcttcgcaaaaatccgattaaccccgacaaacagatggagaaccgacttcccaacccgaacgccccggcccgcgaacgcatcggctgggtagacctgttgcgcgtgaccgcctgcttcctggtggtcttttcgcactgctgcgaccccttcgtcggccagttcgacaacgaccgcgccgcattcctcacaggagccttttcgggcagtttcgtgcgctgctgcgtgccgctgttcgtcatgatgacgggcgtgttgctgctcccggtgaaaaccggcctcgccggcttctaccgcaagcgcatcggacgtatcctcgcagcactcgttttctggtcggtcgtgctgccgctgctttattacgtctacctcaattacgtcaccgcaagccagagcccggcgatcgaccccgaaaatttcacctggggcgccacgctgcacaaactctggacattcgtattcaatttcacgttcgacactacgccgttgtggtacctctacatgctcgcagggctgtatttgatcatgcccgtgatcagcgcatggctcgaaagggcctcgcgcagcgaactcaaaacgttgctcggcgtatggggcgtgaccctgctgctgccctacgccaagatgttcgcgccgatgctgggctacacggggaatttcggaaacatggggctctacggcgtctgcgactggaacgaattcgggacgttctactacgtctcgggcttcgcgggttacctcgtgctggcatactacctggtgaaattcccgcccgcatgggactggcgccggacactggccgtctgcatcccgatgttcattgcgggctacctgatcacggccttcggatacgtcgccctgcaaaaccacttcccgggcaactacgcgtaccttgagatcgtatggtatttcgcgggcatcaacgtcttcatgatgacctacccggtcttcgtgatcgtgcgcaagctggacttcaagccccgcgcatggctctcgcggctggcaggcgcgacgttcggcatctacctctgccacttcatcctcgtgcaggccggctatgacctcgtcgcccggattccggcactgccgacgctcctgcgcatcctgctgatcgcatgcctcgccttcgccgccagttacctcgtggtggcggccatgcagcgattccgcgtgacacggcggttcgtacaatagcccggttccgggcatgccgtacggggcggggtgctaccagcactccgccttgtcttcaagcgagggaatacggtcgcgggtatagaccgggtttttgatgccgcggcgccgctggcccacgtagtcggccagcaacaggaacgcctggcgcccgagaaggacgatcgccacgaggttgatgagggtcatgaaggccatcgtgatgtcggccaggctccaggccaggtcaagcgtggcgagcgccccgaacagcaccatcgcaccgaccagcacccggtaaagggttagtacccaggggcggcgggtgatgaaccggacattggcctcgccgtagtagtaattcccgataatgctgctgaaggcgaagaggaagatcgccacggcgacgaagacactgcccgcagggccgatttcgccgaccagcgccgcctgcgtaagccgtatgcccgacagcgaggcatcggggactccgccgaaaaggatgatgaaggccgtacaggtgcagatcacgagcgtatcggtaaagaccccgagggtttggatcagcccctgcttgaccggatgcgacacatgggccgttgcggctacgttcggcgccgagcccatgcctgcctcgttgctgaacaggccgcgcttgatgccctgcatgagcgctgcaccggcaccgccgcccagcgcctgctcccaaccgaaggcattggcgacgatcagctccacgacctcgggcaaccgccggaaattgaagagcacgacgcccagcgcaaggacgatataccccagtgccatgaccgggacgaccaccccgctcacccgggcgatacggtggatgcctccgaagatgaccagcagcgtgagcagcgccaggccggcgccgacccaatggtggtcgaagccgaaagcaccctcccaggccgcgcagatcgtattgctctgcaccgagttgaaggcgaaaccgaatgtcacggagatcagcacggcgaagaggacgcccatccagcgtttgcccagtccgcgttccatgtagtaggccgggccgccgatataggagtcccgccccttgcgtttgtagagttgagcgagggtcgattcgacgaaggcactcgacgcacccagcagggcgatgacccacatccagaacacggcgcccggcccgccgacggcgatcgccgtggcgacgcccgccaggttgcccgtgccgacgcggctggccagcgacacggcgaatgcctggaacgacgagacatgcctctcgccccgagggccgcttccggccgactcgcccagcacgcgcaccatctcacccagcatacgaaactgcacgccgcgcgtacgcaacgtgaaccagacggcgcaccccagcaggagtgcgaccagcaggtatgaccacagcacgtcgttgatgccgtcgatccatcgatagaggatttccatgggaggccgtttccggcaaaggtagcaaagacggtgctaaaaatgaaaaaaggccggatgatccggcctttttccgtagtacgttatttcgtcccgtccacgcggatcgtcgtcccggtgcgcctgctgcgctcggcgtcgtagcagatacggtggctttcgatcgaatcctcgatggtcgtcaggaacggatagcccggatcgcggagcgcccggatgaaatccccgatcaggtgcaggtcggcaccggcatggaacggctgtccgacgatatccgagaaatcgtaagttcgctcgtcgccgccgcggaacctgcgcacgcacagcgtcctctcgtcgccgtcgatctcgccgcccgtcaggcggacgtgcgtcttgcggaaatcgtcggccgtgaacatctccatcgaaaggctcacggtcacctcgccctccatctccatcgcaagcagctgatggtcgaccacgtcgttgtcgcagtggtagacgcaacggccgtacatcccggtgcgaagctcctcgaggatggtctcatcgagggtcttgccttcggggacatcgaagttcgccacccagtcgcggcggacataatagagatcgcgtgccgaaaaaggacaggcggactctatcgcgcagtcgaggcaacgacggcccgcacccgcgggggcattctccgcacggaaccagcgcagcgagccgaaggacgacaggctgcggcaatgcgcgccggtcagccacagcaggaagtcgatgtcgtggcagcatttggccagcaggatcggattcgactcccgctcgcggcggaaaatcccgcgcacgtagctgtgcgtggcacggtcgaggcccacggcagcggtatggttgaccgagacgacctgccccagctcgcccgaggcgacgatctcacggattttggcaaaatagggatggtagcgcaacacatggcacacgccgaccatcacgccccgttcgcgggcgcggcgggcgatttcgcggcactcttcgaggtgctgggcgatcggcttttcgagcaggatgtggtatcccgcgtcgatggccttgaccgccgggtcgaaatggacgttctcgggggtcgagatcagcaccatatcggcttcgacaccatcggcgaagaagtcgtcgtaatgcgcatagctcctgcaggcaggcagtccgaaatcccgggcgaaggcatggcggcgcaggtcgttcacatcgacgacggcgacgggctgcagccggtcgggataccggcgggcatattcgaggtacttattggcccggttcccggctcctatcaccacaatccgcacggggcgggaaacggtcggttcgtttttcatcggaatcctccaaaaggttatatcgggcggcgcggcaattcgcacggccggggctcaatttccgcccgcggcgtacccgctgcggcgcggcacgcccgacaggttacaagtttcgggatcgggtgcggagagttcccgcgccgtcccccgggggtgcccgtccggaaagagattcggacgggcgaccccggcggttgttatttgcggcctgcgcccagatccaacacacgcaggttgcggaactggatgccggcaccatggcccagcaggccgatatggcccgacttgttgaaaagccccgggtggttgcggtggtcgaccgtataggggttgaccttcgaaccgtcctcggaaacattgtgcccctggcaggcttcgcggatattgccgtcgaggatcacccggccgttgaccgtgaccgtaatgcggtcgcccacggcacgtatctcctcggtattccactcacccagctcgccgaacttcacgcgctcggccgggatgacgccgtaaaccgaaccgtgctgctggtaatcgctgatgcccttgtagatcggcgcatcatggtcgagaatctgtatctccatcccgtggaacgcggcatcgacgcccatcggcgtacggataccgatgccgttgttgacgccctcggtgaggaaccggaactcgaagcgcaggatgaaatcgccgtattccccgacggtgtagaggttccccgaaccgccgtaggtggccgtcacgtcgatcgtaccgtccagcggcacataattggtcgtattgcccgtccacttgtggagcgaacgcccgtcgaaaagcacctcgtagcccgcggcagcctcgtcggccgggagggagaagacgggtgtcgacggcaattcgttgatccagaggtttcggaaggcgacgggagcaccctgtccggccagttcgatacggccttgtgcataaaccggcccgccgggtgcgcagaggttcgtcatcacagcattttcggcaactttcacgccgttctccaccagcgtgatacgatcatccacgaccttaacatagagcgtattccacgtccccggagcgttgtcggcaacggttcgggcggccttgccgtccgcgagccccgtcccggcggcaccgcccaggcggatcagcggcatcgagcgcacggccatgccggcctcgccctcggaacgccattcgatccagagttcgaaattctcgtattccttttcagtcccgatcgtcgcgggagccttggcggcaaattcgagcaggccgttcgcagcgccccaattggcagccaccgcctcgtcggcggctttgcggagcttcgccacctgacgggcgggcagcctcttcgcctcggcaggattcacggccacggccgtccatcccgcgagcccgtcggccggcagcacggcgaatccgtccgccgggatcttaccgagcagtcccgtgatttcatccacggcatacccggcgtcggcgtcggatttggcgagttccttatagacctcgtgcgcccgctccaaagccttgcggacagcttcgccgccgggcatcgggttgcacttggcaacgatggtcttcacggccgcggcggccggggcggcggtctgcgcatcgtcgaggtattcggcggccagcatcagtgccgggagggcgtatacgcccgaaaggtagccgagcaatttggcctgcacggcggccgaaggcctgagtgcgagagcctgtctgtaaagctggtagcggcggatcggggtcacggcggcctgcgaagccaggtcggcatagcgcatcagggcgcggtcggtgagcatcggattttcggcagcgatcccgtaaaggatatcggtcatggcaggattttcgaccgtcagcagggcggcgaaagccgcgtcgcggttcccggagcgaaacccgtcgagcaggctggcaacagcctcctgcgtgccgctctgcgccagcacgggatagtaacgcgcaggggtttccgaggccttcatataacctgcgacggcgccgtaccgcctgtcggcggggagttgccccgaggtgcggatcagcgccgactggatcgcggccgtgtgggcctcatcggaagcgtcgagcaatgcggagagccgatccatgtgctgcggctgggcgacgaagggaagcgccccgtaagcggcggcacgaacctccgcgtcggaggagccgagcaatgcgaacacccggtctgcggctgcggacatgcggcgtgcggcagccagtttgagcgcgggaacgagtgccgcggcatcatccttcgcaagcagccgttccacttcggggttgatctgtccgttgaatgccaggagggctttcatcgcggcaccggcatgggggccttcgagcgccccggccaatgcccgtagcgccttttcgccgccgatacggcccgaggcggcaattgcggcctcggccacgcatccgtcgggcgacgctacggcggccgtaatcacatcggcctgcgacacggcgccgcactccccgagccatccgataacggcggcctgcgcggcggcatcgtagcgcggcatgccggctgcaacctgtgcgaaaagtttgtcgtcgcctttgccgagcgattgcagggcggcgaagcggtactccgcagggccctcctcgagggctttgagcacatagggcatcgccttctgcacaccgagggcatcggccaggatcgcgagcgcaccgccgcggatgtactggaggtcgcatttgagcagccccttggcggcctttacggcccgggcgtcgcctgcggcggcgagccttgcgagcaggcgcaggtaagcgtccgcagcgccggcgtcatcccatgcgtagccggtcttggctgcggcagcggccagcggcttgagcgaggcctgcgaaccgcaggcggccagtgcgttatagatctgctccgcggtctgcgcatcggcaccttcgagccatgtcaggagaaacggttcggcagcggcaagccgcttttcagcgaaagcataggcaagcgcttgtttgcgggcagcggtaaggtcgtccttgccggcctcggcgagcagcagtgcttccgtacccggggtcgaaatcagtgcccggagggcatagtcggccaggtaggggtcgtccagataacgagccatagcggcggcatcggaggccgtcgaacagaattgcagctgcgagaaaaggaaagcccggttggcgtcgtcgccgcaacggtcgatagctgccagcaggcccttgcggacatcgtcacgcagcgcttcgtgcgccgggtcggtcacataggccaccacgccgttaagggcgtattcgaacgtggcgttcttgcccttgtcggcagggacgagcatggcggcgatcatctcgacacccttgcttccggtggcggccagttcgcccatcacctggttgaaaaccttggcatcggctgcgggaagctgtgcgagtccgtcggcgacgatggtttccgtcgtgcgctggcgggcatccgattgctgggcggcggctcctgcgggcagcagggcggccaatgcccccagcataaaaagtcgtatgattatctttttcatggtaactggtgcttaaatatgccacgggccgcgcatcggctggtcgatcagtcggttggcggcatcgtcgccgatgaagagttgtttgtcggggtcgaaatgcagcgtgcggttcaaacgcagggcgcaggcacccaggttcacgagcgtcgagctgcggtgtcccttctgctcgtcgagcgcaaacctgctccgcgtgcggacgcactccaggaagtcggtgttctgcggcgcagggtcgggcatctcggccagtttctccatgatgtcggggatcgtgcagcggaaccctttgtagaccttgcccagcgggccttcgatataaggcgtgtcgccgccgctttcgaagccttcgccttcgaggacgatctggcagccgtcgtcgtaggtatagacgatcttacgccagatacccacggcgtcggggtgctgctcgggggcgtcgacctcgaccttcacgggcgaagtttcgtccttgcccagcaggtactgcacgggatccatgtagtgttgccccatgtccgtcaggccgccgccgtcgtagtcccagtaaccgcggaaagtctggtgcacacggtgttcgttgtaaggcttgtagggggccgggccgagccacatgtcgtagtcgagattcgacggaaccctctgcgggacgaggttctccttgcccacccagaagaatttccaggtgaagcccgtggtgcccgagatggtcaccttgagcggccatcccagcaggccgctgtcaatcagcttcttgagcggctcgacggtggtgcccaggccatagaaggtatccgtgaaacggaaccacgtattgaggcggaagatgcggttgttgcgcttgacggcctccacgacgcgcttgccctcgccgatggtgcgggtcatcggtttctcgcaccagatgtccttgccggccttcgcggcctcgacggccatgatgccgtgccagtgcggaggcgtggcgatatgtacgatgtcgacattggggtcggcgatcaggcggcggaaatcgcgataggactgcaacgtctcgttgaaacgctttttgcccaggtcgagcgcgctttggagatgcttgctgtcaacgtcacagaccgccaccagacggcactccttggtgctggtgaagtggtagctgctcttgccgatgccgccgacgccgatgatgcctttggtgagctggtcgctcggcgccacgtgtttcgggccgccgagcacatggcgcgggacgaccgtcagcagcgccatgccgctcagtgttttcagaaaattcctgcgggtactcatatcgtgttcaggttagtggtaattataaggttgtcagacggaaattgcgccagagcaccttgatcccgccgccgtcgtggatctgcagggcgatgcgcccctgtgcggcgccgatcctggcatcggtgatgtcgaccatctcttcgccgttgagccacgtctgcacgcggtcgccctggactttcaggcgcagcgtattccactcgccctcccgcaggatgttctccttctggtcgggaatctgaaccagccagccgcggccgtaggactcgtagataccggccgtatcgaagcccttgggggccacttcgcactgccagccgtggactttcacgggaggctcgacgaacgagcggaaaaagacgcccgagttaccgttggccagttgcttgaattcgagcgtcaggtcgaaatcgttataatattcgcgcgtggcgaggtagccgtactccttgtcggggccgctctcgcaaaccatgttgccgtccttgtcgacataccacttctccgtgccgtaggcctcccagcccgtcaggtctttgccgttgaacagctcgacctcgcggccggccttgcggggcagctccttgatcttcaggttgcggaacgaagcgggcgaaccgtgatcctgcaggcagatcacaccgcggcgcgcaaggccgtattcgggtgcggtctcccatttgccgctgtgcttgcgggcgaaccagtcgtccgtccaggcttcgaattcgaggatcttgtggccgttgagccagtgctcgacatggccgttgtcgaagacgatgcgcgacgagttccactcgccctgcgggttgacgaacagcgaatcgggatcgggcaggtgcatggcgtagtccacgcccagtttctgccactcttcgagtttattgggggcattgacctcttcccagccctcgttgtcgatcagctggtattcggggccggttacgtagggtaccttgaaataggggtcttcgaccacgtggtagatcataccgctgttccctccgtgggagagtttccagtcccagtcgaggatgaagttttcgtactgtttcttcgtaacgatgtagcctgccaggtcgctgccgtcgcccttggcctggatgcaaccgtcgacgacatgccacggcatggtcagctcttcgccgttgtagtccttccactggtcgagcgtcttgccgtcgaacaacagctgccagccgtcggcaatctcctctttggtcagcacattctgttgcggcgcacatgcagcggcagcgcagagcacgagtcccagcccgcacgcttgcgcgagctttctgcgaaaataagttttagtcagcataatttatgattggttaaatggttccgtggccggggttaggacaaaaatacctattatttatgattattccagcgcacgtatagaactatatagaggtttgacaatctatatagcattacatatcagggttttaaaaaccgaatccacaccccggattatatagactatccgaaggttcagagaccgatccgcgacacctgctgctcgaaattgtcccgatccagcgccgcattgcggagtttggtgcggtaggtatagaccgtcgccgaggcacagttgagcagcgaagcgatgtgtccgctgtcggtaatcccgagccggatggccgccagaatccgcagctcggtggtcagcgatgcgtcggcgcggggcgcaaaatgcgactcgggctgcaggaggacgttgacctgttcgatgaactgcggaaaaatgtcgagaaacgaggagtcgaacgactggtagaatttcgcatactcgccgctgacggcctgcgaggtgttcagccagcgcaccagttcgtcgacgcccttgttgcgggcgacgcggcagacttcgcggcggaaagagtcaatctgcttgatgtaatggacggaaaggtctatatagtggcagacgtaacggtctttgatccggttggagtcgaccagcgcgccgttgatctcgcggatatggtcgttcttggcctgcatctcgtcgttcttcgcctgtaactgggcgctcatgtcgatcagctgtcggtggttgccgcgcaggcggcgatgctgccacagcacgcaccacaggatgccggtcaggacgatcaggaagagaccggccaaccagatcgtcgtggtcatcatggcctgcctttgagcgatgttcgaggagatggcctcgctaatcttgacggccgcggaagaggagaccggaatgcgcaccatcgaccggcagtgcatggcgtcatcggacgcgctgcccatataggctgccgcacggtcgtaatccttgcggtcgaacagcagcagcgcaagatcgtacagcgaggcataggaacgggtaccggcacgcaggtcggcgacggacgattcggccaggtaataaagccgcaggtcgtcgtcgccccacgcccgcgcgatgcccgccaggccgtaatagagaagcgccagctcctggtagtcgggatttttggccgtatagggctcgagcaactgtacggcctcggcgaagcggccgctgtcgcgcagagcggcagcggcgatccgcgcctgcgtccactccgactgcccgggcacggatatgtgcctgactcgcaccaccgtatcgcgccatgccgaccgcacggctccgtcctcggcttcggccgcacgccgggcggcgatcgaggagtagcgcgaatgccatgcggcatactccgcagaggacatgccggccgtatctatcctgcggaaaagttcttcggcaagccccagctgcccgcggcccagccagacgtcgatgtcggcaagcagggcgatgcggcggatatcctccgacccggcagaggcggccagccggtaaaggcggtcgacgtaataagccgccgaatccagctggtaggtcacgtaattctgcgacacggcgaacaggcgccacgcccggtcgccggcgttgcgggcacgcgccacctcccggcgcaggctgtcgttctgcgcctgccgccactgctggtaacgatccttgcgggagagttccgcatccagccgttccagcaccgcttcggtctggagcgagtatttcgggtgccgcgtacatcctgcgaggaaaatgcaagccagaagcacccacaggaagccggatcgggcgggaagggttcgcagcatcatgggttcgggttttgtgtcagacaaaaataagacaaaagccgttcaatacaaactttccgggcataattcgtccgtcccgccatgggtaagcgccccggcacaacaggcccgatgccacgaaaattacagccaaatacctcgccccatgcagaaaaacaccgcacaagcggaaaaatatcgagcaaaaccgttaacttcgcagcaaacgcaaacgacaatgaataccgaagcaaaccgaaagacagagtgggtcgtcgggatcggcgaagcactctgggacatactgcccgaagggcggaagatcggcggcgctcccgcgaacttcgcctaccacatgtcgcagttcgggctgcgcagctgcgcggtcagcgccgtcggcgacgacgaggcgggacgcgaactccgcaatcagctccgcgaaaaaggggtgggacatatgctggaaacggtgccgttcccgaccgggacggtcgaagtcacgctcgacggggcgggcatccccagctacgagatccggcagggcgtagcctgggacaacatcccgttcaccccgcagatcgaggagctcgcccggcacacccgtgcagcctgcttcgggtcgctggcacagcgcagccccgtatcgcaccgcacgatcgggcgtttcctggaaacgatgcccgacggcgagggacaatacaaggtcttcgacatcaacctgcggcagcacttctacacgcagcaggtggtcgaagagtcgctgcgaaagtgcaacatcctgaagataaacgacgaggagctggccgtggtcggcagcatgttcggcatggaggggatgcagcccggggagcagtgccgcacgctgctcgacaggtacgggttgcggatcgtaatcctcacctgcggtgccgccgggagttcggtattcgcccccgacacccggtcatatatccccacgccgcgggtcgaagtggccgacacggtcggcgcaggggactcgttcacggcatcgttcctggccgccctgctctcgaggctcggcatcggggaagcacacaggcttgccgtggatgtcgcggcccacgtctgctcgcagcacggcgccatgccccggctgccggaacggtttaccgctcggctgcgcaatgacggccccgccatacgatagggacgaccgagacgcaccgaagaggcatcccgccccgggccgccgctcccctatccggcataactgtgcatgccgcccaacaggaaattgaccccgaaataggtgaccagcaccgagaggaacgccgcgatgcagaaccaatggaaaaacaacggccggcgaaaccacggcagggaaccggcatgcaggggcagcgcataaaccagcagcgtgacgagcgcccacacctccttgggatcccagccccagtagcgtccccacgacacattggcccagatggcaccgacaaaaataccggcagcgaggcagaagacggccggatagagcatcagccggctgacggcctgcagctgcgcggccgccccgcgggcgcggcggtgcaggacgacccctgccacgccgccgaacatgacgaacgccagcaacgcataggccaccatgaccagcatcacatggatgcagagcagcggcgagtcgagaaccggcatcagctgcgtgatctgagggttcgactcccccatcatcgaaaccatcagcgacagcccggcgatcaggtaaccgaaaggcagcaggaacaggaagcggcgggcgaagagcagcgtgagcagcagcgtacaccatgccatgaagcgcatcgtttcatagccgttcgaaacaggccagtggccgctgacataaccccgcagcgccagcatcagcgtaagatacagtcctccggcggcaacgcccgcaaggagccagccccgggttttcgccccgaaagcccgcccgcgcaccatccggctgcaggcattgaggaatcctccgatcccgatcaggatgaatgccgcggcgagcggcagcgaccaatcgagccggttatagagtttttcggcacggaaacgcagcccggaaggcatatgcgccccgccctccttctgctggtagttgcgaatcttgcgcaacacccctgcgccccccgcccaatcccgttttacgaccagttcgctgacgtagttcatcgcccggccgataaagagcgcctgcccgtgaggcagctcccgcggcaggtcgtcgacctgcgacgcccagcgcagcaggctgtccgaagggtcggtatagggaaaaatccgcagcatactgcccgtgcagaccatcccgatgatgttgaatttctcatcggcctcgcccgccggacgcccggcagccccttcgaggcggtattcgttgacccggttgcggaaatccgacagccgcgcataacgcccgccgacctccagcaggcggcgtgccccggcactcctgatgcggatcatcggttcgcgtttccagtcgtcgtaatagaacagccagccggaaagcacctgctcgggcgtaagtccccggtagcggctcttcccgcagagtttcaccgtaaaatccttagccagagtctgcaacggacagatacgatcgttgtagtagacatacaggtcgcccaattccgcggcgaccttgcgcggaagcgtctgcggcaaggtgtcagccgcccgggcaccctgtacggccgccgtacagaggacaaggcacagcgccgccttgcggagcgcagggctgcgcagcaaccgcctgaaacccccgcgcctgtcgcacagaaacgccagcatggaaacgagcagcagcccgtacccggcataggtgatgtcgatgccccacggatcatacgaaacggagagggtcgtaccccgtccgtcctcgtcataggcggactggtagaaccggtaattccggaaaaccaggatgcggttcatgccgacttcaccgtgcagcgacccgtcgtcggccgtcagggtgagaaggctgacgaaatccatcggcgcacgggtgccggcataatactcgatgcggaaatcgtccagccgggcccggaagggcagtatttgctccgaaccgtcacggccggcgaatgcggtcgccccgggatcgcccgtgcgcaggtgcaacgtcccctgccggccgaagagccatgtcacggaagcccccgcgaggatgaccgcgaaagagaggtgcagcaacaggacggcgggcctgcgccacaatttccggcggaacaggcaggccagcgccgcgagggtgaggacaccccaaagcgcggtgaaccagcccgcgccgtagatatgcgcagcggcgaaatccgtaccgtatatcttttcaagtaccgtggccgtaacgagcaccgccatcacggctccgagcagcccgaaggcaaggcgtttcaacagtttcatccgttcgttcgtgtgtgaatgcgtcgtccggacacggcaaaggccgatgcacggggcaccggcgcttcgcacatatccgggaagggttagatggattcgatgaatttgaccaccgcgtcgcggtcgtccttgctcagcgtgcggaacttctcgaccgaccagcgggcgtcgctctgcgccgcgccatgccacatgatagcctcgatgaccgtccgcgcacggcaatcgtgcaggcggtcgctggcgcccgtgcacttctcgctcaagccgcggccccagagcggcgtcgtacggcaccagcccgtgcggatgtcgttcaccatgaagagccggtgctgcaccatgtcggagtagggccagatcttctgattaggataacgcggcaggcggctgtcgccgtcggcaaagaaaccgttggggtcggtaaagacatcgtcgcccgtcgtccaggtcggacggtggcaggtggcacagccgatctcggtgaagagcgtcttgccgcgtttgacgtccgcatcgtcgaggttacgcgccgccggtacggccagaccgcggtgccagaccatgaagtcgacatagtcctcatcgctcatctcgacaggcagttccttgttcatcagatagttgtaaatatcctgcgcaacgtcgcccgtcttgttccacgccgggaaaagcgtgtagaaatcccgttgcacatcggcgtccttcgacgctacttcggcataagcagcggtcatgtagtggtagcggcggtcggagcgggtcacgttggtgatgttccagatagcattggcacccgccgcatcctgcaacgggccgcggctcagggcataggtatagcgcagcggatgggtggtcgtcccgtaggtcttgacccactcgccgttcttgaagatcgcgggattgagcggcacgccgttctgctcctggcgaacgtactcggctttcaggtcgctgtctgaaatggcatccagcaagcccgtaccgtagatgccgatggtcgattcgaggcgcacgcgcaccttggcatagggcacctcgcccttggcgccgatcagcggcacgtaataggcgtcctcggggatcgtcacttcgggatagatcaggctgtaagactcgccgtcgggaaacttattgccccactcgtcggtatactcctgccagccgatcatgatcttcgattcgtcgatcggggctttgaacggcgccacggcccgcgtttgcggcataccggtgagcgatgtcaggtaattgtcgtcctcgtcggtgatgaccagcagatagccgttgccgatctggttggtgttgaacgcgccttcgatacgcttgccgtggccgtagcccgggtggcagtgcaggcacgaggtgcggatatagagcggcccgaggccgtagcgcacacccgacgagttggccgtgaagggtttttcgaacagcgcctcaccgttcaggaaacgctgcgtcatcgcggcgtcgtcatcgacgaccggcgtaggctgctcgtaggccaccgacgtagtgttgaaagccgtgccgagcttgccgccggcgtaatactcctcaggaacagggtcgggattcggatcgggggcgggatccgtccccttgtcatcagcgcacgcggcagccatcagggctgccgacatgaacaggctgtaaatcaagtgctttttcattgctgaaaatggttatttttcgaccgacagtgccgtcagcgccttcgtaagcgcgttcacaaggtcgttattgcaataggtggcggcatccttccatgcctgtgccgtacggttgtcgacgaacggggccgggcaggcctggatcttttcgatcgccgtggaaatcgcattgcgaacctccgtatcgaggacagggtctaccacctcgatccagtcgctcaccgaagcgtcgccggaggtcatgccctgataggtgttccggatgctgatgatgttgtcgatgaaatcggtcttcgaattctggctgtaaggcgactcgatgtaattgatatcctcggagctggttccgttggccggacggccgatcttctgcgagccgacctccgtggcgatgtcgatgcagccctggatgatctcctcggcggcatccttatagttgcggtacttgctgccgcccttccccgaattgcgcatcgaagcgccgtagtcgaaggtcggctccagttcggcatcgcccaggatcgtctgcttctcttcggtgacattgtccagccccgcccacgaagcttcgaggcgtacgcacatgttgcacagatcgttggccacaccgaccaggtataccaactggggacgggtgtatttgccgagggcgcgggggcccgcattctcgaagagcatgtattccaacgcatggaacccgagcaggccgtaacccagattggcgctgacataatcgggattcctctcgatctcggccatcatactgttgttgttcagcaggttctgaagcgccgtgccgtccagcggccaggagtcgatatgcgggtcgatgtcgtaatcggccgcagcgccgtaaaggtaggcctcgctgagctcccagtgcttgcgcgtggtgatccagtcgttgcaggcggcctgcaccagcggggtcgtaagggttcccgcgtcgaaagcctccagcatggcctcgcaatcctcctgcaaggcgatgctcccgtcggccagggccttataggtcggaatcacgttattgtcgacgaaatctacggcagcatccttgagcgcctcttcacgctcgtcggcaaacgtgtaatcgccgtcgctgtcgctgcacgatgcggccccgagcgccaggacgagtgccgcggctgcataaacggaatttttgaacagatttttcatattctcattatgatttggttaacgtctgaaaaagccggaataggcgatccccagcgaaagggagggctcattgttgaaacgccccgtgcgggtctccccggtggcggagtcggtatagtcgtacgaccggagcaggccgatgccgtactcggccttgatgacaatgttcttgatcggataataattgaacccgacggctacccgctggcggccgcaccagtcctggcggatcaccgacttggcggtatcgaacatcgaatcgtagaactcataacggccgaagacgtagaagcggtgtcccctctccttgagcttgcgtatctgcgagaagatgtcgtaaccggcttccacccccgtggcgatggcgtccgaacccacatattgcttgggcgagggcgatgcgttgggcatatcgcggttgaactgggaaatcttgtccgaattggtcaggtgcccgtagtcgaagttaccgcgaacgatccagttatgggcatcgtagaggaaatcgaaggcgccgatcatcaccgtacccttcacgtccttgtatctgtccgcaccggtacggttggcactcagggtattgctgaaactgttgcccgcatagccgctcaggctcaggcgcaagcccgggacggagtagttgtcgatgcggaacgccccggcataggcattggcgatcttgaattcgtaggggcttccggcaccgccgctgacccaaccgttgtcgccgaaccggtcggaatccagtcccgacaggaacatcacctcgtaacgccagtcaccggcacgtccccagaggctgatgcccgtttcgtgccatgtgcagggcaggatcgtattctcgccctcgggacggtagaccccgaagaactcggtgggcatgtggtgctggttggttccgccgacaggcacgatcatatgccccaggcgcaggttgaaggccgggctgaagcttttctggagccagaactgttcgagggcgacctcgccgccgcgttcgatctccgactcatactcgccgccctcctcgaattcggtttcgaaggcgctctccgtgccgccgtgctcgaattcgatctcggtgcccatcgaccagccgcgcccgaaatcgtagcccaggtagatgaccacgtgcgggaggtcgaagcggccgtggcttttgtcattcttgtacttgtcggggctgatataacgcaggtagttgtcgctgaaaaaattgcgcgtcatgacggcttcgccgtacccgcctacggtcagccgtgagggtttgtcggcctctttgctgacggcggtcttcacttcggaagagagctcggcacggatctccgacaggagttcggctttcagctgtgccttcagcccggcattggcagccgaatcggccgcagccgcagattcggggacggggacagggacaggggcgggggcggtcgcagcctcctgcgcatgcagggtaatacccgtcagtaataaaatagaagtaaacagtaaaattccaagacgcatatttccgtttattttgtttgcagtggcaaagttaaggtggccgccgagcccgggcaattccctgttttaggtaattttcgggacagaataataacatgtaggtattgctttccgacggtgcgggaatccggcgggtgccggtcgtttcgccggcgttttttgccgtttcgccggatacgggcatacacgaacccgcaaccggccccgtttttacgacaaacggatgcaattgtacctttcggcagcggaggcatagcgggttttttcgtatctttgcatatccctcattaaagacaacctctccggtatgaaaaaaaagaaatggatcatcacgtccgtcatcctcgtagtattctgtgctgggctgttcgtttacaaccactaccgcggcagttcgtccgcccccgacccggcagcaatcagcataccccggaaaaatagcgtcctgaacgtcaacgggctcgtcgtgcgaccgcaaaccctcacggacggaatcacctcggtgggcagcctgctccccgacgaggaggtagacctctcgttcgagacctcaggcaagatcgtctcgatcaacttccaggaaggctcgaccgtccgcaagggcgaattgctggccaaagtcaacgacaaaccgctgctggcacagctgtcgcgctacgaagcgcaactcaaactggccgaagaccgtgtttaccgccagagcgccctgctcgaaaaggacgccgtcagccaggaagcctacgaacaggcccgcaccgaactggcgatgctcaacgccgatatcgacatcgtgcgttcgaacatcgcgctcacggagctgcacgccccgttcgacggcgtgatcggcctgcgcaacgtcagcgaaggcgcctatgcctcgccgagcgtcgtggtggccaagctgaccaaaatcaaaccgctgaagatcgacctttccgtcccggagcgctacgccagccagataaaacccgggacgcgcctcacgttcacggtcgaggggtacaacgagacgttccacgccgaggtatatgccaccgagtcgaagatcgaccccaatacccactacttctcggtgcgtgcgcactaccccaatacgcggggcaggctgctgcccggacgcttcgtaagcgtaaagatccggatgcacgacatccccgacgccatcgccatcccgacgcaggccgtcgtccccgagatgggcgtggacaaggtattcctctacaagggcggcaaagcccacgccgtagccataaaaaccgggctgaggacggaatcgcggatacaggtcgtcgaggggttggccccgggcgacacgctgatcgtctccggcacgctccagctgcgtgaagggctccccgtaaaactcgacaccgtcgaataaaaccgccgccgcatgaatatttccgaactgagcatccggcggccggtaatggcatcggtgctgacgatcatcatcctgctattcggtttcatcgggtacagctacctcggcgtacgcgaatacccgagtgtcgacaaccccatcatctcggtgacatgctcctatccgggagccaatgccgatgtgatcgagaaccagatcaccgagccgctcgaacagaacataaacggcatcccgggcatccgctcgatgtcgagcgtcagcagccagggacagagccgcatcacggtcgaattcgaactctcggtagacctggaaaccgcggccaacgacgtgcgcgacaaggtgtcacgcgcccaacgctacctgccccgcgactgcgaccctccgacggtcaccaaggccgatgccgacgccacgccgatcctgatggtaaccatccagagcgacaaacgttcgctgctggagctaagcgagatcgccgacctgacggtcaaggagcagttgcagacgatcaacaacgtcagcggcgtgcagatatggggtgagaaacgctactcgatgcgcctgtggctcgacccggccaagatggccggatacggcattacgcccgtggacatcaagaacgccctcgaccgcgaaaacgtagagcttccctcgggcagcatcgaaggcaacaccaccgagctgacgatccgcacgatggggctgatgcacaccacgcaggagttcaacgacctggtcgtacgcgaggcctccaaccgtatcatccgcctgagcgacgtgggacgcgccgaactggggccccaggatacgcgcagctacatgaaaatgaacggtatcccgatggtgggcgtcgtggtgatcccccagccgggagccaaccacatcgacatcgccgatgcggtttaccagcgcatggagacgatgaagaaagacctgccggacgacgtggtgacctcctacgggttcgacaacacgcgcttcatccgcgcctcgatcgacgaggtgaggcagaccgtctacgaggccttcgtcctggtcatcatcatcatcttcctcttcctgcgcaactggcgcgtgacgctcatcccgtgcatcgtgatcccggtctcgctcatcggcacgttcttcctgatgtacgtcgccgggttctcgatcaacgtgctgtcgatgctggccgtggtgctctcggtcgggctggtggtcgacgacgccatcgtgatgaccgagaacatctacatccgcatcgaacgcggcatgacgcccaaggaggccggcatcgaaggcgccaaggagatcttcttcgccgtcatctcgacgtcggtcacgctgatcgccgtgttcttcccgatcgtcttcatggagggcatgaccggtcgtctgttccgcgaattcagcatggtgatatcgggcgcggtggttatctcgaccttcgcggcactgaccatcaccccgatgctggcgaccaaactgctggtgcggcaggagcgcaaaagctggttttacagcaagaccgagcccttcttcgtggggatgaacaacttttaccagcgcacgctggccgggttcctgcggcggcgctggctggcattgccgctcatcgccctgatggtcggactgatcggctggctgtggcgggccatcccggcggaaatggcgccgctcgaagaccgctcgcagatttcgatcaacacccgcgggtcggaaggcgccacctacgaatacctgcgcgactacaccgaggacatcaaccgcctggtcgattcgctcgtgccggaggcaaaatcggtcacggcacgcgtatcgagcggttcgggtaacgttcgcatcgctctgacggacatcgcggagcgcaaacgttcgcagatggagatcgccgaggagctttcggcggccgtgcgtaccaagaccaaggcccgcgccttcgtgcagcagcagagcaccttcggcggccgccgcggcaacatgcccgtgcagtacgtcctgcaggccaccggcatcgaacggttgcaggaggtgctgcccgaattcatgcgcaaggtctacgaaagccccgtgttccagatggccgacgtcgacctgaaattcagcaagcccgaggcgcgcatcatcatcaaccgcgacaaatcgaacctgctgggcgtctcgacgcgcgacatcgcccagacgctccagtatggcttgagcggccagcgtatgggctacttctacatgaacggcaagcaatacgagatactggccgaaatcaaccgccagcaacgcaacaagcccgccgacctgcagtcgatctacgtacgcagcgacaagggcgagatgatccagctggacaacctgatcgcactggaagagaacgtcgccccgccgcaattgtaccactacaaccggttcctctcggcgaccgtatcggccgggctggcgaagggcaagaccatcgggcaggggctcgacgagatggatcgcatcgccgccgaaacgctcggcgacgatttccgcacggcgctggccggcgactcgaaggagttccgtgaaagttcgtcgagcctgatgttcgccttcctgctggccatcctgctgatctacctgatcctcgcggcgcaattcgagagcttcaaagacccgttggtcatcatgctcaccgtgccgctggccattgcgggggcactggtattcatggccgccaacgggcagacgatgaacatcttcagccagatcggcatcatcatgctcatcggcctggtggccaagaacggcatcctcatcgtggagttcgccaaccagaagcaggaagcgggaatcgacaaactgcacgccatcgaggaagcctcgctgcaacgcctgcgcccgatcctgatgacgagcgcctcgaccatactcggcctgctgccgctgaccgtcgccacgggcgaaggtgccaacggacgtatcgccatgggtatcgccgtagtgggcggtatggtggtatccaccctgctgacgctctacatcgtcccggcaatatacagctacgtatcgacagaccggagtaagaaacagaaataaggaagcccaatgaaacgagtgattttatcggccctggccgcggggattttcgcaacggcggcggcacaggaggagctgaccctccgcaagtgcctggaaatagggttggaaaacaactacgacatacgcatcgtgcgcaatgaggagcgcatcagcgacaacaatgccacggcggcaaatgccggcatggtgccgacgatcgacttcgaggcgggttattcgggggcgctggacaacgagcgcaccacaccgcgcgaaggggacgcatggtcggacaacggcatctacgaccagacgttcaacgccgggatcaacctcaactggacgattttcgacggattacgcatccgcaccaactacaaaaagctcaaagagatgcaggagatgggcactgtccgcacccgcatcacgatcgaggacttcgtagccagcctgacggccgaatactacaattacgtccagcagacgctgcgcctgcagaatttccgctatgccgtggcgctttcgcgcgagcggctgcgcatcaccgaagcgcgggtcagcgtcggcaatttctcgcgcctcgacctgttgcaggcacgcgtggacttcaatgccgacagttcgaaatatatgtcccagcaggagctggtttcggcttcgcgcatccgcatcaacgaactgctggccaacaaggacgtcaacgaaatgctctgcatccgcgactcggtgatcgaggtcaacggcgagctcaaatgggaggagctactggcacagacgctcgacacgaatgcctctctgctgctggcagggcatgacaatgtgctggccgaactcgacctgaagaccgtgcaggcgcgcaactacccctatctgaacctgacgacgggatacggctacacctacaaccgtttcgggaacgggacgacccggtcgcgcgggacgctgggactgaacgccggggtgaaactcggcatcacgatcttcgacggcaaccgccgccgggagcagcgcaacgcccgcatcgacgtggaaaatgcgcagctcacgcgcgaaaggctcgagcagtcgctgcgtgccaacctgtcgaacttctggcaggcctaccgcaataacctcgaggtgatccaattggaaaaagagaacctgatcgccgccaaggagaactacgagatcgccatggagcgttacctgctgggcgacttgccgggcatcgagatgcgcgaagcgcagaagagcctgctcgatgccgaagagcgcatcctcacggcgaaatacaatacgaaggtttgcgaaatatcgttgcagcagatcagcggcaacgtcatgacttacatggaataaacccgcggttcattatttctcgccttggggcatcggagaacgggcggagaggaaatcgcagaacggctgcctgtaattcccgcagacagggatgtactccttgcgaagacgatgcggttgcggccgatcacgcggattccggcgggcaagtccccctgcaaaacaagggagcccggcgtaacgcacgccgggctccctctcctacccaacctatccgggccctgcccggacatcgttacccgttacaaatcgatacgcttgcaggacgcacccgccacatcgaagggcttgtccacgccgggtaacgaaaccttatgttttttttcatccatattgacaacgatatagaccttgcggccgtccggcttccgccactcggcggccaacaccgacgcgtcatcgccgaacccggggatcttcacgatgggattgtcgcccgccggggtgagctcgcggatgaagaggccgccgtacacgacatcgtgcaggctgcggcggaaatccatgagcgtcttcatgaaacgcgcctcgctgacggcctgttccgacatcagcgggatggggtcgacccacccgatctgcgaaccccacaacaacgccttcgccagttcgtaacggaagtcgcccagcgacatcttatccgcctcgctcggcgtataggtgaaggcactggtgacggcacggtcggaatagaccatcgggaacaccggccggatgatgcagttgtcctcctcatggggcgtattgacgaccagcagcatgtcgaacaggtcgatatagcactcggcattctcctcgctggtcaggatcctgtcctcctgcaggtggtgtgcgcggatctcgccgataagcctgcggtagccgtcgtaccagaaatcgccgcccccgaccggatggccgtgcgcctcgttccaacagggctcgggcgccgccgcagcgatctggtcgatatagattccgttcaccccgatcgcgtgttgcaggctgtccaccagcccgatgatcttccggtgccagatatccgtcgaggggcaggtcaccgtattgaggactttcgacgtggggtaaatctcggtatagagcgaaccgtcgggtttacggcacgacgcgtcgtaaccgcggtcgcgcttatagctgtcggccgccggatcccagagccggccgttgatatagggcgtcacacgcgcgcccagagactgggcatcacgcaccatccctgcgaaacgctcctgcgcgggcaggtagtcgggatagtgggtatcgtaggggtaatgatgccagaaataccagtgcacacccagcccttgcccgaaataccgggcggcacgccggacagcatcgtacgtctggtcggtcacatgcttggcacgcacccacgcgtcggcatcgtaacaccactgcgggatattgcgcgaggcgagcggcttacgaccccactcggtcgtgaaggtaaacggacggtaccacctgacaacggcatcttcccaacccttcggcgtgaaacccgtgaccgagacccacggcaggcggaacgtcccgtccgcgatccatccggccgaggcggggatggcatcgctgaacgtaaccgtcgtcggcgtacactgcgccgaataggtctttccacagccgcggcggtcttccgtcccataatagaacgcaccctcggcattgtgtaccacgaggaactgcatggcggaggcatgcgacgggtaacgggcttcgaacgtggcgatgtcgagcggcttctcgacgccccagccttcggtggtaatgatcctgccgtcttcggggcgttcgatcacgacattggggaatttcagatacgtgaccagccacccggcgggcaggtcggcctctatattccattgcagcagctcgccgccgtcgggaagtgtcacgtacatccgcacgggatatttcaccagcgagtagtccagcgtcagctcccacgtgaacaccaaagttttggcatgggcgtcatcgcgcacctgcaccccgcggtaaacggcgtgctcgggtttcaactccgggttttctccctgggaacctttgtatatcaggatccacggcgtttcgttcttgcctgccgcgacgacctgtttcccgttgagcaccagtttctcgatgtcgaagcttccgctcccgctgaaaacggcctcgaccgcaccgttcgacagggtgtagtcctcgccgatacggcttgcggccgttttatcctgtgcgaatatttgcgtgtgtagcaggaggcccgccaccagcatacaacaatttttaatcatcatttattccgggtattttattgaattttcaactcagcgcagttccatgcggtacggccggcgtagccggatgcgggcataaacggcaaatataatatacataggtataccttgttagccggtaagcccgaaagtttacaggacaaaaataagcaaaaatattttacttacaagcccaggaacagtaaaaaacttttcaaatcatcgaagcggcaaaaatcagggcatgcaattattatccgtcaggaacaattcgagaacaagcgaaatataaaaatataaaatattgtattacacaatcttaagaacaaagaccggcctaagccagtgcccagaagccaagtgcctgataaaaaggatattagtttttcaaaaaaaaatcatggctcgaaagcaagaattaaaacattgacaatcaataaattaaatacactaattcgccgacgggcaaatcgcgccgcaccgcattaaagtaaaaaaacttatcaaaaatagtaatgataataattttattgttatatttgttaccggataatgaatacttttaactgaatttcacagaaaagaaagtaccacacaggccgtatgttgtcgtgtatcaagttctttcggcattgacagccatatcggcagacgaattataaaaccgactaattattcaccatacctacaaactaaaacatgcctatggtaaaacagacgagacccgaactattgacttcctgaaaacactaatccaaagtgcttctagccaagcaaggatcaatccaacacgtacgggcctgcggcgcccgaccgacgcccgaaccgtacaaatctacattaagtaattataaatgaggaaatatgacaatgactatacaaaagctcttttgtaaaataatgctccggtcattcgtgttgatactggggcttatatcggttacggaattgagcgcaaatcccgaatttgtgtattccgcaagcagcctggaatcgtctgttaccgccccgcaaggggggggggaacgtcaagatgaccggacgcgtcctggacgagaccaaggcgggtgtaccgggagccaccgtgatcgtcaagggcagtacccgcggtgtcatcacgggtaatgacggtaccttctcgatcgacgtgaagccgaccgatgtaatcgagatttcgtacctgggttatgaaacccagagcattcccgtcggaacgaagaccaacatcgtgaccgagctggtgcgcaaggtttccgaactggaggcggtaaccgtagtcgcatacggtaaacagcgcaaggagagtatcatcggcgccatcaacaccatcgacgccggcgaactggaagtggcaagcggctcgctctcctcgaacctcgccggcaaactggcgggtatcgtcgtgatgcagcgtacgggcgaacccggatcgagcgccgagttctggatccgcggacagagtacgttcggtgccaaaaccaccccgctggtgctcgtcgacggtatcgagcgcgacatggactttgtcgacgcggacgacatcgccacgttctccatcctgaaggacgcaacggcgaccgccctctacggtgtgcgcggtgcgaacggcatcatcctgatcaccaccaaacgaggcaccgaaatgacggcgccccagatccgcgtcaaggccgaattcggcattacgcagcctgtccagctgcccgagctggcgaacgcttcgcagtggatcgactactacaacgaactctaccgcgacagcggcagcaccgagatgccgatttcggactatgcccgccagatgtacctgagcggccgcgaccccgacctctatccgaacgtcgactgggtcaacaccatcttcaaggacttggccatgaccgggcgcgtacacgcgagcgtcacgggcggctccccgaaaatccgttactacgtttcagcatcctactacacggaaggcggtatgttcaatgtcgcggacaatgaccgttacgatgcccagatgaacttcaacaagtacagcttccgctcgaacatcgacatcgacattaccaagtcgacgcagctgggtctttcgctgtctacgcagtataccaccaagaacgcgccatgtacgagcacgaacgacctgtacgcctatacgatgtacgtaacccccgtggctacgccgaccgtatattccaacggcatgctggcgatcccgcaggagtcgggctcggtcaacccctacaacatgctgaacaacaccggatacagacgttacaacaccatggtggcgcaatccctgttgtcgcttacgcaggatttctcggacatcattacccccggactgaaagccaatgtgaaattcgcatgggatgcccagaatgcgaccctcctggagcgggcaatgtccccggtaacctactacgccaccgggcgcgatgaaaacggcgaactgatgctgaccgctgccaatcccaacggcagtaactatatgaagctcgcaacatcggactcctcgggtacgacggccatcaatttcgagggctcgcttatctatgagcgcctcttcgcggaagaccaccgcgtaagcggcatgttcctctactcggtacgcagcaaatccaagaacaggccgctcaattacatcgacgcctacccgactaagaacatgggtatcgccggacgtttcacctatgccttccgcgacaagtatttcgccgagttcaacttcggttacaacggttcggagaatttcgctcccggcaagcgctacggcttcttcccctcctacgccgtaggatacatgatcagcaacgaaaaattctgggagccgctgcgcgacaagatcaacatcctgaagatccgcgcctcgtacggtaagatcggtaacgacgaaatcggcggaagccgccgcttcgcctacaatacgaccatgaacaccaatgcaggcgggttccttttcggcgatctgggacagaccagtctgcccggttattcgaccggcgagtacggcaatcccgacgttgcctgggaagaggcgacgaaggccgacgtcggtatcgaactggggctgttcaacaagatcaagatccaggcggactatttctatgagaaacgcgaaggcatcttcatccagcgcgaatccaccccgtcggtggtcggcacgaaaacggcgcagtgggtcaacctcggccgcatgaagaaccagggtttcgacatgtcgctcgaattcgaccacagcttcaacaaggatttcagcatatcggcacgcggtaacttcacctacaaccgcaacaagaaactctacgacgacaaacccgaccagatctggaaataccagaacctcgccggctttgccaacaaccagcagttcggcctgatcgccgaaggactgttcgagtcggaagaggatatcgccaactggcccaagcaggatttcggtaccgtacgcccgggtgacatcaagtaccgcgacgtcaacggcgacggcgtggtcaacaccttcgacaaggtggccatcggctatacgctcgtaccggagatcaactacggtttcggcgccagcctcaaatggaaaggcatcgacgtatcggtattcttctcgggcgtgggccacgtgacccgcatcatccagggccagaaccttttcggcgcttcgtcgacgatcctccgcatgggacagattttcgaggatgtggccaagaaccgctggacgctcgacaaccagaatcccaacgcaccctacccccgtctgtcgctcaacaaggtggacaacaaccagcaactttcgacctactggcagcgcgacatgagtttcctgcgtctgaaagacgcggagatcggctatacactacccgaaagcatgaccaagaaatggggcctgtccaagatcaggttctatatccagggaaagaacctggttacattcagcgatttcaagctttgggatcctgaggtaaatgcgaattacggtaatgtatacccccttatacgtacctttgcaatcggtgcaaacgtcaacttctaaaaaaggataagctatgaaaaaaatacgaatattcgcaaccgccttcttactggcctttacgctgtcctcctgcgagtcgttcttcgacgtggaactggacgaccaggccaagatcgaggatattttccggcaaaaaaccgaagtccagaaatacctgagccacctttactcctacattccccaggaagaagaggtcgtaggcatgcacggctggacggtaggacgctccgacgaagcgctcttctcgtggtaccagtgggtctactacacccagttcagaaccggtaattacagtagcgccacgaccaacttcaattactggccggattactacatcggcatcaaccagtgctccatcttcctgaaatatatcgacctcgacaaggaagacaccccgacgacagttgcctatatgaaggccgaggcccgcttcctgcgcgcctactactacttcctgctgttccgccaatacggcccggtattcatctggggcgaccagatcgccgacgagacgatcgacgccaagagcgtagaccgccacaccgtacagcagaacatcgacttcatggtcggggagctcgacgcaatcaagaacgacctgccggtacgcaccgacgacatcggtatcgacggcaaacagtgggccggccgtgttacgcgcggtgcagccctggcgctgaaatcgcgcatactgctttacgcagcatcgccgttatacaacgggtgcgacctttacaaaggccagatgcagaacattcgcggggaattcctcttcccgcagagcaaggacgagaccaaatgggaggcagcagcacaggcagcctgggatgtgatcgagttggcagagaccggtttgtacgatctctacaaggatacggaacagaccgatgagttcacgcgttacatgtcctcttatcagggcgtaaggctgaagccctggaacaaggagaccatctggggctggtggagccgctcgggcagttattcgtggcttggcggcaccggaggtctgctggcatgcgccatgcccggcatgacaagcggcggcgcatcgggtgtcgttctccagggatacggcggtatccaaccttcgctgaaattggtagacagctaccccatgtacacgaccggacgctatcccgtgacaggctaccagggtgagaacgacatgtcgaaacccatcgtcgacccgcaatcgggttatcaggccaccggcttcaccgaagggtacaaacagcccggtatcgactggggcgacggcatcaaggcccacaacagttgtatcaaccgcgatccccgttattacgcctgcctcgtacccaacggtttctggtggcccaacaagacggagaatatcaagttcacctgctacaacaacgacgcctgcaccaataagtggaatgctggtgaaggcggcggtatcacccgcgtaggctatgtatggcgccgtttgctcgaaaccaacaagtcgctgcgcgaagccaaggattacacttcgatgcaaacggtttatccggccttccgcctggcggaaatctatctcaactacgccgaggcctgcaacgaaaagccccagcgcgacgagaccgcagcgctcgaatacctgaacaaggtgcgcgcacgtgtcggactgaaaaagatcgaggtcgcttaccccgaaatcaaagggaacaaggagctgctccgctggtgcatccagaaagaacgcatggtagagttcggactggaagcgatgcgccactacgacgcctgtcgctggatgatcgccaaggaagaatacccgagcgagaactggacgctgcacgtaagcgccaccacgtacgaagagtcctacgaacgcgtacacaccgactacgtcggcgccccggccgtattccgcgacaaggactatctccacccgatcaatgcggcacagatggccgaaatgaccaacatgacccagaattacggacattaataaatgctcgaacctatgaaaataaatatgtggaaactgttgcttgcaggactgtttgcttcggccgccctggccggctgcgaggacaatcgcaacaacttcatggtagacgatacgatttcatttgtcaatgaggagcaatatgccggcgtatcggtttataatggaaaatatgaattggcaatattgaagaacggcaagggacaacagagtgccaaagcgctcctcagagtttcggaaactgccctggccgaatacaacacggccaacggcaccaactatgcggtgctgccggcaaactgctacaaactctcttcttcgacggtcggcttttcggacggcgacacccgtaaattcgtcgaggttacgtgggacgacgcagccatcttcgccctcggcgaggatacggagtatgccattccgctcgaactcaccgtcgctgacgacgcacttgtagtcgatgaaaaccgcaacgtgaagatcatcaaccccaaacgcgcctcgatcggcatggagaaggaactggcaacaccgttctatcctaccgctacgcacgaagtgatcacgttcgacggcaacatcgtactcgacaatgcgatcgcgacaatggacctgacggtggattacaagatcgacaacagcctcgtggatgcttacaaccaagccaaaggcaccaactacctggctgctcccgaagggtttgcgacgctggatgccaccagttcgcagatcgcggcaggcgaaacgacggccaagttctcgggcaaaatcaactccgacaaactgtttacgggcaacaacctcgatatcgtgggcgacctgctcgtaccggtgcgcatcacctctacgtcgctggacggcatcaccgtcacgaccgaggtcatgtatgtcccctttacgatgaacaaggaactgaagggcccgtggacgttactggaaggtgaaaacaactgttacgcaagggatccgttggctccgggatgggcttcgggttacacggccgacaaactgttcgacggtgaaacaaccgctggccacgaatggatttcctattttgcgacccagatcgaattcccgatgactttcgtcgtggatatgggacagcggcaggtattcaccaacttcctgatcagcgactacacgacccaccagggtaattaccgggagtacgagatttacacggccgaagagtacgacggcgcaaacacccagtggaacctcgttgccagcggcaaacgcggttacagctgggcagcggttccgccgccctacgactatccggtacagaaatatatggccggccgttacctcaagttcgtgatcctcaaagccgaattcaacatggcaagcggcgatttccagttcggccgcggcaaactggccgacgtacagggtcagggattctaacgatagatgttgaataattaatcccgttgtgagttcactccctttcacaacgggattaattttaattttacgaattacgacttaccgactacgatgctcaaattcctgaaaaatatcattccgttcgcaacggccgcaggatccttgcttctcgcgggcagttgttcccgaaccatgtacccgcaggggcagcaccgcagaaacctgcagccccccacggatgccgtgttatgttacggcggcagccaccaccgcacccctttcctgtgggacaaggaacggctggcgccctatgtcacctatgtcgataaagagggcggggagcactggctcttcgacgggttcatcttcctggaattccaggacacgaaccgtcccgacgcagaactctacgccttcgagacggggcatctgcgcgacaagggcgaatcggccggcaaggcgcaatggcaggagctgatcgactattatttcacggacggcaacggggtcgaggccctcgaagaggccgtgaaggaggccgccgcgcggttgggcaaagccccgcagaagcgcaaggtcatcatggtacttcccgacccggtgattcaccggcactatatcgacacgacgtcgagtacgacctattggggagcattggacgggcggcaactggatttcaacaggaatgaagaccgcatagccgcctgcaaatggtatatcgaccgggtacgggagcggttcgcccggggcaactacgaacatatcgagctggcgggattctactggctgcgcgagatcgtcacccggccggtggacacacagtacagctaccacctgacccgctcggacatcatgcttccgcatatcgccgattacctccacaagctggattatacgttcaactggataccctattacggctcgcgcgggtacgacgtatggcagcagttcgggttcgaccaggtctacctgcaacccaactattactggaagccgcagaacgacatggatgaggtttgcagacagatcgacagcctgggcatcggcatggaaatagagttcgagcccacgctgctcaacgcacgcgaaggcagcggaacattccgcaagcggctgcgcgactacatcgactacgccaaacgacgcaacatctacggcaaacggccgttcgcatattaccacggcaccaacgggttctacgacctccacgcttcggacgacgaggccgaccgggagttgttcgacgaactttgccagttcatcataaacaatccgttacgggcacaacgaccgacaacggacaggaaataacccataaacggatatattgaccccggacggaagagactgctccggggtcggataaaaacgacaagacatgactcgcagactttttacagtagcaattgcagtggtaacagccctggttttcaccctcccgaccggcaccgcaggcccgaaggacaagctgtacccgtgggagaagaaacacaagagtccggcgaccacgaccgatgccgtattatgctacggtgccagccatcaccgcaaccccttcctgtgggacaaggggcgcttcgccccctatgtcacctacgtcgaccccgacgggaaggaacaatggctattcgacggcttcatcttcctggaatcgcaggatgtcgaccgccccgacagcggcgcctactcgtttatgacgggcgtgctgcgcgacacgggcgtatcggccggcaaggagcagtggcaggagctgatcgactactatttcacaaagggcaactgtgtcgacgccctggaacaggccgtcaaggaggccaccgcacggttgggcaaagcgccctgcaaacgccgcgtgatcatgatgatccccgatccgatcatccaccgacactacatcgacacgaccaccacgacgacctactggggagaactcggcgggcgccggttggatttcaacagcaacgaagaccgcgtagcggcctgcaggtggtacatcgaccaggtacgggcgcggttcgcccaaggcgattacaaatacatcgacctggccgggttctactggatccgcgagatcgccgcccagccgcacgacacggagtacagctaccatctgacccgttcggacatcctgctccccgagatcgcggactacctccaccggctcaactacacgttcagctggattccgttctacgacgcccgcggccatgacgactggcgcaaattcggcttcgaccaggtctacatgcagcctaaccactactggaagccggaaaacgacctggattccgcctgcatgaagatcaaccgtgccgggacgagcatcgagttcgaattcgaggcttcgatcctcagcgcggatccgcacagcgacatataccgggcacggatgcgcaaatacatggaatacgcaaagaaacacggcatctacggcacccgcccgctggcctattaccaggggagcaatgccctctacgacctctcggtctccacggacgaaacggacagggagttcttccacgaattctgccgtttcgtcgtgaacaacccggtacggacgcaacactccggaaagggaaacaaataaaaaaaccgacatcccatgacgaattaccgaatcattttcacgcttctctgctgcctgtcgttcatcggctgcggggacggggacgacgaaccctccgggggcccgaaaccggccctgagcatgacgatcgcatcgtcgggcgccaactcggtgacgctgaacatgaagcgcacgaacgccacgtccgtcaaaatcatatacaaggccacaggggtcattacgtccgaaacggcgcagagcgtcgcccagaacggcacgcaatacaccgggacgacggtcgagatcgacggcctggcggcgcagacgacctacacggtcttcgccgtggcctgcaacgactcgggcgaatacagccagatgcagtatgtccggttcaccaccgacgcccccggcccgcagatgtacccgtgggaacaaagccgcaacgggatactctcctatacggacatggtgctgtgctatggcggcagccaccaccgcaccccgtaccgctgggacaaggagcgtttcgccccgagcgtgagctacgtggacgaacagggcaaggaacattggctgttcgacagcttcctgttcatcgaattccaggacagcagccgtcccgacggcggttattacgcctacatggttgggctgatgaaggactacgggttctcggccggaaagacgcaatggaaagagctgatcgactattggttcgccggcggcagcggcatggatgccctcgaaggagccgtgaaggacgcttcggcacgcctgggcgcacccccgtccaaacgcaaggtcatcatggtacttcccgacccgatcatctacaaggtttacgacggcaagggcaacggcaagggcgaccccggctccacggtttactggggcgagctgaacggccgcaaaatggacttttcgacggccgaagaccgcatcgcggcctacaagtggtatgtcgacgaggtacgcaggcgtttcgacctgggcaactaccagtatatcgacctggcggggttctacatcatctccgaggaactcgtcacgccgggcgacggctggaaccacgaactgaagaaatcggacgagatcatccctccgcttgcggaatacctgcatgcgatcaaccaatccctgaactggatcccgtacaaccgcgccgcagggtataagaaatggcagcagctgggcgtagactacgcctatatgcagcccaactatttctgggagggacaaaatcgctgtcgcagttcttctccgacgtcaaggccaacggcctgggcatggaattcgagttcgacgaggcgctcctcgagggcaatgccgactgcgacacctacaagaagcgtttccgcgaatacatgtccggagccaggctgaacaatgtctacggcacaaagccgctgagctactaccacggcaccaacgccttatacgacctgtcgaaatcgacggcagccaaagacagggagttctaccacgaattctgccgtttcgtactcgacaacccgatgcgcaaataacgattaacgacccgtaaacagatgaaaaaactcaagaccttcgcattttgcaccctcttagcggcattggccgcaaaccatacgcccgccacagcggcgaacggccccacgggcgacgcggccccggcaacccgcgattccgaaccgaaaatgtatgcctgggaacaggaacgcgacgcgataccgtcctataccgacctggtattgtgctacggtggcagccaccaccgcaccccgtaccgctgggacaaggagcgtttcaccccgttcgtgacctatgtggacgagagcggcagggagcactggctcttcgacgggtttctctgcctcgaattccaggacagcagccgccccgacggcggtaaatacgcctacatggtaggcgtgctgcggggacagggcgtttcggccggcaaacagcagtggaaggagctgatcgactattggttcgacggcgacaacggcgtgaacgccctcgaagcggccgtaaaggaggcttcacagcggctgggcacacccccggccaagcgcaaggtagtcatggtaatgcccgacccgatcatctaccggaagtacgacgacacgaacgagtcgacgacctactggggttcgctcggcgggcggcagatggatttcgccaagggcgccgaccgcgttgcggcctgcaaatggtatatcgaccaggtgcgcaggcgcttcgacgaagaaaattaccagtatgtcgaactggcggggttctaccccatctccgaagagatcgtgacgccgggcgacggctactgccacgaactgaaaaagtcggaagaggtcatcccccaggttgcggaatacctgcattcgatcaaccagagtttctgctggataccctacaaccgtgccgcaggctacaccaaatggaaggagatgggcatcgactacgcctatatgcagcccaaccactattgggacgacaagggcgtaaggccgctgtctcgctatttctccgacatcaaggcctacgacctggcgatggaattcgaattcgacgagaacatcctcgagggggagcagaactccgaggtttacaaaaaaaggttccgcgagtatatggaaggtgcaaaaaaacacggcgtatacggacgtaagccgctgagctattaccacggcaccaatcgtttttacgacttgtgggcgtcgacggcggcaaaggacaagaaactgttccatgaattctgccggttcgtgatcgacaacccgctgcggcaaagaacggccgcgtccggcaaacccgccgccgagcagggataccggacgaccgaaattcaggatctggccctgatctaccagggcggcagccaccggctggactggacggtcgatgaattccgtccctatgtcgtacaccggtttgccgacggttcgaaagactggctcttcgacggtttcctgttcctcgagttcaaggacggctcgggacgcaactacaccgtgggctacgagaaactcaacgcccgcaggacagaatgggagtggctgctggatcggattttcgagcagggcaagtcgctttcggcactcgaccggtgcatcggcgaagagatcggcgagctgggcaagcccgcattcaggcaccggatcgtgctgggacttcccgaagcgatccgcggccagaaggactggggcgagatcgacggccgggagatggatttctcgaaagaggaggatcagatcgccgcgaccaaatggtacatcggggagctggtcgaacgtttcaaggccgccaaatacaagcacctggaactctcgggcttctactgggtcgccgaggacacccaccactgcgcggagctcaccattccgctgagcgaatacatccactccgaaggcaagcttttctactggattccctactggcaggccaaaggccatgaggagtggaaacgcctgggcttcgacgtggcttaccagcagcccaaccacttcttcaaccactcgatccccgacagccgcctcgacgaggcctgtgccacggcccgccgccacgggatggccatggagttcgaattcgacgagaaggccacggcggcgatccccaactcgtcgcacgaccggatggcggcctatatcaaccacttcgaaaagaacgacgtcttcaactcttcggccgtcgcctactactgcgggaaccgcggcgtactgaccctcaacgagtcggacaacccgaaagacaaggccctgatggatcgcctggcccggatcatccaggcacgccgctacctgaaatacggcatcccgatgaagaacaagacccgcgtggtcgcacaccggggcttctggcacaccgacggctcgacacagaattcgatcgcctcgctcctcaaggccgaccagctgggcgtgtacggcgtggaattcgacgtatggatggcctcggacggcgttccggtgctcaaccacgacggctggcacgacggatacgaggtacagagcaccccttcgaccgtgctgacgacgctcaagctcgaaaacggggagccgatgcccacgctggcgcaatacctcgaggccgccaaggatacgaaggtacacctcgttctggaactcaagccccacgccacacccgaggcggaaaccgcagcggccgaggccgtggtgaagatggtcggccggtacgggctttcgaaacgcgtgacctacatctcgttctcgctccacataatgaaagagctggcacggctggctcccgcaaagacgcagctgatgtacctgggaggcggcacgttgcccaaagacctgaaggcgatggggctgacgggctgcgatttcaactacggcgtatacctgaacaacccgacgtggctcaacgacatcaaggcgttgaagatggcctcgaacgtatggacggtaaacaacccggccgacatgatgtgggccatcgaaaaccgggtcgattacatcaccacagaccgtcccgacctcttcctgaagctcacccgcaagtaagcgggccgggcatcggataccccggtatacaggcgatgcacccgggacgcgcccggatgcatcgcttccctacaaaaacgcaacgatgaaacatttgaaaatcatggcctgcctgctgttgctgggatgcatggcgcccgcaacggcactttgtgccggggaggatgccccgaagcgcagcagggggaaaggacacgaccgcccctattccgaagcgatgtatgtcaaacgccagggcggcgacctctatatttcggccaagctggacgaacggacggatatcacctattggttcaggcggtgcatgttcaacgagctctacacgttctaccgcgtaggcatcacgcgcaacagggcggcgcttccctccacgcagcccgaggccgaacccgccgtcctgctcaactcgacgtacagcgacaacatcgggcctttcgccatccccggatgcgggtggtgcgggggcaaccacaaatacagggaacgcacggcgcgcacggcacgcagcgagggttacaccctgctagccgacggcaaccgcatcgagggcgacacgacactatggacaaatcgggtgacggtcgaggccgaaaacgtaatcctcgacccgacacgcccctaccggaacaccgcgggcggcgacgaactgcgcgacaccctgtgccgggaatcggtgacatacactgtccgccgcaacaacatcgaagtcgcggcctcgcaccggttctgtaacgccgcgcccgtaaccatcgccatctattacgggatgcagtcgatgttcgaaggcgagacgcacgtactcaccccgggcggggcctacacggactggacggaagcggcgaaggcatcgacgttcaccaaacaggaatacccccttttccggcgctacgtcgaaaagaacagacaggggtaccaagcgacctggctgctgcccgacgggctgggagaccacgcgctgctggacgggcaggacgacatcttcatctatgcgccctacggcaagagctaccataagctcatcgggaacaaacggatcaagaacggtgacaagacctgttggcggggtgtctacacctggttcgagacgcccatcgccgacgatgccgacctgttgtgctacgaaggcagcgccgggggacatacggccgttttcatcgactgcaagcgggcttgcaagaggacgctggcactgcccggatacctcgacctgcggcatttcggaacggccgaacagaacggcggcatccgcatttcggccgccggacggaataaactgaagataaaggccgacgcaccgggcagctgtgtattgctgctccgggaataaggtcacgggggcaaaataacggaaggccgctgcgatctgcctgcaagaataagagggccgggaaaaagcattccccggccccttataattctgccccctgccggctattaacgccgccgatactttttcggattcttcagcaccgcgtcgacgacgggcggcagaatcttctccatcacgtcgtaccccgcggccgtgggatggacttcgtcgtaggtataggccgctaccatgcctccgtccggttcggacatcgccgcgtggtaatccacataggggacattctccctgcgggcgtactcgcggatcatggcgttcagctcgatgatccggggcgcgggttcaagctccttgcgccagccgaattcacgcgcgggcaacaacgagcacagcacgggggcgatgccgttggcacgtgccagctcgaccatcgacacgaggttgcccaggatatgcggcagcgatatgtaaccggtattttgcgctatgtcgttcgtcccgccgcagatgacgaccacctgcgggtgcaagtccagcacgtcggcccggaagcgtacgagcatctgcgaggtggtctgcccgctgatgccgcggctcacataaccgcgggcggcgaaaaagtcgggatgcgtcttgatccacagttcggtgatcgagttgcccatgaggacgaccttcggattgcgcacctcgtcgttggcttgttcgaaacggccgaagttcgcccagtcctgggtttgcgcagcagcgcagaggaaacccgcaagggcaagggcggtaaaaaacagttttttcatcgtatcagcagctattgaatgacctccatcggcatctcccaccccatgatcgtcgagatgtaggggatgaccgcagcggcgaacttccggtgtccgcggtggttgggatggtacccggcccccaggtcgccgtcctggttggtgatgcccgtaaaatgcatgacgcaatgcaggtcgtcgtcctccaggccggccatgacggactgcatatagggatagaacgcctccgcaccgtcggggatgacgtaaaggatcggcacggagccgtaatgttcgcgcagggcgccgtaaagctcgcggaaagccttgccgaaggcggcctcggagggtgtaatgcccgtgctgcaatcgttcgtgcccagttttatcaccacgatatcgggcttataggcccggaaatcccaccgcggcgagtcggccatgtcgaacgtccgcaggatgagctggcgcatggtcaggtcggaggtttccttttcatcggcccagttacggacgatgccctgccccgaatgggccgtgagcacgtaatcggcatcgaaacagcgcgccacgatgcagccccatgccaggtcgcagttctcggtctcgggggtgaagggctccgagacggtttttccttcggtaccgtagccgcacgtatgcgagtcgccgatgaactcgatcagccgcgacggggcgggcggcaggtcgagcagggcaccgtcggcctcgacgccgtagagcgtcgtgcgcccctgctcggcttcggtgcgtttctgcaccgtcacggtatgcggccccggcgcaagcccttcggcgaggggcacgcacgacgaggctccctcgacggtcgccttgccgtacaggcgcccgtcgacgaatacgttgtagtagttacgcccggtatccgcagcacgcatcgcgcagcggctgccgtcgaaacggaacgtgaaatgacagccgctccagtcgaacgacaggctgccgtcgccgttttcggcggcgcggccggtaaagcggattttgtccgaacaggcttcatagaagcacatgtcgccgccggccatgcaggcccccgacgccgcgcacaatgccagcgcgaaaaacagacgtttcatccgggcagcttatttgacgtagggcctgattttctcgatccacacggcataacccgccgccttgaggtggatgccgtcgaacgtgtactcttcgggcagttccccgttgcgttgcataccgctccagatgtcgatgaaggtcagcccgcggcgttcggccatggcacgcagcagggcgttgaactcggcgaaacgggcattcttgcctttcataaaagtttcgttatgcgcctcgttgagcggcagcaggctctggatatagaccttcgtgcggggtgttccccgggcgatgatatccagcaggcgttcgtattgctgcaggagtttctcgttcgaaatcttcgagaaaagcaggtcgttggcaccgcccatgatgaagatggccttcggtcgtccgtcgacgatcggctgcacgcggttgatcatgcccgatatgcagtcgccgccgatgccgcggttgagcacgcgtttcccctggaaatactccgcccagaaaccgcgctcggtaaggctgttgcccagcatcacgatattttgcccggtgaccggcaccagctcctcgacattgcgtttggagaaataatagtcgttgttgaaggtcagcgtatcgcgctgcgcctgtgcggctgcggtcgtcgcgacggcagcggccagcagcaggaggatgagtttcttcatggttcgttattttatcaggtttccttcgaaatcgacgtcgcggtcgaacggatgcagcgcttcgtccgtcatccgcgccgcttcgcgccgcgtcaggggctccgtaccgtcggcagcgacggcagcaccggccttgcggagcatggcggcagccgacgacgccgtaagcggcgcggggtcgtcggacacttcgacctgcggcgcatagtcgtgcaggccgcggctgaactcaccgacggagatcccgcgctcgggatagaaccacgtgcggttcgcccactggaacggctcgcccgtcatacgcaggatgcccgtcgctgcgatgcgctgcaacatcgcgaagtcggggtcgccgggtttcacgtcgtacaacggcgcgatatacgcatcctgcgccagcagggcggcctgcaacctgcgcaccggaactttgcggggcgtacacccttcccgggcggcgatggccgccaacgtccctgccgcctgtcccgtgagcaggactaccggctgcaggcgtgtcgaaccgttgataaggttcgaaaccgatatggccttgtccgaaaccaccaggttgtccgtcccggcagggatcatcacccccatcggcaccgaaaacgacggcacaggcgggaagggtatcttcccgatctgaggacggcaatcgtggtggtggtcgacgggatagtcgccgaccgaaatgcccgtacggtaaagtgccgacgggcggccgtaacgatccgtcacgtcatcgagcgtcatgcggatcaccccgtccaggcgccgcccctcgcggtggtaaggcaggtatgccaatccgtccgcggtgccgaactcgtcatcggcgatccccaggtggctgaaacccagttcgtgctggatatagtagatgaaccgcagggtcttctcgcgggcggggcgcagcgcggcgtcacgccgggcatagggcacctcgacgatattcatgtagacgtcgttgccgttgaccggccagttgagcatgtatttgccattgggcaggcggccgtagttgagcatcgcctccgccgaaatcggctgccccgcagcggtctggcaggccgcagcgaactccgcaggatcgtacccttcggggcgggggatggtcttgtcggcacccttgccgtaatccttgaggatggcgacgaaagtcaggtcttgcacgatgtcgttcgcctcggcaggcgccagcgcctcgcccgtatcggcacgggcgtccatgccgatgcggtagggcgtaccgctcatgggcagcgcatcgcccaggtcggtggcatcgaccgtgatacgagccgagacctcgagcctgtcgcccccgccacgcgagaaacgggcgcccgtcacgcagttgccgcgcttgtataccttatcgagcacatacccgtgcaggacttcgagccgcggctcggccgcagccatcgccctgaagatgctgtccgccacatggggctcgaagagcgtgttgctcacccagcccgtggcaagcgcttcggccccgccgtaataggcgcgcagagcctcgcgaaattcgttccacagccccgagggcaggtggtggttaccgtcggcagccgggacgccctgcgccgagaacatccccccgagcatgggcgtaggttcgacgaccagcgtggccgccccctgacgcgccgcggcgatggccgccgaagtgcccgaggtcgtgccgccgataaccagcacgtcgaccgtgcggcgtatcgttttggcttgtgcgggacgtacgtgcccgattgcgagggacaacaccgccgaaagtaagaatcctatacgtgtcatgcttgtttcgtttcttttaaatatcacggcaccgtttgaggccggcaaatcgtttatcaggcatcgggaacgagccgcctatttgcattgttcgaggatctgccatatctggtaaagtccgcgcggaacatgaaaacaccccttccacttgccgcccttgagcgggaggagcacctccccgcggcggttgaggtaaccgaaccactcgggatatttcgggtctttgaagtgcgtccacatgtaatcgtgcagtttctggaaccacgcgaggcactccttgttgcccgtcaactggtaagccttgatcatcgtaatcgcggattcgatatgcacccaccacagtttctgatcccattcgagctgctgctgcggacgcccgaggcgatccataaaatagaatatgccgccgtactgtttgtcccagccgtattcaatggtcgaaagcgcaatcttcacggctttgtcgatcagttcgggacgaccgagccgcttgcccaagtccatgatgaaccacatcgcctcgagcgaatgccccgggttgaccgagcgtccctcgaaggagtcgaccagcgaattgtcctctgccgagacattctcgacgataagcccgaggtttttctggtaaaagacctccatcacctcgtgcaagcatgtttcgatcgtttggtcgatgagttgcttgtcgatgagctgctcgatttcgagcgacaggttgcacaggatcatcggcagcgcgaaatccttgatcggacgcgtccccggatgtgccttgcaccacttgcccttggggttcgaacgcttctcgagcacccggtcgaaagtttttttggcgatggcggcatacccagtgtcgcccgaggcgatggccagctgcgcgaaggccatcgtggcgaacgtatacgagaaaatgttgtaagggtcgaccagcggccggccgtcgcgcgtgagcgagaaataccagttgtaattgccgtcatggccgtatttcttcaggaactccgccccctgcaaagcacactcaagccactcggggcgtttcgccaccttgttatagagcatcgagaaaagccacacctcgcggccttgcagccagatgaacttgtcggtgtcgtagacgctgccgtcgcgttcgaggcaggtgaaataccccccgtattgtttatcctgggagtgttcgagccaaaacggcaggacgctgtccagcagctccgacttatactcgccggccagtttctgaaaatccatagtgtcggttgttaaattgatgtcccggaggtgatccagacgacggaggtctccggtctgaatgcgcacagcaccggattcattattcgtgttattcatttttttgccagtatttctctatttcttcaagcgagcgccccgtggtttcgggaacggcacgccagataatcaacatataggggacgcacatcgccgcgaagaggaagaacgtgccggcgggcgtaaggttttcgagcatccagggcgtcagctgcccgatgaggtaggtgcccacccacagcgcaagcccggcgatcgacatcgccagcccgcgcacccgggtggggtacatctccgagagcagcacccacaccacggcgcagatagaaacggcgcagcagaaaatataggccaggaagaacaccagcaggaatacgctgggcaatcccagcgccgcgccgcacataaaatagaacccgatgcagagcagcgaaacgatcatgcccgacacaccccagtagaccagttgtttgcgtcccacgcggtcgatgatgacaagcgccagcaccgaggtcagcatgttgaccacacccacgagcacctgcgagaagagcgaatcgccgctcgacagccctgcattttcgaagatcgtcgggccgtagtacagcacggcgttcacgcccatgaactgccccaggatggcgatgaaaacgcctatgacgaccgccttgcggatacccggttcgaacagcacgcgccattcggacttcgacgaagcggaggccgtgccgtgtacggcaacgatctcctcgtcggcggcttccgacgaacggtagatacgctgcaacacggcatgcgcacgcacgtcgcggccgcgcagcactagccagcgggggctttcgggaatgaagaatataacggtgaagaagagcaacgcaggcagcgtttcggcaccgaacatgccgcgccacaactccgtaacccatatcttctgcatccacggggaggcgtaggcggccgtttcggccgatttgagtatctggaagttcacgaggtaggccgccaggaacccgaccgtgatggccagctggtaaagcgacacgagtgtcccgcgccagcgcgccacggcgacctcggaaatatacatcggcgaaacgatcgacaccacgccgatgcccacaccgcccacgatgcgataaacgaccagttggatgaagtcggcactgacggcacagccgacggccgaaacggtgaacagcacggccgacagcaacatcgtcagcttgcgcccgaaacggtcgctcagcactccggccacggccacgccgccgatcgaaccgacgagcgcacacccaacgaaccatccctgctgcatggcgtccagcgagaactgcgaggccacaccggatatcgtacccgaaatgaccgccgtgtcgtacccgaacaaaatcccgcctatggcggctaccagtgacaggaatgccacatatcccgtattcgtctgtgatttcatcggctaacggatgttaaagtattccttgtaacggtcgaagagatgtcccgcctgcaggtatgccgactgggggctcatgaaatgcgaaaattcgaacgtgatggccttgtcgtagcccgcacgcatggcggcttcgagcttcatgcgcagcttgtcgaacttgatgggcaggaatttgatgggcatgtcgcggtcgaacgactcggcgttggtccagcattgcatgccgtacttgtcggccaggcgtttgttgaccgcaaagaacgcatccagctcgtcgtagtcgatatgcccgtcctgaaacgcacaggcatccaccacatcgtgaatcccgtcgaatatctcgtcccattcgcgttcgtgctgctcgacggaaacagcctgctccttggtcagtttgctcccgctggccatcacggccttcttgccgtcgatccacggcgagatgaaggtgggcagcccgcccgaaacctccttgcactgtttgcccagggcatggaacgtcccgatggcacccttggtagcacggctgatctcgccactcaggtaccagccgccgaaactctcgtatttgcggccgtacatgttccacacctcgtcgattacatatttgttatgttcgacctcatgcgacatgtcgcccgtgtcccagtattcgcccgagtcgtaaagcccgaagtagaacttcatgccgtacttgcctgccaggcgcaggaacaggtcgagcaggtcgaccgacggcatgtaacacccttttttgagcaggtagggcgaagggtaggtgatgaacttgcggtagcccgagcgaatcccgatcaccgtgtcgatgccgatcgacttcatatggcgaaaatcggcgtcccactccttctcgccccagttctggtgcgggatgtcgtgcgaaatttcgtcgaggaacgtacccgtgatgcgcaacccctcccccttgggaacgatcagcccgccgtgccccggagcggatgcggccagggcatcgtccatcccttctgcacccaactccgaagctgccttgaccagtccggggacggcgacagccgaagccgccgtcacagctactttcttaagaaaattccttcgactcgaagttttcatatcagacgggattttatagtttgcataaaataaagtaaattttatcgtttttctatgcaaatataataaataaatttacaatgaggcaatattatagtcttttttattctaatcgaccaaaaaaacatttgtgacaggtaatatcgggcaataacgggtacaaaaaaaagtccgtagggctacggacttctctttatagctaatttttttggttccggactacatcagccccagcatcttgctacggctcagcatacaggcgcccacggccccggctttttcacccaacttactgagttttatggtagtatccttattcacgagttgcagcgaatatttgttgatggcactcttaagcggcaacatgatataatccttggccacggccagcgtcccgcccagcacgatgaggtcgggattgaagaggttgatgagcccggccatagccttgccgagcgtatgcccgacggtttccatgacttcgatggcaagcacgtcctcctgccccagcgcttcgagaatatcctccaacaggatctgctcgccgcgattgtacttgtcggaaagcatcgaaacacgcttctgcgccagcttctccatgaatatacggtgtacggccgagcccgaggcgccggtttcgaggcagccgcgcttgccgcaccggcagatcacctcgttgtcgagcagcgggaaatgcccgaactcgcccgagaatcccgaccggccatagaacagtttgcggtcaatgaccagcccgacgcccaaaccccagctggcattgacgaatatcatcgtatcctcgttgttacccacgccacacatgtactccccgtaggtcatcgcccgggtatcgttctcgacatagaccttgcagcccaggcgtttctccagcagcatcgtgagcggctcctcctcgacaaagaaatagctgtaactgtaccccgtcttggaattgacccgccccgagaggttgaagccgaccgaaaaaatcttggcacggtcgatcttgctcttggcgatgaacccgttgaccacgtcgcacaaccggtcgagcgcctgcaccgaattttccatgacgaacggcacgcaatcgcgcatgtcgacgacctgccccttgaaattgatgatcgccagggtgatgatgtccttcttgatgtcgacaccgacgaaataacctgcataagggttcaatccgtagatgttgggccggcgccctccggcagtgccctgtttcccgaaatcgtgcacgaagccctcttcgatcagttcgctgaccagtttggtgaccgtcggcaccgacaggttcatttcatggctcagatccgtgatactgaaatcccctcccatgatgtagtgtccgatcaactgcagtttcagcagagcggttttattgccttcttcggcttgtcccaaaaaagaatcgaccataattcgcaatgattatttggtttggtgctgtactcctgcaaagataataatttttactttaaacaagcttttttctacggtatttggccgtctgcaacaggcaaaataaataaatacggagaaagccggggaaaatgcgaattttatttctttcccactgctgcctgccgtcgccacaccggacaattccatccgggcaaacgaaaacggggaagccgcaggcacgatgcctgcggcttcggcgcgctgcgaggggcctccccggcagggcgctaggccggcaacaggatcgaaaagcggcttcccttgccgatcccgctttcgaccgagatcgtaccgccgtgcgcctcgacaaactccttggagatggccagccccaacccgctgccctgcactttggtacccggcacgcggaaataacgctcgaaaatgctcttatggtaacgcgggtcgatgccccgtccgaaatcctgcacgaaaatctcgaccgccttttcatgctgcacggccccgacgatgatgcgcgaattctcgggggaatggtggatggcgttggagaggaggttggtgatgacccatgcgatcttttcgttgtcgacgaacagtttcgaaatcttctcgggatactccacctcgacgaagcagcggaaacgctcggccagcacctgtgtcgccttgaccgcatagtcgatcagctcgacaggcttcacgaccttgggcatgagcctgagtttcccggactcgacctgcgtcatgttgagcaattcgcccgtgatattcaacaggcggtcgctgctctcgcggatgctgcccacgagttgtttctgttcttcgttgagctgcccgagacggttgtcgccgagcagttgcaggctcatcaggatcgacgagatgggagttttcatctcgtgcgaaaccgtcgagatgaaattggtcttggccgagtccagctccttgtacttggtgatgttgttcaggacgatcaggttgccgacgaactgttgctcccagctgccgaccggcatgatgtagagcggcgtatcttccatctggaaatagctctccttgttgtcggcatagatcttcagcggttcctgcccggcgtttttcttctcgccgtaaagctcgcgcagcaggcgccggagcaggtcgttggcgagcgccacctcggcggcatcgcgcccgatgacggtttcgggcaggttgagcaccgacagcgcctcgcggttcatgaagaggatggtcttccggggatcgagaccgatgatcggttcgtggagcgaattgacgatcgcctcgatccgcgtcttggccgtcatcaggtcgtcgagcgaactgcggcggtactcgtcgagcttggccgccatgttgttgaacgactcggcgacggattcgaactcgcggttgcccgtgaagtcgagccgtttcccgtaattatgactggcgatctccttgatccccttcttcagctcgtcgatcgggcgcagcaccatccgcgggaaccacaccagcacggcgcccgctaccagggcgcacagggcggccacgacgatcagccaccacatgacatagtcggcacgctcctcgacctgcgagctcttggcccggatggccgccatgttcacctccataatgcggtagaggtcggcacgcacggtctgtatctcggcctcggtgacggggtcgctcaggctggcgacatgctgctgcaaggccgccgtaagctccttttcgctgacttcggtgatgttctgctgctggagcgccaggctctggcgcagggcgtgccgcgagacggaatcctggccgatgtcgttcagcgaacggagcatgtccccggcgtattgcagcgaattatagttgtcggccaggatggtgcccgtagcgcgcgaaagctggcggacatagctgaccgactggatgccgagcaacaggatcatggcgaatagcacgccaatgcccagggtaagcctcccttgtattttcatagtcatgacataataaaaaggtcgatgttcatacgcgacaggcggccgatcaggctacgcagcacgatcgcgttcttcagcagcgaaaataatgaaaattcgggccgcccgacgcagacgatactgattttttgttcccggcaggtttcgaggatcgcctcgaccggacggttggaatgcacccggcggatttcgccgccgagctccgtggcgaggttcaggttgttgatcaggtaacgctggttggccagcgggatccggtcggcggcctcgcggtcgccctgcacgtagagcacgacgaacgaggtgttgatgtgcgtggccatgcgcgccgtcttgcggatcacgcggcgcgaccgcttttccgaggagtcgatgacggccagcaacctgtcgtggcggcacttgtcgcctgcggcgacctcgttctcgaccttcttctccacgcgcagcgccacctccttgagcgccagttcgcgcagttggaggatgttctcctgcgtgaagaaattgttgagtgccgcagcgaccttgtcgggtttatagattttgcctgccttcaggcggtcgatcagttcgtcggccgtgaggtcgatgttcaccacttcgtcggccatggccagcacgctgtccggcacgcgctcgtgcacctcgacgcccgtaatctcctgcacggactcgttcagcccctcgatatgctggatgttgaccgccgtgatgacgctgatccccgcatcgagcagttgcatcacgtcctgccagcgcttgggattgccgctgccttcgatattggtgtgcgccagttcgtccacgaccacgatctcgggatgcaggttcaggatggcctgcgtgtccatctcctcgagttccttgcctttgtagaagagcctgcggcgcggcacgaggggaagccctgcgacgagggcttccgtttcggcacggccgtgcgtttcgatatatccgatgcagacgtccacgcctgcgtcgagcaactgatgcgcttcctgcaacatgcggtagctcttacccaccccggcactcatgccgatgtagattttgaacttgccccggtgcgagcggcggatcagatccaggaaccgctgaacactgccttccttgtccataatcacatgcggaacgatattccgcccacgaaattaacgtcctcggccgccgggttccagctcagcgaagtgaaaagtcccagttgcaacgaccccgctaccgtccagctcttcgctgcattgacgaagacgttttgcacatagaaatcgcggtcgatgccgtaggtaccgacggcgttccacggcacgacacccacgccggccttcatatctatgcccttcacggcaaaaggataggatgcctcgatgtaggtggcataggcacggtcgccggtggcatcgacatccgcggctccgaacagcaccgtgttccatgccagggtcaggggcactcggggcgagatgcaccaggcgatcccggcctcgacacggtgcggggagtcggcaccgaaacggaaatagttacgactgattgtgccccggtcaccggcgccgccttcccagtaaaggtcggccagcgagaaagtcacggggccgagggcataagccatcgtcaagtccatctccttgtaggaggtcgccgcaaaatcgaccgaaccccaggcggccaccgaaaaattcccggcagccagtgccagcgtgggctgaaggctcacgcccgcttcccagacaccgcgccatacatagccgctcacgaggtcggtgccacccgaaatttccacaccgcgctgcctatcctgcgcacagaggtcgacggtgagcattaccgccatggcggttagcagaattacgatccagcgtttcatatatttatccttttcagttttcttttccatatccgtttcatgtagtttccattagttttccggggatacaccctccccgcacccgccggcctgccggacaccggccgaggccgtgacgttcggttgcagggtttccagcgcgatattcaggcgcaggacgttgaccttcgtcgtgccgaaaagccccagccacggtttttgcgtcagcgagtcgaccagccgctgcacgacggcctcgtcgagcccgcgggccgcggcgacgcggcgcacctgcacctgcgccccgcggggcgagatgtcgggatcgaggcccgaaccgctggctgtcaccatttccgaaggcacctctccgcgggagaggtaaggatgcgccgcgaggaaatcctgcacgcgctgctccacatcggccaggtattcgggattggtcgtagccttgttgctgccgcccgagccgccgccgttgtaatccacggccgagggacgcccccagaaatagcgcccgccggtgaactgctggcctacgttcgcggcgccgacgacccggccatcgagcgtaagcgtttcgacctgcccgccgttggggcccgcaagggccgaaaccccgcgcagcacgagtacatatcccacgccgagcaacaggcacattgccagcgttatcttcactgaaatccaaaggtttttcataattgcaacacgttaaaagaatacacttaccaacatatctatcagtttgatgcccacgaacggcacgatgacacctccgagcccgtagatgaagaggttgcggcgcagcagggccgaagccccgatcggcttgtacgtcacgccgcgcagcgccagcgggatcagcagcgggatgatgactgcgttgaaaatcacggccgacaggatagcgctttcgggcgaatcgaggtgcatgatgttcagagcctgcaacgaagggatggaggcgatgaacagcgccgggacgatggcgaaatacttggccacgtcgttggcgatcgagaaggtggtcagcgtaccgcgcgtcatcaggagctgcttgccgatctcgacgatctcgatcagtttcgtggggtcattgtccaggtcgaccatgttgccggcctccttggcggcctgcgtaccgctgttcatcgccacgcccacgtcggcctgcgccagcgccggggcatcgttcgtgccgtcgcccatcatggcgaccagtttaccggctcgctgctcgcggcggatgtattcgagtttatcctcggggcgggcttcggcgatgaagtcgtcgacgcctgcctgttcggcaatgtattttgccgtcagcgggttgtcgcccgtcaccatcacggttttcacgcccatcttgcgcagacgctcgaaacgctcgcggatacccgtcttgatgatgtcctgcaattcgactacccccctgatccgctcgtcctcgcagacgatgagcggcgttccgccgttctcggagatacggcgcacggtggcttcgatacctgcggggcattcgtgccccgcctcggcacacatgcgcaggatcgcttccgaagcgcccttgcggatacggcggccgtcgggcatgtccacacccgagcacttggtctcggcggtgaacttcaccatgtgcacgccgaccagttgcaggggatcggtcttgatgccctgctcggcacccagttcgacgatggacttgccttcgggcgtcggatcggacaccgacgagaggacgcacagccggacaaactcccgggcaccgaacccgtcgaccggatagaagcccgtggccttgcggttaccgatggtgatcgtaccggtcttgtcgagcagcagtgtgtcgatgtcgccggcagtctcgacggccttgcccgacttggtgatgacgttggcgcggagcgcacgatccataccggcgatgccgatggccgaaagcaggccgccgatggtggtcgggatcaggcagacgaacagcgagatgaacgccgcgacggtgatgttggcgccgacgtaatcggcaaagggcttgagcgtcgcgcagacgatgacgaacacgatcgtaaagcctgccagcaggatggtcagggcgatttcgttgggcgtcttctggcgcgaggagccttccacgagggcgatcatcttgtcgaggaaactttcgcccggacgcgccgtgaccttcaccaggatgcggtcggaaagcactttggtaccacccgtgacggaacttttgtcaccgcccgcctcgcggatcacaggggcggactcgcccgtgatggcgctctcgtcgatcgaagcgagcccctcgacgatctcgccgtcggcggcgaccgtgtcaccggcgacgcattcgaagaggtcaccctgcctgaggtcggaactgctcacgatatgcgactgtccgtcggggtcgatccgcttggcaggggtttcctcacgggtcttgcgcagcgagtcggcctgcgccttgccgcgcgcctcggcaatggcctcggcgaagttggcgaagagcaccgtggcgaaaagcaccaggaagaccacgacgttatagagcagcgacccctgcgaggtattgcccgtcacggcaatccacacgatcagcagcaacatgacgaaggtgacggcttcgacggtgaacatgatggggttcttgaccatcttgcgcgggtcgagcttctggaacgaggcgcgcaggctctggcgcagcagggtacggtcgaacaaggaattatttctgtttcgtttcatagtcgtaacattttagaaagtcaggtaatcggcgatcgggcccagtgccagcgcagggaagaacgagagcgcagcgacgatgatgatgacggcgaaagtcatcagcgagaaggttcccgtatcggtcttgagcgtaccggcactttcggggatatatttcttcgaagcgagcagcccggcgatggcgacctgccccacgatcgggaaataacgccccatgatcagcgcaatgccggtcgaaatattccagaacggcgtattgtcggccagcccctcgaaacccgaaccgttgttggcggccgaggaggtgtactcgtaaagcatttcgctcaggccgtggaacgaggggttgttgagccagccgatctccgggtcggcagcggctacggcggctgaaattcccgtgccgacgaggatcaggaaggggtgcatcagcacgaccagcgtggcgatcttcatctctcgcgcctcgaccttcttgccgaggaactcgggggtacggcccaccatcaggccgctgatgaagaccgcgataataagaaatgcgaagtagttcatccatcccacgccgacaccgccgaaccagcagttgatctgcatgttgagcatttgcagcataccgctcagcggggtctgcgaatcgtgcatcgagtcgaccgacccgttcgaggtgacggtcgtcgtcatgccccacatggccgaagccgccgaaccgatgcggatctccttgccctccatcgaaccgagctcctgcgcgatacccatccggtcgatctgccggctgccgcccgtctcctgccataccgaaaagacgacgcccgcggtataggcgaagagcatcacggcgaaaatccacgcggcgagcttacggcggcgcgtatagaagccgaacgcgaagaccatcgccatcggaaggatcaggatcgaccagcactcgaggatgttggtaaaggcattggggttttcgagcgggtgtgccgagttggtgccgaaatagccgccaccgttggtgcccagttgtttgatgggcacgatggccgctgtggggccctgcgagatgacctgctcctggccttcgagcgtagtgatggtctgtttgccatcgaacgacatcggggttccgttgatgacgagcaggatacccacgacgagcgacaacggcatcagaatacgggttacgctcttggtaaggaacacccagaagttgccgatggtcttcgtggtcttggcagccagcgccttcatgacacctgccatggccgccatgccgcaggctgcggtgacgaactggaagagcatgatgacgaacagctgggtgaaatagctcaaccccgtctcgccgctgtaatgttgcaggttgcagttgaccatgaacgagatacaggtgttgaacgccagatcgggcgactgcccggggttgccgtcggggttgagcggcagccagccctggaaaaccagcagcagcatgccccagaagaaccagaagaggttgaccatcagcagcgccttgagaaactgtttccagtccatctcctgcgcggggtcgataccgcacacgcggtagacgaaccgttcgacgggagccatgaagtcgagccacgtgcgctcacctcggtatactttggcaatgtagcgtcccagcggatagcaaagcaccaccagagccacccattgcaggataacgcctaaaatttcggtattcatttatttgcgttttttcggggtcagacaatcagaatctttcgggttttacgagcacgtacatcagatagacgaatccgacgatgctcagaataagcagtcctgtaaacatttttcatcagattttttcaaaccaatccacacatttcgaataaaaccagtaacacagcgacccgagggcgcacagcaacaggaacaacacagttccattcatcttcgttctttttttgagttagacaacaatttcgtaaaaccgcaaagcatccggcacagcaacagcattgcgccgcagaatatcaggatcaggatcacgattaccatgtcgatttcttctttcggtttgtgtccaaagggatacgaagggagtgccaaaacaggaatttcggcactatgcgactaattgtcaaacagatgcgactttggcatacctgccaaaaagaacggccgccctatcaaaatgataaggcggccgtctcagaatgatatgcctggcgccggcgtcagggcttcatgccgtaactttccagcttgcggtaaagcgtggcgatgccgatgcccagcaggcgggcggcctcggccttgttgcctttcgtgtattcgagtaccctgaggatgtggtgccgttcgagggcgtcgagcgccatcgagtcgggcacggagccgtcgcacgacgcggcatggaattcgggggagaggcagccgacggtgagggcgttgccttcggccatgatcaggctgcgctccacgacgttgcgcagttcgcggacgttgccgtgccaggcatggcgttccagtgcggcgatatatcccttgtcgatcgtgtcgatccggcgccccatcctgtcggcgaactgcgccgcaaagaaccgggcatattcggcgatatcgcccggccgttcgcgcagcgacggcaggtggatgcggaaaacagaaagtcggaagaagaggtcttcgcggaaattcccggaaacgatctccttttcgaggtcgcggttcgtggcggcgatgatccgcaggtcgaccttggtcgggcgggtctcgccgattttgatgaactcgccgcattcgagcacgcgcagcagcttggcctgcagctcgacgggcatctcgccgatctcgtcgagaaaaagcgtccccttgtcggcctcctcgaacaaccctttcttatccttggtggcacccgtgaagctgccggcacggtggccgaacaattcgctttcgagcagttccttggagaaagccgaacagttgacggcgacgaacgcccccttcgcgcgcgggctggcgtggtggatggcctgcgcaaaaacctccttgccggttccggtttcacccgtgagcagcaccgaggtatccgtgacggcgaccttgcgtgccagcgcgaccgcactgcggagggattccgacgaaccgatgatgcggtcgaacgaatgctcttcggagagtttgtcctcgagacgagccagccggcgctgcatctgcgctttctcgatggcacggctcagcagcggcagtatcttgttgttgtcgtcgcccttggttatgtaatcgaatgccccgttcttgatggcctgcacgccgtcggggatattgccgtaggccgtcagcaggatgacctcggccgacggcatggcctgcttgatccgtccgaccatctcgacaccgttgccgtcgggcagcttgacgtcgcacagcacgacatcgggttcatagcggcggagcatcctgagccccccggcacaatcggcggcctcggccacctcgtaaccttccagagcgatgatgcgggccagcagcttgcgcaactgttcctcgtcgtcgataataagaatctttgccattcggttcgttcattcttttcggcaaaggtaacacaataattccacatatcgttccggcagcccccatacaacacggagcccccgcgatgcaggggctccgtgcgaaccggcaataccgggtctatttcacggagttcttataccactccttgtgtttttcgccacggctcttcacccaaccggcgaaatcgggatagaagacgtcgattttcaccatctcgtccgggatccggtaatcggtaacgggcagatcgatggcaaaaggatacaactcggaagtcgcataataatagggcccaatggggttccccgccttgtccagcgagctcttgtcatcgttgaggccgaaaggataggggtcggccagcgacgtgggcggatagttggtcaggtgtatttccttgcggacggccccgggaacaaaccctttgtcgctcacgcagatgaacgggttgtagagcgacttacgggtcaccttgtccatcgacaggctcccgtccagttcgatctcgacgctaacgggcccccgggccacggcctgctcgatgtcgtcgaagagtatcaccacggctttatcctggttcttttcgagtccggccgtcgaagacccgttttcgatcttcacgcctttgacggcggttacgggaatgtcgagctggtaaccgaaggcgctccggagtttaccgccgctgtgcaacggagtgacgacatcccggatcgccacgatccggttgtctttgtcgaccgtgaaggtcgtgctgtacccgaccaccacgtcgttcatgtcgtaatcgccctggctcggccacagatcctcgaaagccagcgtgccgaccacagggtcgcccgccacgtcgggatacttctcgtcaccggggtcggtcgtcgggcggtcggggtcgtaaatggcatcggcaggatcggagtccacatagaaaagcacgtccttatagtcgttgtcgccgccatcctcgaagccgagcacggtcttgccgctcactttgtcgtaaaggctgaccatatagcggccgttccccgcattgaactcattgttcgaatagcgcgccgggtgtttagaaccggtgatatcgagttttccggtatagtcataagccgaaatttcatacgcatcgggcagcatgaaccagcccacggtcgtaccggctgggaaaatgtcggtagccttgcctcccctgaaacaggtcagccgcagctgttcgccgaaaaacaggggtgccgtccaatcgccgccgcccgaccacaaatcgtccgggtcgtcgaaattggtcgtaaaagaagagcagttggggaaggccacgtacttgggcagcgcatcgaactcggcttgcgtccggggagggttctgcgtatcataataataataaccgatggcattgcgccatactgccagttctgcggcgaacaccagcgtcagatgggcatccttcgtcacattgaggttgaccaccccggtcggcatggcgtatttcgaattgtcgacgcccggcatcagtacgttctggatgcggttcatcagccccgcaggtgtctgcgcatattcggggtcgatattcaggttgggtttctggccgaacagcgtaccgaggatatagagcggtttcccttcccaagtccagtcgccgagctgctgcacgttataaggattggccgcatcggcacaggtcgccgcaacccggtcggcaaccgcgacgccgaagaccttcccggccgccttttcgtagaactgccgcacgttgcacgaaataccgccggcagtcacgtcggcctcgatacaggcggggaaaccgtaggattcgctatacacgtacaccttgcctacggcagtcgggaggttgaccactcccgaatatttaccgtcgttatcggtataggccctgagcaaggcttttacgccgggtttcaaggtaaacgcaccgtccacggcattcacagggttctgggcataaatttcaaacagcgccttgctgcccctgcgggcatagtccagattaagaggaatatcccgcgtcgtggcgtaatcgtatttatttccgccctgggccgtgtcatccgggccgggaacttcatccggccgttcgatacagccggtcggtaacatggtgcatactgcgagggcacacagcaggcacaggtatcgtaaatttttcatatgagaaaaaattggtttatcacatccttttccgacagccatccgcacctaccgttccgccctgcgaaagcaaattccgcagaagcccgcatttctgtcttggcaaatgtaaaaataaaccttatttcgcccaaatttggtcgataatcgcatgttattggggaaatacacgcaaattacacaacaaatacaactacatcataaaacatttcagccctcgcatccaacaaaaaaagaagccgggcttccgcccggcttaaagctcagaaatgaatattcttccgataccgggacggggacatgcccgtgtacctgcggaaaaagcggctcagggtagactggtcgggaaaattgacacgcgccacgatcgtcttcaagtccatcgccgattcccggagcagcgccttgatctcgaaaaccgtgaagtagacgatccagtcccgtgccgactgcccgctgatctcgttcatcaggttggtcagatacttcggagtgatcccgagcctctcggcgaaatacgccacgtccctgttgggagaatgttcctcgacgaccgtccgcatgaaccggaatgccagttcttccttatgggtataagcagtcttttcagcctgcggatcattgagatagatggtgtagatgtcccaatagaacacccgcaaaagctgcatcaccgactcgcggcagcagatggcgggggcattttcggcgcgataggccagcaagtcgcagaaattcaggaaccgcccgacatactcttcccgcggctccgaggcgatatgcgtgcgcatgtaaaaaaagaaaccgggcctggccctccacagggaactgagggtatcggtaaacatatcgtgcgatatgcggaaaaacctgatcccgaaatcgtcgcttacctccttgatggaaattaactgccagggaaacagggcaagcaccatcccgcgcacgatccggaagcggtggctgaaaacctgtaccgtagccgtacccgacaggcagatgcctccgaccccttccataaggtataccggacaatcggataccggtaattcgtcagactgtgtgtagataccgaactccccgggctcgagcaacctgaaaagtttcgtatcgtcttcatctatattcattgttacaaatttagatatttgtccgttctgaaagcacctcgcttttcaccaataacatgcaaaaattgccgcacatgaaaattcgtactttcatccgcatttctcggatcacagcgggtgaagcttccttgcccgaacctttttccgcacgcaaaagatcccggaaaactttgccggttcggaattaatgcctaccttcgtgcaaaacatcagatgatatgatgaaacccggttcgaacatgcaactcagcaagaaatcgctggccgaagagctggccgggcggttgcaggaacaattcatgtcggggaaattcgaggtgggcgaaaaactgccgcccgaaccggaattgatgcagattttcggggtcggccgctcaaccgtgcgcgaagcggtcagaatcctgtccaacatgggtttcctgaaggtacggcagggtgccgggacatttgtcgaacgcctcacgccgccggacgaaccgatggagcggcgcctcggacgcgccgacctgcacgacctggacgaggtgcggaaaatactggaagccgcgattgcagaaaaagccgccgaacggcgaacggcacacgacgccgcagtcctcgaaaagcacctcgcggaacggggagcgaccgcggctgccggggcattgcaggcctgtatcgaagccgacgtcaacttccacatcgccctggccgaggccacgcacaacgaaatcctgtgcgagctgtaccgctcgacggccgcccacctgaaaaaaaggttcagcaatatatacagggacacggagtgcctgctcgcctcccagcccacgcacgggcagttactcggatacatccttgccggggacgtgcggaacgcccgggaggcgatcacgcggatactcgaagaaccatagcccgcagcaatggagacgcttacaaaacccacggacacacgcctgcggcgcttcacggagaccggaacagtctacccgatactgttcatgatcagcatcacccacctgctgaacgacatgatgcagtcggtgatcccggccgtctacccgctcctgaaggagaaattcggcttcacgttcgcccagatcggaatcatcacgctggttttccagatgacctcgtcgctgctgcaacccttcatcggactctatgcagaccgccatccgcgcccctactcgctcgccgcggggatgtgcttcacgctgctcgggctgttcaccctctccgtcgccccgggcttcgtacccatcctgctggcggtagggctgatcggctgcggctcttcggtcttccaccccgaatcctcccgggtggcgcaactcgcttcgggaggccggaaaggactggcacagtcgatattccaggtcggcggcaacgccgggggcgccatggggccgctgctggccgcgctggtcgtcattcccttcgggcaggcctcgatcggctggttcgctttggccgcgatcctcgccatcctcatcctcacgagaatcgggaactggtataaacttcgcctcaccgtcaccgcaaaccaccccgcagcagccgcagcggccccggcacaccacttgggaaaacgcaaaatccgcctcgccctgggcatcctgggcgtgctggtattctcgaaatacttttacatcgccagcatgaccaactacttcacattcttcctgatggataaattcgggatctcggtgcaggggtcgcagtactgcctcttcgcattcctcggggcatcggctgtcggcacggtcgccggcgggccgctgggcgaccgtttcgggcgtaaatacgtgatctggggctccatcctcggagcagcgcccttcaccctgctgctgccctatgcgaacctggcctgcacgatcgcgctcgccgtcatcatcggactcgtcatctcctcggcattctccgccatcctggtctacgccaccgacctgatgcccggcaaggtcggaatgatcgccgggatctttttcgggctgatgttcggcctcggcggcctcggttcggcctttttcggctggctggccgacaagaccagcatcgaattcatcttccggatcagcaccctgctgcccctgttggggataatcacgggtttcctgccgaatatcgaaggcaaaacgacaaacacataaccgatgaaagcatgccaaatgtaatcgtactacgcccccgggctgttgcacgatagcttcgagagaagaagccccggaagattccaacctttactttaaccggtaacaccatgcagtacatttgtaaataccagtcgcccctcggcgggataacggtctccgccgacggcaacaacctaaccgggctctggttcgacgggcaaaaatactttgccgccacactgccggcagcacacgaagagaagcagctccccgtattcgaccagacacagcggtggctggactgctactttagcgggaaaaacccgggatttacacccccgctgcgccccgaagggtcgcccttccggcaggccgtatggaaaatattactgcaaataccgtatggggaaacaattacctacaaggatattgcggaagaaatcgcacggcaacagggaaagcaaaccatgtcggcgcaggccataggcggtgccgtagggcacaatccgatcagcattatcatcccctgccatagggtcgtgggcagcgacggcagcctgacgggatacgccggcggcattcctaaaaaggtcgggctcctcaccctcgaacaggcgaacatgtccggactgttcatcccggaaaagtaattccccctgcggaagcaaaagatccgccgacgggtataaaaaaatcctcacaactcgctgattcgcttgtcgcaaggatttaattgtctgtttggagcggaaaacgagactcgaactcgcgaccccaaccttggcaaggttgtgctctaccaactgagctatttccgcaatatgtttctccgtctgcaaaagaggctttcaacctccctttccggcatccgaaactcgcgtttcgggattgcaaatataaactgaaaaatctattctgcaaaattttccggcaaattttgtcgcaaaacgatgtccccggccttcggaaaagccggggacaccgtatgggaaacccttatatccgggcggcggaatgatccgtcctgccgggaagcggggaattaacgaaccaggaatccttcgtcggcacgtaccgggatgggcagtttggcgtaaataccatcctggagcttgctgcgtacggccttgaacgcctcgatggtgacattcacgtcctcgagggtatggactgcggtcgggatgatgcgcaagatgatctcgcctttcgggattacggggtaaacgaccatcgaacagaagatgccgtggttctcacgcaggtcgacgaccagattcgtagcctcggggatgccgcccttcaggaaaacgggcgtcacgggcgaattggtcacgccgatctcgaagccgttctctttgaggctgctttgcaacacgcgtacgatctcccaaagtttctgctggtattcggggtggttacggatcagctccaggcgtttcagggcaccgataaccatcggcatcgggagcgacttggcgtaaagctgcgaacgcatgttgtaacgcagcaggttgatcagccagcgggggccgcagacgaatgcaccgataccggccatcgacttggcaaaggtgttgaacagcacgtctacgccgtccactacgccgaaatgcgacgccgtaccgcggccgccctcacccatcgtaccgaagccgtgggcatcgtcgaccagcaggcggaactggaaatcctttttcagggccacgatctcgtcgagcttacccaggtcgcccttcatgccgaagacaccctcggtgattacgagtacgccgccgttctgctcttcggccaggtcggtggcatgctgcaattgcaggcgcagcgactccatgtcgttgtggccgtatacgaaacgcttgcccttgtgcaggcgcaggccgtcgatgatgcaggcatgcgcttcggcatcgtagaccaccacgtcgcgcggcgtcagcaggcagtcgatgatcgaaatcatgccctgataaccgaagttcagcaggaaggcgtcctccttgccgacgaactcggccagttcgcgctcgagacgctcgtggtagacggtctggccgctcatcatgcgggcgcccatcggggccgccatgccgaactgcgcggcaccctcggcgtcggccttgcggacttcggggtggttggccagcccgaggtaattgttcagactccagttgagcatcttcttgccccggaaagtcatgtgggggccgatatcgccttccagtttagggaacgcgtaataaccgtgggcgtacgacatgtactgaccgatggggccacctgcatttttctccaggcgtgcaaaaatatcaaccataaaatattgtaatttaatgtttaagtttccgtttcggacgcgcaaaagtacaaaaaaaccttttagccatcaaaattagccgttttttattcggcaagggtacgcatttatacttatttccggatatttaatatggaaaaaggccgctttcggcggcccggggaagaactttgttcggtttttcattttttcgatcggcggtctatcgcatcgacgatcaccgcgacggcaccgtcgcccgtcacgttggtcgccgtgccgaagctgtccatggcgatgtaggtggcgatcatcagccccgcgagcgtctcgtcgaacccgagcatcgactcgagcaatcccagcgccgccatgatcgcgccgcccggcacccccggtgcggcgatcatcgtcacgcccagcagcagaatgaaccccgcaaaagtccccgccgggatatccagcccgcccagcatcgaaacggccaatgcacaggccacgatcttcatcatcgaccccgagaggtggatcgtggcacagagcggtatgacgaacgacgccaattcgggacgcacgcccagccggagggtctgcgccagcgtcacggggatggtggcggccgacgattgcgtgccgagcgccgtgacataggccgtaagcatcgtacggagcatccgcagcgggtttttgcgcgctacgaggccggcaacggaaaactgtgcgagcagcagcacgacggtcatgaagaagatcaccacgatcagcttcacgaagacgcccagcactccggccacctgcccggactgggtcatcgagaggaagatgccgaagatatagaagggcagcagcgggatgatgatgcccgcgatcacgcggtcgatgatcgacttgaaatcgtccatcacccctttgagtttcacgctatgcgtataggccatgcccaacccgagtacgaaggccagtaccagtgccgacatgacaccgaacaggggcggcatcccgaccgtgaaataaggcacgagggccgttgcggccgcgtcgggcagcacggctgcggcgccttcgagcaatgcggggaacagcgcccgccccgtgaggtaggtgccgaagcccgagaaaagggtgaaggcataggccagcgccgccgtgagggccagcaggcgcccggcgttgcgtcccaggtcggcgatgcccggcgccaccagcccgaggatgagcaacgggatgacgaacgaaaggaactggccgaaaatatcattgaacgtaagggcgatacgcgtcgcccatacagggaagaaaaagccgcagccgaccccgaggccgatggccagcacgacgcgcggcagcaatccgaacctgaatttcataaggaatggtttttgtaaaggtagaaaaatatttccgttttagctatcttcggctttgcctcagacaggcggcgccccggcaaaatgcaagtaaacttgcttttgcccccggcatatactatctttgtggtatgacttcattattccatgacatcatcttcggcccggtacattcgcggcggctaggactctcgctgggggtcaacctcctgcccaccgagtcgaaactctgctcgttcgactgcatctactgcgaatgcggctggaatgccgagcatcccggcgcgcggcgcttcaacacccgcgaagacgtccgcacgcagctcgcagcgacgctgcggcgcatggtgaccgacggcaccccgcccgacgtcatcaccttcgccggcaacggcgagccgacgatgcaccccgaattcgaagccgtgatcggcgacacgatcgccctgcgcgacgagctgtgcccctcggccagggtttccgtgctttcgaacgccacgcagctccaccgcgagggcgtgcgccgtgcccttcgcagcgtggacaacaacatcctcaagctcgattcggccttcgacgccacggcacgcctgataaacaatccccagagcccggcctattccgtacgcagggtcgtcgatcagatgaaaggcttcgacgggcacctgaccgtgcagacgatgttcctgcgcggggagttcgacggacagcgggtcgacaacaccaccgaagaggaggtcgcggcatggctgcgcctgatcggcgaaatcggcccgcggcaggtcatggtctactcgctcgaccgcgacaccccgtgccggacgctcgaaaaagtgccgcgcgaggagttgcaggccatcgccgcccgcgtcgaggcactcggcatcccctgctccgtagcataaaccgcaccgcaccatgaaacgccttctgctgttcctgttgcttgcggccagctgtacggccgccgcacagaagcgccccacaacggacggactgtccgctttgcaggacagcatctggcagtgggcggcagacaacaaggcggccgatccggtcgcaaacgccatctacgcatcggcggtcaacgaaccggacggtgtcatagacgtacacatgatccgagccgacacggcgatgaaagcccgcttccgccgctgcgtgcacgacagccccctgatccggctccacgggttcgaccccgacacgacaccctatccgcccgcacccgaaggggctgctccgccggatgggctcacgatggatgccgaatacgcattttatcccgccggcaccgaacatatccggctcacgatccgccacaaaggcgattcgacggtatatttcgggagcgactacaccgtctgccgcttccagcacggacggtgggaaacgctgcccgtcgtcaatgcgtggaactcactgctggtcggcatcgggccaaacaacccatcccgcaccgaagtaccgcatccggcaccggccgccgaatacacctacgggttcacagcccggctcgcaccccgtgtctacccggcccggtatgcgcgttaccgtatctgcaaacaagtgtacaagacctgcccataccggccctacctgctcacggccgagttcacggtgacgccgttcgtcccgttcacccgctttgcggagccggcagaggggcaggacatccaattttgatccacagccatgcaaatactcctttcctgcgccaaaacgatggccgaaaacaatccggccgaaatcccccgaacgaccctgccgcgttacgcccgcgaggccgcggagctggccctgcagctggcgacgctcagcaccgaagagctggaacgcatgctgcgcaccaaccggcagatcgccgcgaccaaccgccggcgttaccggcagttccacggcgaagaggccctccccgcgctgctggcctacacgggcgtcgtattcaggcatatcgccccggagcgattcacccccggggatttcgaatacgcacagcagcacctcaacatcacgtcgttcctctacgggctgctccggccgctggacgcaatctgccgctaccggctggaaggggacgccgtattgccggggcacgacgaccaaacgatgttcgggtactggcagggacggctgacggaggcctttctcgaaaaaatccatgccgacgacggcatcctggtcaacctcgccagcagcgagatgaagcgcctgttcgactggaaacgcatccgccgcgaagcgcgtatcatcacgcccgaattccgcatccgcgaaggcgaccgtctgaaaaccatcgtggtctacacgaaaatgtgccgcggagagatgacgcgccacctcatcagaaaccggattacggatccggaaatgctcaaagaattcgaatgggaagggttccgcttcgacgccgcgctcagccggggcgacgactggacgttcacgatgtaacacggccgcaggaaaccgaagaagaaccctccggctcagtttcattgcccctggtcgacgaacaggagcctgtccgtccggtaaccgcgtcgttcggccagcccccgttcgaacggatggtcgtagcgggcgacctcctgccaagagcccatgtagcacgccaggtcgagcgacggcaccggagtgcggtcggtacggtcggc

SEQ ID NO: 313 - DNA, 169932 bp, Alistipes onderdonkii
  source 1..169932: mol_type = genomic DNA
cggccgcgatcctctacgacgcatccgacgccgcggtggtgaaacgcgcggcggagctcttcgctgccgacgtggaggccgtaacgggccgacgcccgcaggtgacctccgcgaccggggaaacaggcccggcggtaatcgtcgggacggtcggaggcagcgccctcatccgcaggctctccgaagcggggaagatcgacaccgccccgctcgaaggcgcctgggagcgttacctgatccagaccgtcgccaatcccctgccgggcatccgcacagccctcgtcatcgcgggcagcgaccgccgcggcgcggcctacgggctcttcacgctctcggagctgatcggcgtatccccctggtactggtgggccgacgttccggtgaaaaaacatgcggcgctccatgtcgacgccccgccgacctactcccagacgccgtcggtgcgctaccgcggcatcttcctcaacgacgaggactggggtctgacgccctgggcctcgcagaccttcgagcccgagcgcggcaacatcggccccagaacctacgccaaggtctgcgaactgctgctgcgcctcaaggccaactacctcgccccggccatgcaccccgtttccacctcgttcaaccaaatccctgaaaacaagctcgtggccgacacgttcgccatcgtgatgggatcgacccactgcgaaccgctgctgctgaacaccgccagcgaatgggataccaagacgatggggccctggaactacgacaagaacaaggagggtatcaaccgcgtgctcacgcagcgcgtgcgtgagaacagcccctacgagaacgtctatacgctggcgctgcgcggcctgcacgacggcgccatgtcgaccacgctgcccatgcacgaaaaggtgcggatgctccagcaggcgctgctcgaccagcggcgaatcctcgccgagaacatcgaccgaccggtcgagaccgtcccgcaggcgttcacaccctacaaggaggtgctggagatctattccaacgggctggaactgcccgacgacgtcacgatcgtctggccggacgacaactacggctacatgaaacgtctgagcggcgtgcgcgagcagcggcgcacggggcgctccggggtctactaccatgtctcctacctgggcgtaccgcacagctacctctggttcagcacgacgcccccgtcgctgatgtacgaagagctgcgcaaggcctacgacaccacggccgaccggctgtggctcttgaactgcggcgacctgaaaggctcggagatgcaggtttcgctcttcctcgacatggcctgggacatcggccgcttcacggccgacaacgtcgtgacctacccggcacgctggctggccggcatcttcggcgaagcgtactacgaccgcctcgaagcgatgacccgcgaacacctgcggctggccttcccccgcaagcccgaatacatgggctggggctaccactggaaccgcttcgaccacaactgcgagcagcttaccgacaccgatttctcgttcaccaactacgacgaggcacagcggcggctggaggcctaccggcagctcggcgcccgagccgaagccctgttgcacgagatcggcgacgaagcccgcccggctttctaccagttggtctactaccccctgcgcggcgccgaactgatgaaccgcatgacgctcggcggccagcgcaaccgctggtacgcacgccagggccgcgcggcaaccaatgccgtgcgcgacgaggtgcagcgctgctacgacagcctgcaggtcatcacccgggggtataactcgctgctcggcggcaaatggaaccacatgatgtccatgcgccagaactacgacggcgtgagcgcctatttcaacctgccgcacctggcaacgcacgacgccgcaggcgctccccggctggcattgcaggtcgcaggcgaggacgtcacgggcgcccgggccttccacgccctgcctgcgttcgacaactacctgcgccgcacctaccccgtcgagatatacaaccggggcggcggcacgctcgcctggacggcgcatgcctccgaaccctggatcgtcctgagcaaatccgccggaaaaaccgccgacgaagagcgcatcacggtgggcatcgactgggagaaagccccctcggggaacgcggtgccggcccagatcgtcttccgcgcgggtgaacagtccgagaaggtgctcgtatcgctcttcaaccccaccgccccgtcgcgggccgagctccgcggcatctacgtcgagaacaacggctgcgtctcgatccccgccgcaggctgccaccgcgtccgtgaaaacgaccgaatcaaaataacagccgtcgaagacctcggcatcgaaggccccgcgctgcagctgggcgacccgaccgccccgctccagatcttccgcagccgcgacgtcccgtgcgccgaatacgacttctacgccttcgacgccggttcggtcgatgtctacacctacgtgctgccgaccttcccgctccacgccgaccgcgatttccgcatcggcgaaaacacgaacaccgacaccaagtacagcgtccagatcgacgacggggcattggccaccccctcctcgtcgcacgtcgaatactcgcaggtgtggttcgaaagcgtgctgcgcaactgcgccgtcaacaaatcgacgctccacatcgacaagccgggacgccacacgctgcgcatccgcgtcggcgacccgggcatcgtcctgcaaaagatcgtcctcgacttcgggggcatgaaacgctcttacctcggcccgcaatcgaccctaatcgaataacttatgaaatacgtaactctccttttcgcatgccttgctgcatactgcgccgcggcgcaaaatacggcctcggcagccgcccggagcggcaaccccgtcttcccgggttggtacgccgaccccgaaggggtggtcttcggcgacacctactggatctacccgacctactcggccgactacgacgagcagaccttcctggacgccttctcgtcgaaagacctcgtacactggcagaagcacccccggatcgtctccaacgacgaggtgaagtgggtgaaacacgccatgtgggcgcccgcggccgttcatgccaacggcaagtattaccttttcttcgccggcaacgacatccacgagggtgaaaccggcggcatcggcgtagccgtggccgactccccggccgggccgttccgcgatgcgctgggcaagccgctcatcgacagcatcgtcaacggggcccagcccatcgaccagttcgtcttccgcgacgacgacggcagctactacatgtactacggcggctgggggcactgcaacatggttcgcctgtcgccggatctgctgcgtatcgtgcccttcgacgacggcaccctctataaggaggtcacccccgcgaattacaccgaggggccgttcatgctcaggcaccgcggaaaatattacttcatgtggtcggaagggggctggacgggccccgattactgcgtcgcctacgccatcgccgactcgcccttcgggccgttcgaacgcatcggcaagatcctcgaacaagacccggcgatcgcccgcggtgccgggcaccactccgtcatacaggttccggggcgggacgaatggtacatcgtctaccaccgccgcccgctggacgaaacggcagccagcagccgtgaaacctgcatcgaccgcatgtatttcgatgccgaggggcacatcgtcccggtcaggatgacccgcgaaggcgtcgaagcccgccccattcccgctgccggcaaggcgcggtaaacccgtcccgcaagcgggaggcgtccacgcactaaaatccccgttcggcagcattgccgaacggggattttagtgcctgccggcacttatggggaaacggatgcggtgtcactcgcccaaccgctcggagagccagcgcgcgagcgagttccggaactcgtccttgtatttgaaggtctcgttccagccccagccgtgcccgcccgtcggataaatatggatctcgcccggcaccgaggcggctttgagcgcattgtagaacaacgtgccgttgaccgggggcaccccgtcgtcgtcatcgctgaaggcgatgaacgtcggcggagtcccgctggtcacgcgcagttcgttgctgaacgccgcaaccagcccctcggctggtgctccgcccagcagattcctccgcgacccggcatgcgtaaaacgttcgtccatcgtaatgaccgggtagaccaggacggcgaaatcgggacggttcgcatcgcaggtgaagtgcgtcgcagccgtcgaggccaggtgtcccccggccgaaaagccgatgacgccgacccgcgcggggtctacgccccacccggccgcattcgcacgcaccagctcgatcgcctgctgcacgtcccggcggggcaggtcgtagttgccgtggggcatggtgtatttcagcacgacggcggcaaacccgcgcgccgcgaaccactccgccacctgatagccctcatggccgatagccaggccgccgtaggcaccgcccgggcagaccaccacggccggcgccggcttcttcccttcggggcggtacaacgtgacatagggggcgttgtcgcggtcgaatccggcaccgagccgctccggggcatacttcccggcctcgggccataacctgaactcctccttctgctgtgcagggacagctgcggcgaacagcagcgcccacgccgccaaaatcagtttctttgtcatatccatcggttgttaacagtaatacgattttttccggggtcagcgcacgacccgcaccccatcgggtgccgacacgctcgtcgagaccttcccgtcggcaccgcgctcgtggcgcacccggataacgccccacggggtcgggaacgtcccctcggcccacttcaggtgtcccaggtgggggcgcaccgccacggacttgcagcccggttcgagcggcacgatgcccagcacgtgccgcgaaagccagggagtggggcccgatgcccagccgtggcaaaggctgtggcgcaaccccttgtagcaataggcgcccgactcggcatggatgtcgaatttcccggccggaaccggctcgtcgatacgcgccgcaccggccgcatgcgcgtaattgaggtcttcccagaaagtcgtggcccccaggtcgagcatcgcaccccaataatcggagatgatctgcaaagcctcatcgtaaaggccgccttcggccagcgcctcgagcatgtaatatccgtagaaggtcgagaaaccttccgccccgccccgggcgatcaccgtccggcacaccttgccggggtcggccagcccggccagcacgagcatcgccgccgcctgcttgttccgcaggtggtcgggcacgtgccgccgcaaccgccgcagcgccccacggcactccgactgcatctgcctgtcgccgagccagccgccgatttcggcgccggcctccatggccatcaccatcagggcctgatacccggcatggatcacgtcgggcatctgggacgtgggccagtccagcaggcgctggccgccctgcaggttctcacggtcgccgtccatctgcgacgccagcacccgcagcagggcgcgcatatattcctgctgttcacggagatagttcaaatcgccctcgtacatatacaggtcgcggtggataatgacccaccacatcgagtaggccgcgatccagttcatccacccgggcagcggcgtattgtcgcgcacgtggtcgaggctccggcgcacgacctcattgccgccgaacacgctctgtacggtcatcacctcggggtgcatgtccccgagccataccagacggtcgcgtttcaccccgtcccagaggtactcctgcatattgaggtggacagtataggcccccgtctcccagatgcggttcagccgttcatcatcgcagcggaacgaccccagataagggacgtcgcggtaacggaggatcgcccgcacggctttcagattgagctccgcatcaggctccaccaggtcgatccgcacgaagcggaaccccgagttcccggcctcgacattgcccagccacggcacgccgagcgtaaaatcgcgcagcgaatgctcgttcgtggcgctggccatcggggcgtcgccgccgacgtcgctcatcgcctcgctcaccgattcgcccaggcggatccgcaccttcagcgcccgctggtcggcgcgtatcgccgccgagagcgcgatcccgccgcacaactccttgccgaaatcgagcagcacggaagccgagcgcccgtcgcgggtcgagaggcggcagacatcgggcgtcccggtcgtcagctgcccgtcgaaattccggagcagcgcttcgggattttccacccccgccgtcagctcgccgggcagtgcgaccagccgcagcggggtcacgtacctgcgtgaaatcacatccgtggcgctccggccttccagccccttctccagtatgttctcctgcccgtacacggccgccgcaaaggccagcagcagggcaagcagtgctatctgtctcatcgtgcaatcatccgttcgattaccaccgggttgaacagccccgaaggctgtaactgcgaatcgggacgccacggattgttcagcgtccatgtcccgcgctgatcctcggggagcctgctgtcgccgatcaggcggttcacccacgtattgaccacgtcgatgacgagggtattcttccctttgcgcacgaagtccgtgacgtcgaccctgtacggcgccgtccacacgcccccggcgtacttgccgttgacatagaccttggccatcacgccgacctggcccgtgttcacgtacagccggccggatttctccttccccctgaggtcgaacgtcgtctcatagcggacactgcccgagaaatagcgcaccgactcgtcgtcggagagccgcaggtctttcagttcgtccgccacgacaggctccgccgggccccggcgcccctcctggaaggtcagtgtccacggcccgtccagcgtcttgacccgcaccggggtcgggaaattcgccgtcccgtccctgtgcgcagcgcccgccccatccgcgcgcagtacgacgaacaggctttggttgggctccaacaccatcggcagcgtcgtcctgcgaccgtcatcctcgaactccggcagcggacggatcgcccccgtcacggcatcccatgcctcgggcacagagccggtcacacgcagcgtgcaggggaaagcgatgcgcgcgtccgactggttggtcaggaagtaaatctgctcgtcgcccgcatcgcggtgcccgaagagcacggggacatcggccccgacctcgcagtcgggcaggcactgcacataggccagcgcctcctccatggtcatgccgtccagcacggcgcccttgccgtagcgggcggccttcacggccttgccgtcgaccccgccccagagctccgcagccatgcggcgcacccgggcgtcggcatcgggatagccttcgaggctcggcgaacgctgcggcgcaggccccagcagcacgccgccctcacggacgagcgcctgcagcttcgcaagcagttcggggcgcatcgtcttgagcttcggcaacaccagtatccggtattgcgtcccgtgcggaagcgtccacaggccgtccttcacggtggcgcgttccagcagcacctcgccgttgatataatcgtactggtaccctcggggcagcgccgggtcggtgacgcccgtcattttcggagcgtcctcgccgatgaaataggccacgtcggcgacgttgagcccctgctgcaacatgtaattgacacgcttgaggtaatccgtgaagaggtcgatatgcgagaaccacgtgttgttgcggttgaattccgttccgaaccaggcattcatgccgggcagttcgtcgcccggctgcgaaatgtagacgtgcagcagcgtgttgttgatcccctcggagaagaacctgtcaccgcgcggcttcaccatcgccggataacgcccgaaatcgttcccggccgaggtgtacgactcggccgacactttccgcttgccgtagatgtgggcgcacgacgaggcggcacggttctcgatgtcgcccagcgacccttcgccccagaattcgcccccgacctcgtccgactggccgccgtactgcaggaactcgccgggataaccccagtggccgtagttctccagccacaacgtcagcccgtatttgtgcgcgatttcgcgcaatcccccgatatgcgcataggccagcttgtcggccgccaggcgccgcatgtcccacaggaaccggtcggagatatcctggctgccgaccaccacgccgtcgtaaacgggcaggaacggcagggcgtcgtaaccgtaacgctccctaaagtcggtcaggaaggtatccgtaaagttctgccctcccttctcgtagctgtcggccaccaccacgcggaacgtcctgcggtcttcggccgggatgcggcggagtatctcaccgataaaggcgtcgaaatggtgctgcaggtaggccggggtcatcttgtccacttcgagcccggtgccttcgggcgccgcgggcgaattctggatgccggtcgggcgcatcccggtacgcatgacgacccactccccggcaggggcttcccacaccaggcggtcaccgtcgagacattccgttatgtcgaccaccttcgcggggtcgaccgccagcgaggcatcgtccagcgcgggctggtcgcgccactggtactcctcccagtagggcagcggcgactggaacatcttggcaaaggtcttctccgcataacgctccacacggagcagcggggagagcaacacttccgcgaaacccgtatccttccccgcgccgcgaactatgagccggaactcgcgccccgtggtcttcgccacgctgaccgaaaccggggcgtaagggtcgaagccgacctcgatattggggttcgagcggtcgatcccgaacgatgcgattgtccggtagccgtccgcccccttcacctgcaattcggcctcggcacgtatcggacggcgggcgggccacaccgtgatgttgcgcagatccatgtcggcgtccgtcaccaagtcgatgacggcttcggggctgccatcgaagagaagctccgtcgccgggtcgccgtctatgaggcattgcgccccggcagccgtgccggcagccgtcacacgcgtatcggccgccgtcagcgccgcacgccccacggcgggagcgggataggcgaccacccgcacgtcctggaaatcggccgacgggcgcggcagctccacctcgaccttcccgccgccccggacatgcgccttgaccgaagccaggtaacgcatggcctgcccgggttcgatccacggccctccggcctggctccagccggggctgttgaacatgccgatctcgatacccagctccgaggcgcgtttgagcgccgcatgggtcacttcccaccattcgtccgtaaaaagtttcacaggggcatagggcgtcgccagctccccgaggccgatattgccgatgaaggcacggttgatccccgcccgtttcatcgcttcgaggtctttcaccacgccctccttcgagacattgcccgaaagccagtaccagtaaaccgaggtctggacagagtcgggcggcgccacgaaccccgcggccagggcggcatgggagccgcccttcggggcggcctgccccgccagcggagcgagggccagcggcagcatcagaatcagtttcgatagtttgttcatcgcaggaatatttcaggttatgggtaaaaatcgtcctgtgcaggcagccgtcccgcacgggaatgcggcccgcggcagcagccttccgccccgaggcggaagggtcatttggccaccctgagcgtcagcgtatggcttccggcacccagctgatgcaccttcccgccgtccacgttggccggcaggtagagcgttgcggtactgttggccgggattcggacgcggtaggtcaccgtattgccccggcgcgtccatgccgacacgatccgcccgcagggggcgtcgtgcgaagcctcgaattcctcggggccgacgaaattcgggcgcagcaggatgtgtttgaagcccggcgcttcggggtcgggcttgatgccgcccagccccttgaagaaccacccgccgatctcgccgaacatcatgtggttgtccgagatgtcgcgcgtggcttcgaggttccagttttcgagcagcgtggtggcgccgttcacgatccaccatccccacgaaggataggtgtcctgcaccgcgaccttgtaggccgtttcggcatggccgttctcgctcagcgcattgaggatggccttggcgcccagcaccccgacgtcgaggtggaacccggcttcggcgaccttgcgggcgaggttgccggcgaccttggcgaccatctcctcgggcacgacgccccacatcagcggaacgctcagctcggtctgcgtgccgctggcatagatgcccgccgcacggtcgaggtatttgtcgttgatggccccgcggattttgccggccagtgcctcgtagtgcttccggtcggcctcccggccgaacagggcggcggcacgggcgaggatcgtggcatcgacgtagaaatagaccgacgaggtcagctccagcgacgactgcgagcggacgggcacccagtcgccgcgtccccacgaggagaggtgccccgggctgcggcggtcaacgtaatcgacatagcgtttgatattctcgtagcaatcctccagcggcttcgtgtccccgtagaagaggtagaggttccacgggatgatggcgatggtactcgtccagtccagcccgttggccgtgccgtagccccagccgccggtggggatgatgtcgggcagcacgccgttgggctgctgttcgtcgcggtggtcggcgagccacttctcgtagaccgtaatgccgtcgtagttgtacagcgccgtttcgatggccaggtggccgtcgcccgtccagccgttcttctcgcgctgggggcagtcggtcgggtaacccatcaggttcgagaggtaggccttgttggtggcgtcccaaagtttgtccaccaggtcgttcgacgtctcgatatgccccacgggagtcacgtcgctgtgcatggcataggccgtcaggttctccgcagacagctctaccggccggtcggcaactacctcgacatagcggaagcccttgtagttgaaccggggcatgaactcgtcgtcgcggccgctcagggtcaccacgtcggtctggaacaggtcgtccttgtccgtcggacggaaatagacgtcgatgttcgacaggtcggcatggccgtcttcgcgcaggcgttcggcatggatgagccgcagctgcgtcccggcttcacccctcaggcggagcttcgtcacaccggccatgttctggccgaaatcgtagaggtagctccgttcgtcgagcttgcgcacgctgcgcggcttgtattgggtgacgttgcggatcggcaccgtctgctgtgccgtaaccctctgcgacggcgcgccgcggtacatcaccccgccccaggccgaatcgtcgaacccgggagcgctccaacccggctgctcgagccgcgcgtcgtaatgctccgaagtatagatgctgttgaacaccagcggcccgcccgaggtgcgccagtcgaggtcggacttcacgacctcgtgcgtcccgtccgcatattcgatacgcaggtcgaagcagaacgccgggcggttgcgccacggcgcccgctcgaagttccacacggcgcccgactgatggttgtaccagccgttgcccagcaggatgcccacggcattggccccgtcctgcaactgccgcgtcacgtcataggtgacgtagaggttccggcggtcgaagcgcgtatacatcgggtcgaggcggtggtcgccgaccttccgcccgttgatatggagttcgtacaacccggccgccgcgacataggcgcgggccgatttcacgcgtttgcccacggagaactccttgcggaaatagggcgcgggcttatggtctatgtcgtggtggtcgctgatccagcatccctgccagttttcgatgcccatcatgccggtctcgaacgctgcgaccccggacgaggagcgcgcgtagtccttgtcccagaccgtcacggcccagtaataacgggtgaagggatcgagctgcggcccggcgtaacggacgagcgtcccgtccgaatccgtgcgccccgaatcccacacgtcgccgcgtccggcggccacggcggcggaatcccgccccacgacgaccctgtaagcccgctggagtgccccggaacggctgtcgtccagacgccagcccagtcgcggcgccggggcgtcgatgcccagcggcgcctccagatgttcgcaccgcagccccacgggcgtacacggtgccgcggcctgcgcaccgatcgcagcagccgcaaaacaaagcgttaagagtatctttttcataaaacggtaaaattatcgtttccgtcctccggcggcaacagcacccgccgcgttccggggtacaagtacggacagctccggcgcccgaagccgcagggataccccgtccgcaggcttccggcatacggggatgcccgtcggccgccgctcacggcggggaatgccctccccgcccgggggcatcgttggatcagaggttgaacgcccgtttcaattcgtccatctgctcctgcgtcgtcccggtgggctcgaagcccatcgaacgggccgtgaggtagatctgcgccgatttcgagagcacgtcgacctggtcgaacgcctcgaagatgtcgggccctacggcacatacgccgtgtttctcccacatcaccacgtcgtactcgcgcagctgcgcgatggtggcctcggccagttcgaccgacgagggcatcttataggggacgattcccagccccttggggcagaaggcccgcgtctcgggaatcatgctccacaggaggttggtcaagacgtccttttcgaggaacgcagggttatgcgtcatggcgatcaggtcgatgggatgggtgtgcagcgccgccttgtagccgttgcccgaggcgatcatctggttgtgcatcgccaggtgcgaagccagctccgaggtgggtttcaccgccttgtcggcgatgatctcgtacgacgcgcagtcgtcgaggatgcggattaccgagccgttctccatcgggcggcgcgccaggtcgcgcatacgtttgttggtacccttgcagaagaaatagcaccccttgaggcggggcagtgtggtgccgatcgggaaacgcccgctgaccggctccatcgcgcggatcacgtcgtcgacgtgctccgtgatgtttaccgtgatgttgccgccattgcgctcggcccaccccttctgccagaggtaaccggccacttcggccactttgtccacctcggcggccagcgccgggcggttttcgagtatggatttcatcgtcagaacaaattaggaaatacgagtgagaaaatcaggatcgccaggccgcagaccaatacgcccacggtcttggccgacacgccgcgccactcccggaggataatgccccacacgttggagaaggtgacgttgagcgccatgaggatgcaccaggcgaatgccgccacgaccgacccgggctcgaagaaggtctgcccgatgccgaagccgaagaactgcgagtaccacagtgcccctgccaacgcgcagaacaacaggttgttggcatagagcgcccccttgccgtagtcgccgaacgtgcggttgcgcgcattctgccacaggcagtaggcggcattggtcacgaagcccccgagcgtcaccatcagcgtggcgggcagcgtgcggaacagggcgctgccgccctcgacctgcaacggcctcccggcctccagcccgaggttgaagcaggcgctcatcacgcccgccagcaacgccacggccagccccttcgtaagggcgaagtccttgacggcggcgcgtttctcctcgtcggtcatgttctgcgcgcgcagcgacccggcgtagccgatcacggcgatgcccgccagcgtaatcgagacgcccaacagcagtacgagccctttgcccgcaaagaggttttcacccgcgaagatggcggggaagagggtgccgaacccggcgcaggtgcccagggcgatcgactgcccgagcgccactccgaggtagcgcatcgacagcccgaacgtcaggccgcccacaccccacagcacgccgtagccggcggccttgaaggcggtggagggggcggtcgagaggatttccccgagcgagctgcccgcgggaaccgccagcagtgcccccagcagcgggaacaccagccaggcgaagataccctgtaccagccagaagctctcccacgaccactccttcacctttttgatgggtacataggagctcgactggcaaaagctgccgacggcgatgatcagaagtccgagaagcgtattcatggcctttgttttagaatgcggtacggtatagtttttcgatatccccgaccgaggtcggacgcgggttgccgcccgtgcagacgtcgttgaacgccgccacggccagcgcggggatgtcctcctccttcacgccgatctcgtgcagtcgctgcgggataccgatgctgagcgacagattgcgcacggccctgaccgccgcggcgacgccctcgtcgacgctcatgcccgcggtatcgacgcccatcgcccgcgcgatgtcgaggtatttggcgcgcgagggcgactcggcattgtattccatcacatagggcagcagcagtgcgttcgccacgccgtgcggcgtgtcgtagaacgcccccagggggtgcgccatcgagtgcacgatgcccagcccgacgttcgagaaacccatgcccgcgatgtactgcgcctcggccatgccgttgcgggcgacggggtcgctgccgtcctcgacggcgttccgcaagtgcgcggcgaccagctcgatggccttcagctcgaacatgtcgctcatcgtccacgccccgggcgtgatatacccttcgatggcgtgcgtcagggcgtccatgcccgtagcggccgtcagcccccggggcatcgacatcatcagctcgcagtcgatcaccgcgcacatcgggatgtcgttgggatcgacgcagaccatcttcttgcggttctcctcgtcggtgatgacatagttgatcgtcacctcggccgccgttcccgcggtcgtcggcacggcgaaggtcggcacggcgcggtgcttggtgtcggccacgccctccaacgagcgcacgtcggcgaacccggggttgttgacgatgatgcccactgccttggccgtgtcgatcgacgaaccgccgcccagcgccaccatgcagtcggcgcccgaagccttgaacgcctcgacgccctgctgcacgttgcggatcgtggggttggccttgatctggctgtaaatctcatagggaatgtccgccccgcggagcacctcctcgatcttcgcggccacgccgaaccggatgaggtctttgtccgttacgagcagcacctttttaaagccccgcttgcggatctcgtcggcgatcaccgagcggcaccctgcgccgtagtacgacgtctcgttcagtacgatgcggtacatgaccttagcgtttggaggttacttccctttcgtactgctggatcccggcgatgaactcctcgcccacgggcacgtcgttgcgcaggcagaacatgtcccatacggcgttccagggcagcgacttcgactcttcgagcagcgccaggcgctcgaagccctgtccggcagcctcgtaccggcgaagctgcgcgagcggttcgagcaacgcctgcatcaggcacttctgcgtggcgcgcgagccgatgacataggcgccgatgcggttgatcgaggcatcgaaataatccagcccgatatgtacgcggtcgagcgcatcgcagcgtacgatctccttgcacaactccagcgtatcgtcgttcatgatcgtcacgtggtcggaatcccagcgcaccgggcgcgacacgtgcagcatcacctcggggatgaacagcagcagcgacgaaatcttgtcggccacgatctccgtggggtggaaatgccccgtatcgagggtcacgatcttgccgcggctggctccgtagccgatgtagaagtcgttgctcccgacggtatagctctccagcccgatgccgaacaccttcgactcgatgcagtccttcatgtggtcgtattcggtctcgaagatgcggtcgagcgagtcgcgcagcagctcgcggtagagcatgcggttcaccgtaaggtctttcgagccgtcgtgcacccagaggttcatgatcgaggggtcgccctgcgccttgcccatctcttcggcaatggcgcggcagcgcttggtgtgttccacccagaaggcccggattccggggtcggggttcgccagcgagagatcgccgctcttggggtgcgagaacgacgtcgagttgaagtcgagcttcatgccgtgctctttcgcccactcgatccagccctggaaatgccggggctccacctggtcgcggtcgaccgtctcgccgccgaactcgccgtagatctcatgcaggttcaggcggtgcgtaccgggaatgaacgacttggccttgaggatgtcggcacgcagctcttcgatgttgcgggctttgcccgggtagttgcccgtagcctggatgccgcccgtgaggtcgccgccccggttttcgaagcccgtcacgtcgtccgcctgccagcagtggagcgagagcgaaatgttctgaagcgccgcgagcgcctgttcggtgtctacgccgatccccgcatagcgttcccgcgcgatggcgtatgccttttcgataagttccgttttcataagaatgacagttttattttttcggttgatatgttttcgtttcgatcgagcggccgatgtagcgccgcatttcggcgagcgaagagaccacgcccgcggcacgcgcctgcaccatgatgttgcccagcgccgtggcttcggcagggcccgccacgacggggatgccgacagcgtcggccgtcatccggttcagcaggtcgttctgtgcaccgccgccgatgacgtgcaggcattcgatttcgaacggcgccagccgccgcaatttaccgagcacctcggcgtatttcgcggccagcgagtcgaatatcagccgcatcagcgccgcatcgtccgccgggacggggacgccgtgcgccgcgcaccacgcgcggatcgcctgcggcatgtcggtcggcgcggcgaactccgcggcatcggggtcgatgacccccggcgacggggcggcaccctcggtcatgcgcacgatctcttcatagctatactccctgccctggcggctccacaccgcgcggcactgttcgagcagccacatgccggtgatgttcttcaggaaacgcaccgtgccgtccacgccgccctcgttggtgaagttcatcgcataggactcctccgtaatgatcggctcccgcacctcgatgcccatcagcgaccacgtccccgacgagaggtaggcgaagcgcccgttccgggcaggcacggccgccacggccgaagccgtatcgtgccccgcgacggccaccacgggcaccgcccccagcccggtctgccgggccacggcgtcgcagagcaccccgatcctctggccgggcatcaccacccgcgggaaaagcgcgggatcgacgcccgcctcgcgcagcagtgcgccgtcgatctcccgcgtgcggggatccatgaactgcgacgtcgagaggatcgtatactcgcataccttctcgccggtgagcaggtacgacagcgcgtcgggcatgaaaagcaccgacgcggcattttccagcgccgacatcccctccccgcgcgcggcacggagctggaagagcgaattgaaattcatgatctggatacccgtgcggcggtacacttcttgccggggtattttccggaagaactcctcgggaaccccgttggtatagggatcgcggtaagccctcggaagcccggccagcgtaccgtcggccgccacgcaggccatgtcgacgccccacgtgtcgataccgatcgaatcgaccggaatccttcgctgcccggccagcgtcaggccgtgcaggatttcctcatagagggagtagatgttccaataatatttgccgccgatcgaaagcaggcggttcgggaagcggtgcagaacttcgagggcgatgccctcgccgcagagcgtggcgagaatgacacggccgctcgtggcaccgagatcgacaccgacgaaataacggttcatcacggaaagttttaggttactgatgcaaaactatacaatcttttccctacctttgttgatggttttgacaaactatatatagatttgacactatggacgaccggccgctgagcatccttcactacctgccagtctccccgcgcgacgagcagtggggcatcgtctgcaccacggccgggcaccagcacgtcccgcccggaacgccctaccccgtctcggaacaccccgagcactacctgttttacaaaggcagcggccgcacgctcgacgagtaccagctggtctacatcaccgccggacggggacgtttcgagtcggcatcctgcccgtcgcagacagtcgaggcgggcaccatgctcctgctcttccccaacgaatggcactcctattcgcccgaccccggcaccggatggacggagtggtgggtcggcttccgcggcgccaatatcgaccggctggaacagcaggggttcctctgccgccggcgccccctgctgcggatcgggtgcagcggcggcatcgagcggtgctaccgcgagatcatcggcacggtcgaggaggagcgcgtgggattccagccgctcatttcgagcatcgtgctccacatcctggggtcggtgctcttcaagcacagcaacctgctctactccgacaaccccgtcgtcgagaagatcaaccgcgcgaaagccatcatgcgcacagacttcggccgcaaccgctcgcccgaacagatcgcccgcgaagtgggcatgggctacacgtggttccgccgcgtcttccgcgaatacgtggggatggcgccggcgcaataccagcacacgatgcggctcaacaaggcccgggaactgctcgcgacgacagcccacagcatctcggaaatagcctatgcgctcggcttcgaaagcgtgagcgccttctcgctctttttccgcctccgcgaacggctcagccccagtcagtaccgcgcccgcttccggggcgggaaggggcagtgacccgccggggcaggccaaggcagcgatacacgggggctacaacccgccgccgaccaaagcattgacccgcgggcgcaaataggggttgatattatgtattaaactgaaatcacggcatatcacttacaatctgcaagcataatacaccaaaaaactgcgcatcctttactttacttcccgtttcagcctaatcgcccccgataaaatcccctttgagaactctttacggggtttcgcgtatttcctccgtacatcaccgatcgccggaaaattgttatctcctcaggttttcggggaagttcgtcccctccggcgaaaaatatttttatattttttatatttttttcaaaaatccaccccgcaggttggcacatattaaatattattaaaaaaataaggtatccagaaacacctacgaccggaaacccaccgcatatcaaaccgtaccggagggtattttttcgcccgaaaaccccaaaatattcaaaacacattgaattttattttcgtttttataaaaatattttaacccgcattcaacaatggttcgccgggttaaaataaaatgttaagttatttatatttagccttataacacctgttttcatccggaaaagagggccggaaagaccctttccgaacactcctgcttacatttcatctattttgaacatttggcaaattcgttttaattatttttctttgtcgagtaagaaagtatcatttacttatgcaaaaaacgaaacttctactcaacattcttgcatttttcctatgtgccctgccggcgatagccgtagcgcagggggggggaaatgtgaccgtcagaggcatcgtcacctcggcggatgacaagcaacccctcatcggggtcaacgtgatttccggggccaccagcggggtgagcacccttgcggacggaagctactcgatcagcgtcgccgcagggacgacgctcaccttccagtacatcggctacaagcccgccacctttacggttccgggcggcagcgcctcgctgacctacaacgtctccctcgagagcgaggcacaggcgctcgacgacgtggtggtcatcgcttacggtgtccgcaagaagggcaccattgccggatcggtatcgaccgtcaaggccgaaaaggtcgagaacacccctacggcggcgttcgatcaggccatccagggacaggttcccggactgacggtactttccaattcgggtgagccgagcacgtcggcaacgatgatgatccggggcatgaactcgatcaactcgggtacctcgccgctctacatcctcgacggggtcgccatcgccagttccgacttcaacaccatcaacccggccgacatcgagagcatctcggtgctcaaggacgcctcctccacctctatatatggtgcgcgcgcggccaacggcgtgatcgtcatcacgaccaagcgcgggcgcatggccgagcgggcgaagatcaactaccgcatgcagctcggtttctcgcagatcgcctacggcaactgggatctgatggacaccgacgaacgcatccggtacgagaaggagatcgggttcaccgacggcaaaaactacaacgtcctgggcaagaccaacgtcaactggctcgacgaggtgttcaacgatgccgccctgctccagaactacgagctctcggtttcgggggccaccgacaagaccaattactacgtctcgggcggctactacaaccaggagggcattgccgcaggttcggccttcgagcgcttctcgctccgcgccaacgtcgagcagcaggccgccaaatggctcaagctcggcaccaacacgatgatgaactaccagaccatcgaacgcgccgagtcgggcgaatatacgctcgtgacccccatctcggccgcacgtttcatgatgccctactggaacccccaccgccccgacggctcgctcgcctcgatcaaggacggcacctggaagggcgaaggccagaacccgctcgaatggctggccaacaacaagatctcctataaaaaatacaaggtgatctcgacgctcttcgccgaggccacccccatcgaggggctcaccatccggtcgcagttcggcgtaggctattcgcacacgacgggcttcggcgcctcctaccccaactacccgcccaacctgggctcggggacggcccagcgctactcgaccgacggcatgagcctttccatcaccaatacgatcaactaccgcttctcgctcgacggcggacactcgttcaacttccttttgggccaggagggcgtcgattacagctacgaggagttcacgctggccacccgcggccagaacaacgacaagctggtcaacatctcgtcggggacgcgagccacgtcgtggagcgacgtcaccgacgacaactacgccttcctgtcgttcttcgcgcgcggcgaatacaactacgccgaccgttactacatcgacttctccgtccgtaccgacggctcctcgcgcttcggcacctcgggacgctgggctgcgttcggctcggtgggcatgatgtggaacctgcgcaacgagaaattcatggagaactcgcgccgctggctcaccaacgcgcagatcgccttcagcacgggcacctcgggtaactcgtcgatccccaactacgaacacatggcgctcgtgagcggcggcctgaactactacggcgacgccggcatcgccccctcgcagccgggcaacgaagacctgcagtgggagaagctgtggatcaccaacctggccgtgcacctgggcttctggaaccgcctgaacgtggacgtcgaactctaccacaagaagaacagcgccatgctcatggaggttcccgtttcctacaccacctccaacggcttcggcttccgctgggacaacgtgggcgacatgaccaaccgcggcgtcgaggtgagcctggccgccgacgtcatccagcacaaggatttcgtgtggagcgtgaacgccaacgtctcctacaacaggaacaagatgaccaagctctacagcggggtcagcgaatacgagctttcgagcaccaataccaaactggtcgtggggcactccttcggcgagttctacctcaaccggttcgcaggcgtcaaccccgccaacggcgacgcgctgtggtacaccaaggagggcgagctgaccaccgagctccgcgacgaggacaaggtcatggtcggcaagagctacgtggcgccctggcagggcggcttcggcacgacgctggcctggaagggactttcgctgtcggcacagttcagctgggtcgccgaccgctggatgatcaacaacgaccgttatttcgacgagtcgaacggccgattcgcctcctacaaccagtccaagcgcctgctcaaccgctggaagaaacccggcgacatcaccgacatcccgcgccacggcgtctacaccgagttcgacgaccgcctgctggaggacgcttcgttcctgcgcctgaagaacctcatgctgagttattccttcccgcaggagtggctgcgtaagacacgcttcatcagcggcgtgaagatctacgcccaggcccagaacctcttcaccttcaccaaattcacgggcctcgatcccgaagggtcgagcaatatgtaccaggcacagtacccgatggcacgccaattcaccttcggactcgacttaacattctaatcagggactatgaacatgttacgcaatataaaattctatctttcggccctcgcgatacttgtcggcgccacctcgtgcctggacaagtaccccggttcgtccatcccggagaaggaggccatgcgcaccttcgccgacgccgagcagacgctcaccggcatctacgcctcgctcaagagcaacgcgctttacagcggctacctcaccctgctgcccgacatccaggccgacctggtctatgccgtcgaaggcaacaccaacacctacggctcgttctggcgctgggacatacgcccgaccgacctgcagctcgaagcggtttatgccgccctctacaaggtgatcggcaactgcaacttctacctcgaccgcatcgacgaggtggtggcgaacgagatcagcgacaccaacatcgagaagctcgaacagtacacgggcgaggtctacgccgtgcgtgcgctctgctataccgagctgctcaagaccttctgcaaggcctatgagccggacacggcccaatcggaactgggcgtcgtgctgcgcacgaaatactttacgcccgaggcggcacgccgcgcatcgctctacgactcgtaccagttcgtactcgacgacctggccgaggccgagaaacgcctcgacaaggagaacgacgcctacggcaacgtctacatgacctcggcctcggccgaggcgctgcacgcccgcgtggcgctctacatgcaggactgggacacggcgatcgaatattcgagcaccctgatcgacgaaaaaaaggccaccttccagctctccgatgccaagaccaactacacctccgactacacctatttcgactacatgtgggcgtacgacctgggatacgaggtcatctggcgcatcggcttcaccgacacctcctacggcggggcgctcggcacggtgttcctcaacttcaacaaggactacacctatttctatcccgactatgtccccggccaggccgccctggatctctacgacgatgccgacctgcgctattcgggctacttctaccagaccgagaccggttatgcccacgggctgagctggccgctgctggtcaaatactacggcaaccgcaacctgatcgccaaccagatctaccatgtctcgatgcccaagccgttccgcctggcggagcagtacctgatccgcgccgaggcctactgccaaaagaacgatttttcgaaggccggcaacgacctctcgacgctgcgcaagatgcgctacaaatcgggcggtacgatcaacgtcacgaaggacaactggttgcagaccatctccgacgagcgcctgcgcgaactctacatggagggtttccgcctgcacgacctcaaacgctggcacaagggcttcgagcgtaagccgcaggccaattcccaggccgaaggcagctcgctcaagatcgaagccgacaacccgcttttcgtatggccgatcccgcagcacgagctggaagcccccggttcggagatactcccgaacgaaagcaacagatagcaacaacgaatagaagagagacaatgaaacgaattatcacggttttgtttgcaacgggactcctggcggccctcgcaacgggttgcaaggaggaatataagacctactccgacgcggagtacgtgctgttcgccgataccttggccacctacgccgtactccaagaccaagactatttctcggtaccggtctcctcgaccgtcgcgtgcgattacgaccgcacattcggcgtggagatcatcgaccagggcagcaatgccgtcgaggggaagcactaccgcctcctgtcgaacaccatcaccataaaggccggttcgcgcaaggccgacgtacaggtgcgcgggttgtacgacaacatcgaagataccgactcgctgggcttcatcctcaaactggtcatgcccgagcagctgaaatgggatctctaccacgaccggacgaaggtcgtcatgcagaaaagctgcccctacgacatcaacgaattcacgggctggtgcgtggtgacctcgacgttcctcaacagctaccccggcgtggaaaacaagagcatccagcgcctcatccgcaccgagaagcaccccaccgaagagaacatgattatcctgcacgactggctcttctcgggctacgacgtcacgatccgcctcgacccgcgcgatccgatcgaaccgctggtaaccatggacaagaaccaggtactggccgacgaggcttcggtcttcggacagatcgtcggggacaacaagatactggttactaacagcccgctctacgactcctatttcaacagctgccagcactacgtggcgctgtggatcaaggtgcatgtcgaggacatgggcgtgaacatgggcctggtaggccatttctacaacatcatcgaatgggtcagcgacgaggaggccgaacggctccagcgggaagaaggcatgctcccgggaggcgtcacggcgtccggatcgctctaaatcataacgtaaataaagaaacgaaatatgaaaagacattatttacacttggtgatgtcgctgctcgccggagcatgtctggcggccgcttcgtgttccgattcggatgaggatacgaagctccccagccccaacttccccgaggcggtttcggcgaccatcgaagccggcggcacctacacgctcgagatagagcccaaccagaactgggaggtgagtgtcccgacggccaccgccgcatggttctggatacaggacgaaacacaaaaagtctggacgctgcgcggcggtgcgggtgcatcgcggatcgtaatcggcgtggccgaactcgatgagttcgacgacacgcgcgtctgcgaggtaaccctcaagatgggcggccagagcaaggtcatcgccacgatcacacgcggaacgctcgaacgcggcttcagcctgcgcacatgcaagatcgacgagtacggcgacttcgaatacggcgacagcgaaaccggcctcacctactcctataacgaaggggaagcccaaagcatcggcctgacctggcccgaggggcgcaccgatttctcgatgccgatcctggtcgaagccaattacgagtgggcgatcaaccggatgccggaatgggtatccaccccgtcggtgacggtcgggcagcccggcacgaaagtcgagatccgcatccagggcaacccgtcggcctatccgctcgacggggcgcaggacaaactggtgttcatcgacaggagcaacctcgacgcgaaggtcgagattccgatcacgattccctcctgccgcgacattttcgacgtcacgctcgacaaggaactcaaattcaacgccgcagccgaaatctacaacagcatgaacggcgactggtcgcccggcgccgcacgcggttcggtcaagagcatcaggggcgcgaggatctacgtcatcgccgaagtcacggatcgttggggcaataccagcctgagcggcgacgaagccgacaccaaatgggtcacggtcacggagaatgcctgggacgacgacctggtgatcatggacaggggcttcaccatcggcacgcaggtcaaccagggcgatgcccgcacggcacggatcatcatactcccggcatcgctggccgtagaagaccccaacgaactcttcgactacgacatcaaggaagagtaccagccctatgtcttcgccacgctgacacagcaggccagccccggcccgatccaggcagccaaccccgagggcatggcggagatcggcaccttgttcgagaaactcccctcgacccactggtcgctccgcgagctcgaggtcgacgacgcctacaaactgacctataccaaagcctggtcgaacgaccccgaagccacgctgacattcgaacgcgacttcaccggctataaatgctacgatgccgactgccagccgctgtcggacgagcagaactggctctcggtacgccgcgtcgaaggcggggccatcatcgatatggatcgcgaggacgaaggctacatcgtcttctacgacgccgagggcaacatcgcggccgtcaactgcctctacgatcccaatgcggacatcggcggcacggacatcgggttcgcatatcccgaatacgtcaccggcgcgaccctcgaagagatcacctcgggcgaatactacgaacagtatgcggagtacggcgccccgatctaccaactgacctacgagggagaaaccacgaacgccgtgatgaacgtcccgacctactcgagtttcatggcccagggcgatgcggaaagctggcttacggccgaatcctacggcccgacccagatctacgtcaatatggactctcagaccgccgccgagggcgtcatgttcctctacggtgccaactggaacgtggtgatggtgatcatctgcacgctcaacatctgaccccaatgattcagggcccctctccgaagggggctggggccctgttcgatacgactacaatttatggagaacatacagaccaggtttttagatatgaaactttttaaattttccgtaacggcactcctcgcactggccatggccttcctcggcggatgttccgacgacgacggcatcgacaaccgcgaccaagattacggatacgttcagttcaagctacacaaggaggcgtcctacgacgccctgagccgggcccagaaaccccagctcgactacctttccgaagcaagcaaggtgcaggtctcgctctattacgacggcacgaccatcacccagtcgctgacgctttcggcccccgacaagcagagcgccgaattcggactgcgcagcgagaagctccggctgctgacgggacaataccaaatcatcaccttctcgttattcaatgccgacgacgagctgatctacaacggcatgccgggcgaagagaggctcgacatcgtggccggcggcctcgtgtcgcacgacctgacggtcgacgtggagccgcgcggcacggtgcgtttttcgatctccaaggacttgtcggacttcaccgagacacccgtggtgacgcgtgccgccgaacggcagtacaccttcgacgagatcgcgttcctcgacctgaccgtaaggcacaagacgaccaacgagctcaccacgttcgaaaaactccccgcgaagttctcgatccacttcagggacgatcgcgaggacggggctcccgaggacatcgaggacggctaccagacctcctcgctcgaatgcgacacgctgctctcgctcaaggcgggcgattaataccaggcctacgacaagaacaaagtcctgctggagaccaacaagcgtcccaagaacctggatttcaccatcgaggacaacaagaccaccgaggccaaagtcggcgtcacgctctacgaggccgacgagtatatccgcgactactacgcgctttacgaaatctggaaagcgctcgacggggagcactggtcttacaggggtgaaaactatcccaccggcgtcaactgggatttcaacaaggatcccgacctgtggggcgtccagccgggcgtggaggtgcactccaacggccgcgtggcgaagatctcgatcggcgagttcggcttccgcgggcacgtgccggcagccatcggccagctctcggagctcgtcgagttgtatctgggcacgcacaacgacggcaacctgctcgaatacgacccctcgctggcacacgacaagagcctctccgagcgcaaccgcacccgcatggagcgtcacaaggagttcctctcgctgatccatatcccgacccagacgtccgagccgatcgcccgggccctggccgaacacggcatctcgatcccggccacgtcgctctacaagaatttcaccgaggatcagatcatcgaccgcaagaccggcctccagaacaatatccgtccctacgacgtcgtacacggcaagctcaccaacgggctcaagtcgatcgacccggccatcggcaaactcgaaaagctcgagtacctcaacatcgccaacggcgagctggaggagattcccgccgaagtggccaacctcaagtcgctgaccgacctggaggtctacaactgcccgaagatgacccgcttcccggtggagattgcgcagatgcccgagctcgtttcggtcaacatctccaacaacgcccaatggtcggccgaagagctatacaaggggctcgacgccatcgccaacggcccatcgaaggagaagctccagatcctctatgcgaccaacaacaaactcagggagatccccgagtcgttcagcaacctgaagaagatcggcctgctcgacctgtcccggaaccagatcgaaacgctccatccgctgggcaaggaggtcgcacccgtacagctctacctcgaccacaacaacatcacttcgctcccggccaacagcgacggcatcttctgcggcacggacgacacggagaccttctcggtgacctacaacaagctcaagaaggttcccaacatcttctcggccaagtccaaatacgccatgaaatcggtggatttctcctacaacgagatcgacggcttcgaaggcgaagaggagggcaaatacaagggcctgcgggtggagaccttctcgctggcggccaaccccgggctgacgaagttccccaaatgcctcggcacgaccaattcgctggtttcctacatcatcctgcgcggttgcagcatcgacgaaatccccgaaggcagcttcagcggcaagaactcgacggcgctcatatcgctcgacctgacctacaacaaactgaaggccctgtccaaggatttcacggccgagcagctgccctacctttacgggctggatatatcgtacaactcgttcgacaagttcccgttcgggccgctcaactgcgccgggctgaccgtctacgccatccgcggccagcgcgatgccgagggtaagcgctgcctgcgcgaatggcccacggggctctaccagcacacgggcctgcgcgggttctacatcggttcgaacgacctgcgcaagatcgaggacacgatctcctacctgatctaccacctcgacatcagcgacaaccccaacatcacgttcgatgcctcggccatctgctactactggcagcagggggtctacaacctgatctacgacaagacccagaacatcctgaactgcgacaaaatgctcgaataacacctaaggagaaacgacaatgaaaataaagaattacataccggtcatcctctgctcgatcgcattatgcagttgctccgacgccgacaagaacatcgcgttcgggctcgacagcgacgccatcaaagccgaagccgcagggggaagccacaagatcaaagtatcggcatcgggggactgggtcgccaccaccgatgagccgtggatttccatttcgccggccaacggccgcggcaccaccgagtgcaggatactcatcgactcggcgctgaccgactcgccccgccgcggcgtggtacgcatccaggagcagaacacctgggacaagaaggagatcaccatcgaccagcagggtttcgactacgccatcacgctcggggagaaagaggtttccgtggccaacttctcggccttcggcacccgttatttcgacgtgaaggtcaagaccaacgtcgactttgccgtcgaagtccccacctcggccgaaagctggctcaaatacgacagctataaggtcgaactcgaccgcggcatccgcccgcgcgaggtgaccgtacgcttcaactggagcatcaactcccagcccaacgagcgtatcgccgacgtggtgttcaagccaaagcgcgaggtggaactcgcccgccaggacaacctgctcgtcacgcagggcgccgccgaacccatcgaggagaacacccgcagcggcgactcgatcgccctgctggccatcgcacgcacgctcggaaccaacagttcgtgggagaacggcgaacgcatggacaactgggacgacgtcaccctttgggaggagggcatggcgggttacacgcccgagaagaacggccgcgtgaaatacgcccggttcttcatgttcgacaccaaggaagagctgcctttcgaagtgcagtacctgacggccgccgacgagctgaacttctacagcaacgtcaacgccttcctgaaagacctcaccaccggcgagtacatcaccaaactcacgcagctcaaacgcctcaccatcgccgcctacgggctggtttcgctggacaagaacttcacggcgctcaagaacctcgagttcctcgacctgagcagcaacaacttccagaaaattcccgacgagatcaacccgaccaacttcccgaaactgcggacgttgctcatgggcgccaacacgcgcaggaacatctacgacctgagcaacaccgtcgaaaccaactacggcggcctcgtcgatgaagaaggattcccgcgccgcatgatcgaatgggatctcgacacgctgcagctctcggtcaactacctgcaggggccgctgcccaagatggacgactgggagaaatacaccgagcaggacatcatcgacgccgacacgctgccccgcgcgctgatcggcaccccgaaggtgatgccgcacaccaagcgcttcgccatcaacctcaaccgcctgaccggcgaactgcccgactggctgctttaccaccccgccctcgactggtggtcacccttccagctcgtgttcacgcaggaaggcaaggatgcgacgggcgcatcggccggattcggcaacgaacccgccaacctgaactattactacgaattctacgaggggtacaagaaagaccccggcgcagaagaggaagacgaggatacgaccaaataatcaagacgatgaaaaactatttatacggcatttttgccattgcattcctggcatttaccgcctgcaccaacgaggagctcccgacgcccggcaccggacaggacacccctgtcgagcacaagtcgggggagatactcgtcaaattttcgccttacgtgagcgagatactcgacaaggcggccgcagcgacccgcagcggcggccccgccacccgctcgggcatcctttcggtcgacgaggttctcgacatcgtgggcggctaccagatcgaacgcgtcttccccgtagacggccgcaacgaagagcgcacccgcgaatcggagctgcacctgtggtacgtcgtacgcttcggcgacgactactccgccgaggaggtcgccgaaaaactctcggccctgggcgaagtccagcacgtgaatctcaaccgcacgatccgtcgtgcctacaacgccggcaagaaggcgatgcccctcacccgcgaagccctcgccgccatgcagcgtgcgacccgtgccgccggggatacgggctatcccttcaacgacgagctgctgccgatgcagtggcacctgatcaaccgcggcaacctgttcggcgagaagtcgatcgtcgatgccgacgtgcagtgtgaagaggcgtggaaatcctcgacgggcgaccagtcgatcatcgtcgccgtgctcgacgaaggcgtcatggtcgaacatcccgacctgaagaacaacatgtgggtcaacgaaggcgaggtttaccgctcgaagcaggacaacgacggcaacggctacaaaggcgacgtctacggctacaacttcgtcttcgacacgggcgttatctcgtgggacgacgtcagcgatacgggtcacggcacgcacgtggcgggcgtgatcgccgcacagaataacaacggcatcggcatcagctcgatcgccggcgggaacgccgacatcccgggcgtgaagatcatgagctgccagatattctcgggcaacgcggtcagcaactcgctggcgaccgtccgggccatcaagtacgcggccgacaacggcgccgtcatcctgcagtgcagctggggctatatctcgggcagcgccaacagctacgagtggggggcgccgggcttcaaggacgaagaggagtgggcgacgaacgccccgctggagaaggacgccctcgactacttcctgcataacgccggatcgcccaacggcccgatcgaaggcggcctggccatcttcgcaggcggcaacgagagcgccccgcaggccgggttcccgggcgctgccgaggagtgcatctcggtatcggccacggctgccgactatacgcccgccgtctacaccaactacggccccggcacgacgatcgcagccccgggcggcgaccaggactactattacgagtacttcgacgacaaccacaaacgcggcgagatcggctgcatcctttcgacgctgccctatgccatcagcgaaacgggctacggttacatggaaggcacctcgatggcctgcccccatgtttcgggcgtcgccgcgctcgggctctcatatgccgcacagctccgccgccacttcacggccgacgagttcaaggcactgctctgcgaaaccaccacgccgatcgactcctacatgaccggcctgaaaaactactaccgctacgtcgccgaagtcggcctgaaccagcccatgcaactgacgctggccaactaccgcaaccagatgggcgtgggacaggtcaatgcggccaggctgctcaacgcggtctccggcaacggcaagcaggtttcgttcccgaacctctacatctcgctgggcaaagaggtgaaggccatcccggccaactacttcctcggcggcgaaacgctgacctacacggtcagcatcgccgacacggcggtcgccacggcgtcgatggagggtgcgaaactgacggtcaaggggctgaaggccggtacgaccagggcaagcatcacttcgagcaagggcgagacgcacaatttcaacatcacggtgcgtaaatccgcaaacggtaacggctggctttaacgaacgatgcgctgcggaacgacgatagcacgtatgctcttctgctgcggggcgttgtgggcggtaaccgccgccacaccgctctgctcgcagatccgcatcgtcccccgtgccaaactcgacagcctggcgcaccccgccacggccgccggtgccgaagcgatgcgcttcgaacgcacgcagatcgacgcagggcatatcggcgaggacgacacgccgccgagctacacgttcaaatggcataacgcagggacggcaccgctcgtcatcacccgcgtgcagaccacctgcggctgcgccgcggccacctacggccggcagcccgtccgcgcgggcagcgaaggcacggtgacggtcacctaccacccgaagggacacccggggagcttcgacaggcggatcttcgtctatacgcagctctcggacaagatgccgacggccatcctgcacctcacgggcacggtcatagcctcggaacgcacggacggcgactacccctatgcaatgggtgcgctgcggctcaaacagcagtccgtgcgcctcgccccggaaaggttgcagaacgagcgcatcgaatgcctgaacacgggcggcaaagccatgcggccacgctgcgacgagcacctgctccccccggggatcaccttccggtgcgagcccgcaaccctcgccccgggcgccaaaggcgacctggtcatcgggttcgaccccgcgcaggcaacgcgcaggccacctgtgcagctgcccctgatcctcgaagggcccgatgttccgccgagcgggcgcacgctgcaaatccggttcgaagaaacagagtaagaaacagacaaaaacgagtcatatgaaaacaatttttagatttacgctccttgcacttatcgcgacggccttctgcgcctgcgatgacgacaagtcgtatgtagcccccctggatgtcacgcccaacaacctcgccggcacgtggcagctcgtccaatggaacggcgcgcccctcgccgagggcagctacgtatacatcgagttcatccgcaaagaccagaagtacgtcatgtaccagaacctcgacagcttcggcgcccgcaagctcacgggacgtttcgccatcgaaaccgacgaggaactgggcgccatcatctacggaaactacgattacagcgtaggcgactggcaacaccgctacatcgtgaccgacttttcaaagacacaaatgatatggacagccaaggacgaccgttcggacatttcggtctacgaacgctgcgacggcatccccgaggaaatcaccggagggaaaacggagtaataaaaagttcacgccgcaaggcagtaaaagggacaccccggagcgggtgtcccttttaccattatgtcgcggagcgcccttcccggcacaaccggattggtaatgcgcggaatttgtagtaattttgcgcaaaacaacacggacgatgacacgaccactgcaattcatacctttcaagtcccgctcggacaaaggctgggccgaggcctgggagctttacgaaaagtcgttcccctacaacgaacgctggaacgccgaaggctacgaccgggcattcggcgacccgaatttcgaagccgacggcatctggcgcggcgatgagttcatcggcatcctcttccactggggtgccgacgggtaccgttatgtcgagcacctggccgtctcacccgccctgcggggacaaaacatgggctccgcggcactctcggccttctgccggaaggtcgggcgcgtcatcctcgagatcgacccgcccgtagacgacatttcgatccgccgcctgcacttctacgaacggctggggttcgtcgccaacccctaccggtacatccacccgtcgttccgcaagcctttcacgccccaccggctggtgctgatgagctatcccggcgccatcacctacgaagaagcccgcagtttcgcggacttcgttcgggaggcagtcctccgctattcggagcacgaagcccccactctgccgaatttagcgtaaaaagcggatcgcttccagcaagacaacggttccgaccggcataggccgttcagcggcgggatttctttcccggcatccccggcaatgcagacgatgcaggcggataggcgccatatcggcataaaatggagccgggcgcaaaaacgggatccctccggaagccgcccggccgaaaaccccgttacaggatcccgaccaggtatttggtgacgaaataaccgcccacgaccagccagacatacagcagtcccgccagcacgaagggcttcgccccggcatgtttgaacttgtcgatgctcgtttccgtacccagcgccgtcatggccatcgtcagcatgaacgtatcgacatattcgatggcgccgttcaacggaatgtcgcggacactctccgccccggtcaggtattgcagcagcgaattgaggccgatgaccgcgatgaagccgaaggcgaaccacggaatggtaattttgctcttctccttgtgccctccggcggttttccggcggcccgccagcacgaaccccaggataaccagcacgggcgcaagcatcatcacgcggatcatcttggtaatggtggccgtcccagcgattcccagcgtatcggtcggatccattgcgttgcccgcccccgccacatgggccacctcgtgcagcgtgctgcccgtatagacggccacgcccgtgtccgtgagcccgtcgagcatccccgtgcggtacatcagggggtagaggaacatcgagagggtgccgaaaatcacgaccgtggagacggcaatggcggttttgtacccctcgcatttcacgaccggctcggcacccagcacggccgccgcgccgcagatggcactgcccgtcgaggtcatcagcgccgtgtcgcggtcgatcttcagcaggcgtcccagcaggatgccgcccaggatcgtgaccgtcacgacgaccaggtcgaccgcgacggccgggatgcccacagccgccacctcggagagcgtcaggcggaacccgtagaggatgatgccccagcgcagcacctgcttggtacagaacctgataccgggcacccacgtttcgggcagtttgttgcgcaggctgttggcatagagcatgcccagcacgatgccaacgatcagcgggctgaacgaaagtttctttacgagggggaacccggcgatgtagaatgccgcgaacgagaacaggacgatcagcagaatcccgtgcagggtattcgccctgttaccttttttcaacatatccttcgtgtttttaagaagccgttataacttttcctttgtttcgccggcaaagatcgcatcttttggcgggatatggaacaagaaccggttatcctacataacataaagttataacgaaagccgcagccgtacagcgatgcgcagaaacgggaacgggaacgagaacggaatgcgggatacgggatgcccgccgggtcagcggtcggcccgggcgaaatcgacgaactgccggacaagccgggcaggttcggcctcgggatgcacgaacacgaagtcgcgcgtgagcgacaaggagtcgacatcgacgatacgcagcgtaccgctgcgcagctcgtccacgaccgaaatcaccgacaggatggccatggcgtcgctgttgcgcacgaatgccttgatcccctcggtcgaaccgaggcgcatcaccacgttcagttccgggatgcggatcccggccttgccgagtgccgtcttgatgacttcgagcgtccccgacccaccctcgcgcagcacgaggggaatctgccgtaaacggtcgggcgtcacggcatccgtgcgcgcataggggccgcccgtacgtgcgaccaacaccagttcgtcgggcgcgaagagcgtatagtgcaacccctgccggcggctgaggctctcgaccatccccaggtcgatgctgcgcccgcacagtgcctgttcgacctggtcgctgttacccgacatcatcgagacccgcacgccggggaagcgcgtggtgaagcgggcgaggatcggcggcaggaggtattgggcgatggtcgtgctggcaccgaggcgcagttcgccctcgaccgcactcgcgcagaggctcatctcatactccatgcggcggtagtcgccggccagccgttcggcgcaggtcagcagggtctcgcccgccgcggtgagttccaggcggctgccgcggcggacgaagagctgcaccttgtaacgggattcgagctcaccgacatgcttgctgacggcgggctgggaaatgaacatctgctcggcagtccgggtgaaactgagcgtccgggccgcggtgatgaaaactttaagtcggaaatcgtccataactttcgtaggttatcggcgcaaggccaccagccatagtgtcctcaacccagatgcccgtcttgggcgaactcctttaccgacttgatatagtggtcgatagtctcctgcatcgaaacgaacgatttacctcccgcggcattcttgtggccgccgccgttgaagtacttgcgggcgaagaggttgacgtcgacatctccgcgcgaacgtaaactcacgcggatgaacttgcggtgggccaggaacatggccgacatcttcatcttcttgatcgtcagcgcgtagttcacgaaaccctcgctgtcaccctgctgaaactggaaacggcgcatttcgttctccatcagcgacatgtaggccaccgtcccgtcctggatgatctccatcttgcggttgatgacataaccgaacaatcgtgcgcggccttcggtataggcgttatagacgttgttgtgtatctcgggaatgctaatgcccttctcgaccagcaccgccacggcgcggaacagctccggcgtgaggaacgagtaggcgaagttgcccgtgtcggtcatgatgcccacgtagagcgcctcggccatctgccgcgtaatggcatcggtgccgaacagcgcttcgatgatgctgtatacgaggaagcaggtgctcgacgaatcgggatacgagaacgagaggtcgaaatgcccgtcgggcgaaaggtggtggtcgatcagcacacggcgcgccgtggtgttggcctcgatcgtatcgctcaggatttcgagccgcgacacggcgttgaagtcgaggcagaagagcaggtcggcctcggcgatggcgcgcacggcatcgcccgcggtgtcgttcttgaagaccacgacctggccgatacccggcatccagtcgaggaaatagggatatttgttcgggacgatgcacgtcaccgtatgtcccataccccgcagcacctcggcccaggcgagcgaagaacccacggcatcgccgtcgggattggtatgggcgacaatcacgatcttacggtttgccggggcgagaagttccctgagggattcgatacgctctttcgatagctccatttcagccttgcttcacattggtgatactgggcaaaggtagcaaaaaagagggagataacaaaccgcgcccgccgatgcatactgaatttgcacgtttgcatacaccccgcagccgggaatttcgttaattttgtcccggctaaccaaaaccgtacgtatgaaaaaactcatgtccctgctgctggcaggcctgctcctggcaacggccgccgcgacggccgcggcaccctatgccaacaaccgcgccccgctgcgcgaaaagcccttcgtgaaacttccgctgggcgccatccgcgccgaagggtggctccgcgaccagttgcagcgccaggccgacgggctgacggggcacctcgattcggtctaccccgaggtgatgggcccgcgcaacggctggctgggcggcgacggcgacgtctgggaacgcggcccctattggatcgacgggctgctgccgctggcctatatcctcggcgacgaacggctgatcgaaaagacccgcccctgggtcgagtgggcgctcggcagccggcagcccgacggctatttcggcccggcggaagaccgcccgttcgaaagcccggccatacagcgcgacaacgcccgggactggtggcccaagatggtcatgctcaaggtgctgcaacaatactactcggcgacgggcgacgagcgcgtcatcgaactgatgagcgcctatttccgttaccagctgcgcgagcttccgaagaccccgctggggcactggactttctggggcgaacagcgcggcggcgacaacctgggcatcgtctactggctctacaacatcacgggcgacgaattcctgctggagctgggcgacctgatccaccggcagacgctcgactggacgggcatcctcgccggcggggaggtgatcccgacgcccttctcgctgcactgcgtgaacctcgcgcaggggatcaaggagccggtggtctactaccagcgcagcaacgacccggcgcatgtggcggccgtgaagaaaggcttcgcggacatacgccgctacatcggcctgccgacggggttgtacgggggcgacgaggcgctgcacggcgccgccccgacgcagggttcggagctttgcacggccgtggagatgatgtactcgctggaggagatggccgagatcacgggcgacgtgcagttcgccgaccacctggagcgcgtggcgttcaacgccctgcccacgcaggccacggacgcctatgacgcccgccagtactaccagcaggtcaaccaggtgatgattaccgaccaccgccgcaatttcgagcagagccacgacggcacggacatcctctacggtctgctgacaggctatgcctgctgcacgtcgaacatgcaccagggatggcccaagttcacgcaaaacctgtggtatgccacccacgacggcgggctggccgcgatggtctactcgccctgcaacgtcacggccgaagtggccggcggcgtacgggtgacgatcgccgagcggacgcaataccccttcgacgagcagatacgcttcgagataaggatcgacggccgcaaggtgaaaacggccgaattcccgctccgcctgcgcatccccggctggtgcgaaggggcgaccgtggcggtgaacggccaggccgtggcgtcgcccgggaaaggttccgtggcggaagtgcggcgcacgtggcgcacgggcgacgtggtgacgctccgcctgccgatggaggtcgccgtcagccgctggtacgagcgctcggccgtcgtcgagcgcgggccgctggtctactcgctgcgcatcggcgaacaatggtcgaaagtccgcaacccgggcaaacagatatacggcccgtggtattacgaagtgcggccgacgaccccgtggaactacacgctcttcgaggaggacgtccgccccgaacgcattgcggaggcattcagggtcgagcggcgcgatatcggcgacgcctatccgtggacgctggagaacgccccggtggagatcagggcgcgcgggcgcaggctcgacgaatgggtgctctaccaggagagcgccggcccccagccgtacagcaccaacgagaccgccaatcccgccgaagagatcacgctgatcccctacggctgcacgacgctgcgcatcaccgagttccccctgacgcgcgacctgcgcaagaactggtagtgcgcccgaaaggcagggcggggaaaagatagcgcctggaaacgggtgtccgggaaagcggatgccgcagggagggatccggtgccggagaaaacaccgtaacgggaacccgcaacccgggagaagggaggttgacggaagaaggggaaccgcccggaaagcatggcgccgggagggacagcacaacgtttccggggggggggaagtccggcaacgagaaacggcgcacgaggggatatgaccgtcgtgcgccgtccttttttcggggaggggcagcccgttttccgggggccggagcccctttccgggacggcgattggcacggttcgggaattttgcgtagatttgcaaatctaaatcacacgttatggcttcttgtctccaggtggaaaacctcaccaaatcgtacggcgagcaggtgctcttcgaaaatatctcgttcacgatcgaggagggccggcgcgtggccctcgtggcgaagaacggcacggggaaaaccacgctgctgaacatcatcgcggggaaggaaagccacgacgcgggaagcgtcgtgccgcgccgcgacctaaggatcgcctacctggaacaaagccccgcatacccggcaggaatgaccgtactggaagcctgcttccactcggagagccccgccctgaaggccatcgcggagtatgagcgggcgatcggcgatgcgtcgggcgaagggttgcaggaggcaatggcgcggatggatgccctcgaagcgtgggattacgagcagcgcgccaagcggatcctttcacggctcaggatccgcgacttcgggcaaaaagtggagaccctctcgggcgggcagctcaagcgcgtggcgctggccaacgtgctgatcagcgaatccgacctgctgatcctcgacgagccgaccaaccacctcgacaccgacatgaccgagtggctcgaagagtacctcgcggcgagcagcgccgcactgctgatggtgacccacgaccggtatttcctcgacagcgtgtgcagcgacatcctcgaaatggaaaaccgccggatctaccactatgccggcaactactcctattacctggaaaagaaacaggagcgcgaaacggccgacgcggcacagcgggcgagcgagatgaacctctaccgccgcgaactggagtggatgcgccgccagccgcaggcgcgggcgaccaaggcgcggtcgcgcatcgacgcgttccgcgatctcgaatcgcggctcaaaacgacgcgccgcagcggcgaggtgcggctcgacgtcggggcgtcgcggatcggcaccaagatattcgaggcccgcgacgtgagcaaacgcttcggcgacgtggtgatcctcgacaggttcaactacaacttcacccgctacgaaaagctggggatcgtgggcgacaacggctgcggcaagtcgacgctgctcaagctgctgacgggcatcgaacgacccgacagcggcgtgatcgacataggcgaaaccgttcgcttcggctattacagccagcaggggctcgaattcgacgactcgatgagggtgatcgacgtggtgacggcgatcgccgagcaggtcgaactgggcgacgggcggcggatgagcgcctcgcagctgctgcagcatttcctcttcacgccggaaacgcaatacaattacgtggcacgcctgagcggcggcgagcggcggaggttatacctctgcacggtgctgatgcagagccccaatttcctggtgctggacgagccgacgaacgacctggacatcgtaacgctgggtattctggaagagtacctgcaagcgttcagaggctgcgtgatcgtggtgtctcacgaccgttatttcgtggacaaggtcgccgaccacctgctggttttctgcggcgggggcgaaatcagggattttgcggggacatactcggaatacgtggcctggaagcgcgaatacgaagcggcacgccgcaccgaagccgcacaggcccgacccaaaccgcaggcggcgaaaacacaggcggcggaggctgtgccgcgcaagctctcgttcaacgaaaagagggagctggaagcgctcgaaacggaaatcccggcgctcgaggccgagaaagcggcactcgaggcgtcgctctcgtcggggacgctcccggtggaggagctcacggcgcagtcacggcgcatagcggagctgatcgcgtcgatcgacgaaaagacgatgcgctggctggagctgagcgagcggtgagggcaggcatcctgtccggcggaacggtttgcggcagggccggtgggcgtccaagatccgaaaaaacccgcgcttgcggaagcgcgggcatgaatccgtacaaatccgattacctttttatattcagcagcgtgaggttttccaacacggtctgctgcgccacacgctggatgtattcggcctgttcggccgggaaacccagcgtgcaggcggtctggtagggcttgccgtagatcgtggtgaaaatcacgttcgcggccaggtagctgcccagcggcccggggtggaaacaatcctgcgcatagagcacgtaatcggggcgttcggcacgcacccggcgccatgccatgcccacgggggcacaccatgcgtcgttgtcgtaggccatttcgaggtagctggtaatcagccgttcctgcatggtgccgtagctgttggcgggcgggtactccggaatcgggaagcggttgccgttcttatgcccccacgtcatgtagaagatcacacgggcatcgggcgacgcgacgtgcaccaggctgtcgagcgtacgcgccgcagggtagacttcccgtgcgacctgccgggtcggcatggccggtgcggaactctgctcctggaggatgacgtagtcccagccgcccgcggcgatggcgtcgagcagtttctggtttttcaggtggccggaaaggcgctcgccacccttgaggaagcgcgtacaggagagtttcaccttctgcgtggcggcgatctgccggacggtggacggcatgtcgttgtaataggtatagctgttgccgacccacagcacccgcagcgaatcggtgtcacgcgcctgcgtgaaaaagggcacgaacagcaacaacaggaatttcaggacgatcttggtcataggtctgaggtttggattgggttgatctgtttttttgtgttcaggatgtccccgtcggccggatcatgccctgcgcgggaggcgggtcgtaccgggcggggccgtcgaccggagaacgaaccgtcccggcaaagcctccccgggcaaatgccccaaaacgtcgggggggggcacctaccctttcgtccggtggtcggcggcgtatttgcggcaccaggcggcgatcccgcattcgccgcacttggggctgcgcgccatgcagacgtaacgtccgtggaggatcagccagtggtgagccaccggcagcaggtgcgaagggatgttcttttcgagcgtcagctcggtctgcaacggagttttcgaattggtagtcagcccgatacggttcgagacacggaagacatgcgtgtccaccggcatcacctccttctgccacagcacggcacccagcacgttggccgtcttgcgccccacgcccggcaggcgctgcatctgctgcaggtcgctcggcacctcgcccccgaactcttcgcacagcatacgtgccatgcccgcgaggttgcgggccttgttgttcgggtaggagatgctccggatataggggtaaatctcctcggccgtggccttcgccatttcgaacggcgtggggaagcgctcgaacagggcgggcgtagtcatgttgacccgcttgtcggtacactgcgccgaaaggatcacggccacgagcaactggtagggatccgtatagtgcaattcgctctcggccacgggcatgtgctccgagaaccaggcgataacgccgtcgtaacgctctttggtagtcatagtcgttgttttttacgtcggaacaaaatcttcttcacgaggagcccgcagccttcggggcagaacagcaggcgcggacaggcagccacgtcgcggcgccaccgggcgaggtattcgccgacggaaccgttccaggagagtacccacaacgcgaccgaactgcgccgccgcaggatgcggaaccggttgcggcgtgcaccgtaacgggcatcgaaccacaggcttatgtccatcagggagtcgcagaaggcgatccggcggggatattccgtgctatggctcacgctctgcggcaggcggcggtgcaccgccgtgatggccgggaggtagcgcacacggctgcaggcagcgaaccagagccacatcggggcgtcgtcggtaagccattcggggtgctcgtcgggacgtacctcggcatagtagcgggcgatgaggtcgcggcgcgccagcgtggcgcagttggcgatggtgagccggcaaagcaggcggtcgaagtcggtaaagtgctcctcgtggtcgggttcggtgaggccggtgttctggtaatagttgctggcgcgcgtatagcacatcccgcacgaggggtcggattccagcaggtcggcctgcatctgcaacttgcgggggtcgctccaccagtcgtcgccgtcgcagtaagccacgtatttcccgcggcaggcctcgaacgtgcggcggtagttggcacgccagcccacgttacgttcgcccgtgacgaagcgcacgcggccggggtatttcgccgcgtattcgcggcagatagcggccgtggagtccgcactgcaatcgtcgcccagcaccagttcgacgtcaaatgaggtctcctgcgccaagatgctttcgacagcctggcggaggtaagcttcgtggttgtaggtggtcatgcagaccgatacgagcggggtttccatagccggatcagagtttggtcagtttggcgaatttggccagcagggtcttttcgcccgcgccatcgaaggccacgaccagcttgtggtcggtggcgagggtctcgatgcgctgcacgatacccacgccgaacttggggtgctcgacgcgctgccccacggtataatcgccgctgacgggcatcgcctcgcccaggggcacgccgccgtcggccgcctgccgcacaccgatgcggcgcatgccgtcgatcgaggggcgcggaacctggacgagcgccgggtcgggacgcccctgcgggcgggcgtcgcggggtgccgcagcccgggcgaaacgccttgcggggccggattcgccgtcggaggggcggccgccgaaattgccgcggccggggttgctgcccggccggccgccgccattgttcccgcccgcagcctgctgtttctgctggaaacggtagtcgaagcggcggcgcagttcgtcgatggccgaaggcgctgccccgtcgggcgagcggtgcggacgggcgtcgtcggtgtcggaaccgaagtcggccctgacatatttcgggtcgatctcgcgcaagaagcaactcgggcgcgagaactccatgttgccccacttgaaacgcatctcggcgtaggagatcgtcgcctcgaccttggcccgggtgagcgccacgtagaacaggcgccgctcctcctccatgccgtcgggcgactcggcggcccgctgcgaggggaagaggttttcctccagcccgacgatatacacgtatttgtattccagccccttggccgagtggacggtcatcagcgtcaccttgttgcggtcttcggggtcgtccttgtccatgtcggtcaccagcatgacgttctgcaaccactcctcgatggtcgcctcttcgtcctgcggacgctccccgttgcggatttcggcgtcgcaccgctccttgaactcctgcatcgagttcagcaactcctcgatattgtccaatgccgaggtcgcctcgggggtattctcggcacggtaggccgcgaggatgcccgagcgagtggcgatctcgagcccgaagtcgtaaagccccttctcgttgcgggcgagcgacagcgagcggatcatcgccacgaagtccgccaccttgcgggcgatggtcttctgcacggggtcggcggccggttcggcgaccagcgcgtcgaccgcctcccacatcgagacgccccgctcggcggccagctgcgcgatgcgctgcacggtcgtgtcgccgatgccgcgcgtcgggtagttgacgatgcgtttgaacgcctcgtcgtcgcgcgggttgatgaccagccggatataggccagcatgtccttgacctccttgtggtcgtagaacgaactgcccttgtagatgcggtagggaatgccgcggcggcggaggttatcctccagcacggccgactggttgttggtgcggtagaggatcaccgcttccgaccagtcgtcgcccgtcgagcggactttgtcgcgcaggtcggagaccactatttcggcctcctcgcggtcggtataggccttgaggatgcggatcggctcacccacgtcgccggccgagaaacagtgcttctccatgcgcttggagttgcggacgatgaccgaattggccgcatcgacgatcgtgcgggtcgagcggtagttctgctcaagcttgaagaccttggccgcaggaaaatccttctggaaggagaggatgttctcgatcttggcaccgcggaacgagtagatcgactgtgcgtcgtcgcccacgacgcagacccgggagtggagctgcgacaggcggcggatgatgacgtactgggcgtagttggtgtcctggtactcgtccaccaggatgtatttgaacagctcctggtaacgcgccagcacgtccggggcgtcgcgcagcaggatgttggtctgcaagagcaggtcgtcgaagtccatcgcgccgttgcgcttgcagcgctggcagtagatattgtagacattgccgaactcggggatctgcgcctgccggtcttcggcggcatagaccgagttggcgaggtaggcgccgggcgtcaccaggcagttcttggcgtaggagatacgcgacgcgatgaggttgggcttgtatttctcgtccgcgaggttcagttcgcggacgatggtcttgatgaggttcttgcagtccgagggctcgtagatcgtaaacgactcgggaaaaccgatcttttcggcgttctcgcgcaggatgcgcgaaaagaccgagtggaacgtacccatgcggatatagcggctgcggttatcagggatcatctgcgcgatgcgctcgcgcatctgctgggcggccttgttggtgaaggtgagcgccaggatgttgaagggcgccacgccctgctcgatcatataggcgatgcgcgcggtcagcacgcgcgtcttgcccgaaccggcgccggcaataatgagcgacgggctgtcgtagttgaccacggcagcgagctgtgcggggttcaggccttgcagtatcggagattctttgggttccatggctgcaaagttaatactttttcgcaagccctctccgaaaaggcgcgcctttctccgaaaaggccgcagggacggcgcccaaggatggcgcacggggcaaaccgaaggatggcgcagatgaaggcggggcaagaggcacgtgtaaagcggacgggagcggacggaatgcctgcagggaggcacacgaaaaacggaggggcaggccgggtggaaggacagaagccgcacggtaaaaccgggagaggagggaaaggtgccgaaaccacgtcagagccccgccccggtcgtttcgggggacgggattatgggcaatccgggcggaaatgaaaaaaatcccggaaaaaataatatctttgcattactttcgttaagaggttaaatccgacgacaatacggcaacgtttgcgccgggcggatgcggaggctgcgggcaaaagatgccgggcgcagggtatgaagcatgaaattcaacatataataaaacaatgagcgaagtcatcaacatcaaagaactcaacgagcggatcgaacgcgaatcggtattcgtcgatacgctccgcacggaaatgggcaaggtcatcgtggggcagagccatctggtcgacacgctgctgatcgggctgctgtcgaacggacacatcctgctggaaggcgtgcccggactggccaagacactggccatcaccacgctggcaaaagccgtggatgccggattctcgcgtatacagttcacccccgacctgctgccggccgacctgatcggtacgctgatctactcgcagaagaacgaggagttcgtggtcaagaaaggccccgtgttcgccaacttcgtgctggcggacgagatcaaccgctccccggccaaggtgcagtcggcactgctcgaagccatgcaggagcggcaggtgaccatcggcgaccagacctacccgctgccgcagccgttcctggtgctggccacgcagaaccccctggagcaggagggtacctacccgctgcccgaggcgcaggtcgaccgattcatgctcaaggccaagatctcctaccccaagaagcaggaggagcgcgacatcgtgcgcatgaacctctcgggcgctggcatgcctcaggtcaacaaggtcatctcgcccgaggacatcatcaaggcccgcaaggtcgtggaggacgtctacatggacgagaagatcgagaaatacatcatcgacatcatcttcgccacgcgcgagccggcggaatacaacctgcagaaactgcagaatctgatcgcatacggaggttcgccccgtgcgtcgatctcgctggcgaaggccgcacgcgcctacgccttcatccgccgccgcggctatgtcatccccgaggacgtgcgcgccgtctgccacgacgtgctgcgccaccgcataggcctgacgtacgaggccgaggccgaaaacatcacctcggaagagatcatcaccgacatcctcaacaacgtaatcgtaccctaacgatgcagcagaccgagaacgatattctgaaacgcgtccggaagatcgagatcaagacccggggtctttcgaacgagatcttcgccggaaagtaccatacggctttccgcggacggggcatgtcgttttccgaagtcagggagtaccgtgcgggcgacgacgtgcgcgatatagactggaacgtgacggcgcgctcgcgcaaaccccacatcaagatctacgaggaggaacgcgagctgacgatgatgctcctggtcgacgtctcggcatcacgcatgttcggcacgaccgaacgcctgaagaagaacatcatcaccgagatcgccgccgtgctggctttttccgccgcacagaacaacgacaaagtgggctgcatcttcttctcggacaaggtagagaagttcatccccccgaagaaggggcgcagccacatcctgatgatcatccgcgagctggtgggattccggcccgaatcggcggggacgaagctctcggagccggtgcggttcctgaccaacgtcaacaagaaacgctgcacgaccttcatcctctcggatttcatggactcctcgaaggacagggcggcgctggacgacgcgctgaagatcgccggcggcaagcacgacctggtgggcatacgcgtctacgacccgcgcgaaacggagttgccggacgtgggaatcgtcgagatgaaagacgccgaaagcggacgtaaggtctgggtcgacacctcgtcgcgcgccgtgagggagcattacgccgaaaaatggcggcagcgcagcgcacagatcgaatcgacgctcaagcacaaccgcatcgacacggcgatggtctcgaccgagggcgactatgtgtcggaactgataaaactgttcaaacagcgatgaaacgactttttgcaatagcgctgctcctcgcgggcgcagcggcgcgggcccagtccgacgtgccgcaggtcacggcgcacatccagcccgacagcgtcatgatcggcgaccgtttcgacctggtggtcgacgtcgagaaagacctggtgcaggtggtgcagttccccgaattcgaggacaagccggggagccccatcgaactccacaaggagtatccgatcgacacgctcgaacgcgacggccgccacctcaaactccgcaagcgctacacgctggcggcgttcgaggagggcaagtggaatctcggccgcccggcggtgctctatgccgacaagaacatcgtcgacacgctctgggcacgcgactcgctctacctgcaggtggcgaccttccagatcgactcgacatcgcagtcgatctacgacgtgaaaccccagtggaacctgccgttccggttcggggaggtcagcggctacgccaaatggggcgcgctcgcactcgtattgctgctggcggcggcctatgcgctgaagcgctacctggagagccgcggcaaacgcctcggcgacctgttcaggccgtcaccgccccagccgccgcacgtcgtggcgatcaaggcgctggaggcgctgcaccaccagaagctgtggcagaacaacaagcacaagcaatattattcggcactgacggacatcctgcgcacctacgtcgcggcacggtggggcttcggcgccatggagatgacctcggacgagatcatcgagacgatgcgcgcggaggaactgcccgacaaggcccggatggatctgacggcgatcctgcgcgacgccgacctggtgaagttcgccaaggcgacgcccgatgcggagcagaacgaggccgactacctgaaagcctactatttcgtcgaggagaccaaggtcgccgagacggaggaggagaccgaagggcaggagccggtgaaaaactaaaatgcgtgacagatgtataaactcatatacacagcggtgttcctcctggccgcactcggggcttcggcgcagaacatgcccgaacgcagcgaggtgcggcgcggcaaccggcaatacaacaagggcaactacgagaagagcatcgaacgttacgagcgggcgctggaggccgcaccggagtcgttcgaggcgacttacaacctcggcaacgccctctacaaggccgagcggttcgacaaggccgagcagacgatgcgcagggccgcggccgactcgctgcgtacggacgaggagcgtgccgaagcgttctacaacctgggcaacgcccagttcaagcagcagaaatacaaggaggcgctcgaaagctacaaacagtcgctgcggctgaaccctgccgaccagcaggccaagtacaactacgcctacaccaagcgcctgatagacgacaacgaggacggcggcggtggcggcgacgacgacaagaaccaggacaaagaccagaaccaggatcagcagcaacagggcaacggacaggacaaacaggacggcgaccagcagcaggacgacaagggccaaaagggcgatgaccaggagcagcagggcgaccggcagcaggatccttcgcagccggacaaggagggcgaaggcgaccaggaggggcagcagcagcccgttccggcgggtatctccccgcaggagcaggaacagatgctcgacgccatccaggcccaggaagaccgcacgcaggacaagctgaaggagaaacagggcgtcgtcgtccggggaacgaaaaactggtaaaacacaaggactatgcatttcgcatcaccatactatctgtggctgctgacggcactcgtaccgatggccggctactacgtctggcggacgttgcagggcggggcggcgatacagatctcgtcggtcgacggtgtcgtgcgcgccccgaagaccatacgttattacctgcggcacctgccgttcgtgctgcgtgcggcggcattcgcgctgctggtcgtggcgctggcgcgcccgcaggacgtggagcggctttcgcacacgaacaccgagggcatcgacatcatgctggcgatcgacgtctcgggctcgatgctggcacgcgacttccggcccgaccgcatcacggcggccaaggaggtggccggatcgttcatcgccgaccgctacggcgaccggatcggactggtggcattcgcgggcgaggccttcacgcaaagccccctgaccaccgaccaggggacgttgcagaccctgctgtcgcgcatccgcagcggcctgatcgaagacggcacggcgatcggcaacggcctggcaacggcgatcaaccgcctgcgcgagagcgaggccaagtcgaaggtaatcatcctgctgaccgacggcgtgaacaaccgcggcgagatcgccccgctgacggcggccgagatcgccaaggcacagggcatccgcgtctacacgatcggcgtcggcaccgagggcatggcgccctaccccgccgtggacatctacggcacgcccacgggcggcacggtgatggccaaggtcgagatcgacgaaaagaccctgcggtcgatcgccgagatgacgggcggggagtatttccgcgccacggacaaagccaagctgaaagccatttacgaccagatcaaccaaatggaaaagagcaaggtggaggttacggaacacgtcacctaccacgaacagtacctcctgtgggcgctggcggggctgctgctgctgttcgcggagttcctgttcgcaaacctggtgctcaaacggataccctgacgggcaccacgccccggacgccggcaaagccctccctttgccggaaggaagattgcggagggaatgtcgctgtccgacaggcaccccaggtgccctaatgcaaacccggcgggtcggacagggacagcaaacgggaaacaatacgccgggcaggcattcgttatgttcagattcgcaaatccgcaatatctctggctgctgctggcaataccggcactggtactgatcttctgggcagcggcggcacgccgccgcaaaaggctcgcacgcttcgggaaccccggggtgctggaggagctgatgcccgaggtttcgaccgggcgcaccgcactcaagttcatcctcttctgcacggccgccgtcctgctcatactggccgtggcacgcccgcagttcgggtcgaagctccgcgaggagaaggcgcagggcgtggagatgatgctcgtggtcgacgtctcgaactcgatgctggccgaggatttcgaacccaaccggctcgaacgcaccaaatatgccatcaacaaacttttcgacgggctcaggcaagaccgcgtggggctgatcgtcttcgccggggaaccgaaggtacagctgcccatcacgtcggactaccgcatggcgaaggccttcgccaagcgcatcgacccgtcgctggtgtcggtacagggcacggccatcggcaaggcgctgtcacaggcgctgctgtcgttctcgggcgaaacggaagagacgcacagccgggtcatcatcctggtgaccgacggcgagaaccacgaggacgacgccctggcggtagccaaacgcgccgcggagatgggcatacgcatctacaccatcggaatcggcacgcccgaaggcgccccgatccagatcggcggggagttcatcaaggacgagaagggcgacatggtcgtctcgaagctcgacgagaagatgctctccgaggtggccgggatcacgggcggcgcctacgtgcgttcgaccaagcagtcgatcggcctcgacgagatcgtaaagagcatcaacgaaatggaacagaccgagttgtcgatgatgcgtttcgaagagttcaacgagcagtaccaatacctgctcatcgcagcgctcgtgctgctgctggcggagctcctgctgctcgaccgccgcaacccgctgctggcgcacctcaacattttccgcgagaagtaaccggaggggttgcgtgcgcgcagcgacggccggattgcagagataaaaggaggacaaggacgcaaaggaacaaggatgagcgcaagaataagccggaacaaagacggaaggatacgcggacgagcgcaaagataaaccgggacaagaacgcaagggtacacggacgggcgcaaggataaacgaacaaggaaaacacaatcgggaaacataaccgggaaacgggcggcgggatcaatagcaaagaaccgacccggcatggaaaagggctgtcaggcatatcgttgacagcccttttttatttgcactgctgccatccggggcatttcaggacacgcggttcccgggaggccggaaagacttggcgccccccctttcccattgtagcggcaggcacatcgcgggaaagcatcccggaaatccgccccggcggggttactccacgataatctcgtcggtgaaaatccagccgccgggatggccgttgtgcagggctttcagccgcacgtaacgcgccgccgtttggcccgaccagccgaactcgcggtagcaatcctgcttgtattcgaacgggatgtcgttttcgaccgaggcaaggggcgtatagtgcctgtcgtcgtccgaaaccgagatttcgaccgcacggggcatccagatgtctgcatagaaaccctgcatgaaacaggccgcgatacgtttcacaggctggcgttccccgaggtcgacgaccagttcgacatccgtatcgagccacccctgccagcggcggtcgccgtagttccacccgcctcgcaacccgtcggtcagcgaagcgtcgcccgcagccgggtatttcgggctgtaaggcgtacggtaagccacctgcctgccggtcgagaggcaatgcagggtatcgagcgattcggggcgggggccgacggcatttttctggtcgaaggggtggtatccgcgctgctgcatccacgccacggcgtcgagcacgcgggcgtggaagtcgtcgaagtccttacgttcgggggcgctccaccccacttcggcgatcgccagcaggcgcggccagatcatgtgttcggcatgttcggctgtgggcacgtgctcgcaccacaggttgccctgcacgccgaggatcatcggcacgacatccgcacccagcgaatcgggcgcagggtcgtaggagtaggcctgcgcgagggtgaggaacgccgcggccgcgaccggctcgcgggtggggtcgtcctggcagaaatcgaggtagcagtagttcgagggagccatcacggcgcggtgtccggctctggccgcggcgatcccgccctcggtgccgcgccacgacatgaccgtggcgccgggcgcgagcccgccctggagaatctcgtcccagcccagcaggcggcggcccttggcggcgaggaacgtcccgatgcggtgcaccaggtagctttgcagctcgtcgacatccttcagtccctcccgacgcatccgggcggcacattcggggcaggtgcgccaaccccgtttcgaagcctcgtcgccgccgatatggatatattccgaagggaagagcccgatcacctcggagagcacgttctcgaggaattcgaacgtctgctcgttgccgatgcagaaatcggagtccgtgtagggtttgccgctgcacgagagttcggggtaaacggccagcacctcctcgctgtgccccggcatctcgatctcgggaatcacctcgatatgcagggcacgggcgtattcgaccacttcgcggatgtcgtcctgcgtgtaatagcccccggcggccgccgggtcgtcacggtggcagtagcgtttgccgccgaagttccacccctcccagtcgggatagggacgccaggcggcgatgtcggtcagggcggggtattttttgatttcgatgcgccatccgggtccgtcggtcaggtgccaatggaaacggttgagcttgtagcgcgccatgaggtcgagctgacgttcgacgaactccttgtcgcggaaatggcgcgagacgtcgagcatgaagccccggtaaccgaagcgcggggcgtccacgatcgtgacggccggaatgcggcggccgtggtgcccggccagttgtgcgagcgactggagtccgtagaacagccctgcggcatcgggggccgtgagcgtgatctttgtgcgggagacgtcgagacggtagctttcgggggcgccgtcgcccgtacggagcagttcgagcgcgggcatgtcgccgtcggaggcctcggcaaaggaggcggggaagaatccgtcggcggcacgctgcatccacgccgcgaggtcggccttgtcctgcccgtcgaggtcggtcgtgtagagcagcttggcaggcatacggaaggcaccttcgccccacgtcacctgctgcggagccggaatgatacccgtggccgggcacccgccgccgtcgcacgaagcaaaggcgaaagcggcaaggcaaaaagagataagcgtgatttttttcataaggtctttaggttgggtacaacaacaaatcgggatgaaccggcaaagccggaggagggcggagcgagccgtggccgcagccggaagggcgccgccggagaacagccagccaaaggcaaaccgcagccgaaaaccgtcggaggacggggacagccggaagccgaaaccgccgacaggccacgacaggccgccatccggggcgggtttgcaggccgaagcagggacagcccgaagcaggagtatgaaaaaagggccgtgcaacccggcttatgccggggtcgcacggcccttgtcggtctataagcggactaattccacttggtgtccatcatcgtcggattcgaactgtcgccgatggcatcgtaaccatggcccgtaaggtcgcgcacgatattgccgtaaccgctctcgttgggttcccatgcgttcatgcgccagtaggcaagcagcccgtcggacgtgggatcgacatagttcatgttgttggcgatctcggcctgcgaaagagcccgtgtccatacgcggcactcggcgacgtaaccgttcagcgtacggccgcggccataggaggctcccaaatggaaccctttcgcgttgtcgctcgtaaggtcgatggtctcgccctgcgtctccacgcccgtggcatactgcccgtcgatgtagatatcccacgacgaacctgtccagacggcagcgacatgataccatttctcaaggctgaacggcttgtcggaagccgccggctgataggagtcgtggcagatctggatgcagtcgggatcgaccttcacgtcgccgaaacgcacgccgcaaatgccctcgatacccatgatggagctgatgtaaggatcgcgggactggaagccgagcatgtatacgcgggcttcgagcgtgagctgcggaagggctgccaggtcggaattctcctggaacgaaggcacatcgtagatgttgcccgaacccaggtaaatcgccttgctgatcacgggcgttttcagcacgatgaagagcgtgcggctcggttcgagcacgcttattccgccggatacggtcttgatgcccacggggacgcaataggtcacgccctcggcgaactccgagacggacgacaccgtgaagtcaatcgccgaagaggtgttgtagccggccaggatggtcgtttcggtcgaactcagggcatagctgtcctcgggcggaatctggtagtttttgccgtacttgtcgttataggcagccagcagttcgggccgcacttccaactggatccgcacgtcgtgctccataaccaccgaggaggatacggtgatcgaggtctcggcagggggttcatcgatggtcatggatttgtcgggattgttctgcgcatcggtcatgtagatcgcaggataggtctccgcggactcctgacagcccgtcgccgcagcggcggcgaacaacagcggagcgaccaaatatttcagtttcatagttctcttgttttaggtttagtttgcaggggcgaaaatctctgcctcgttcatgctggtatacccggttacccggccgacgtatacccgagatagcgggctttgacggtcttcttgaactggaatatcttccagttgtcggccgagagtttgggcacgaacgaaatttcattggtgaggctataccagttggtgccgtcctcgctgtactggaaatcggtacattcggggttggagtcctcgtagtagatatgccagcggaagccgttgatgtcgtaggccttgtccagcgtgatgatgaagttgccgccattcccccacgaataggacgcattcgcggcataccagcagttggagtcgagcttgccgtcgaacatgcaggccttctgcgcatcggaatcgaggttccagacgccgttggcgccgctcgaagcggtgccctggtagcagacgatcgtccacccggaggcaggttcgatcttcacgcccgtaagcgccgtcgcatcgacgtcgatctccatcgccgacaccgtcaacagcaggtagcgtaccaatggctccttcgaggtataaatatcttccgcgggaagttccacgacgatggggatcaggtagtaacccttctcgatcccggcagaacttacggtaacggacacctcgtcggacaagaacgcaccggctgccacgccgagcgtgccgagtgaaacacgcgcggggtcgatcggctcgtaggaggtgccgtgcttttcgttgtaggcatcgaccagcgaattgtcgatagccagcgggaacgaaacgtcggccggggcaggacgagccagctcgacccggattttttcgtccacctcgcccgtgatggtaccgtcgtccccgaccaggaacaggtatttggacaagccggtcgaggtcagaccgacgatcaggtcgccgccggcggggttcacatcctggatcgcctcgcgcatatacttgtaaggcatcgacgaattggcgtactcatactccatgtggtaggcaccgaaaccggcaccgaaaccctgcgtggggttgaagcgcgccatgcccagcagcgagttgaccctctggccgtcgcggcattcatgcgacacgccgccggttttccagagggactcgaagttctcggcgaagatatactgctcgggcttccagcctttcttatcggcttcgtcgaagcgatcctgcaaatcggtatagccgtaagaattataagcctgcacgatgccgtagtcgaagcagtcggccacatcggcatgcacggcatagggcacgccgtcgatcataagcaggcgtcccgtccccgacttggggccgacgtatttgctcatggccaggatcagcttcctgaacagctcgttgtcatgtcccacgaacggccccgaagcgccgtagccgggttcgtagtcgacgtcgatgccgtcgtagctgtacttgtccatcgagtccttgcagtaggctttggcgtaggcctcgatggcctcgtcggtatattcgccgccgccgatctcggtgaggaacggctcgggcatcttgtccgagaagatcgtgaaggtcaccttcgtgcccttgatcttctgcacgaactccttgtcggcgatctgctcgggggtcagcgaatgccactggctccagatggagatgatatccatcgagtcgggagcgctctgcaggcgggtctggtaggatgcgcccacggccgtccacgaaccgtaccagccgaaagcgatcttgtgcttggtctttttgtattcgcgcagggcctggtagtaggcattatcgcgcaggatgggcgactgctggtcgggatgctgcgtaatttcacgctcgggatccgtccaatccgaacaagcgacgaaaaaggcacccacgatcgcaagggccgcgacgtatttcaagaaatttttcatcttccgtgttgtttttaggttcattatttcttatcccaccagagtttcgtaccgccggtatcggctccgccgagcagtgcggtggcagccgccacgccggcggcattgttcgagtactccgaacgcgggaaggtcatacggcgcacctggacgttggtatcgaccttgccgccgctgaggttgttgacgatcgggatcaccttggggtagcccgtgcggcggaattccgaccaggcttcctgcccgttggggaacatggcgatccacttctgcgtgatgatccgttcgagtttctcctcgtccccggcgccggcattccacttcggggtgacggacgaaggtttcgaggcgttgtatttcgtcgaggcggccgaagcgtcttcgaacgcctggggctcggccgtgctctgggcataggcggcagcggcagcggccgtgagtccgtgttcgaggaacgacagctcgatacccgccttgtagaacgattcgtcgtcaccgcccatctcccagccgagcatggcaccctcggcccgcaggaaagcggcctcggaagcgaggaaccacaccacgggcgtatccttggcgacgttgggcaccgaaagtccggtgtagtcggccttgagcatcgtgctgaggccgctgcggacgccgtggtacttgctgtcctcgcaggttttgaaataggccggcaggcgcggatccgcataaccgttcatgtaagcgtcgatggtcgcacccatgcgggtgtcgttataggcgttccacgtctcttcgagcgggttgtacacctgaaccgaaccggaactcttgagccacgccccgtcgtccgaagcggtcatcaccccgtccctgacggcctcctcggcataggtgcgggcaagagcgggttcgacgaaacggatgcgcatggccatgcggagcttgaccgagttggccagcttgagccatttcgcatagtcgccctggtaaacggcgtcgaccttctgcaacggcctggcgtcggcggcattggccgcatactccttgagcaccacgatggcggcattcagatccgtgagaaggttcttgtagacggtctcctgcgattcgtaggggttttcggtctggccgaaattcgaaacggggatcgggccgtagatgtcggtggtacgctggagggccatcaccttgatgacctcggcaacggcaaagacgtcgtcggtaacctgcccgttctggtaggcgtacttgaggttgagccatgcaggcatcacattggtgaaagccaccgagaagggatagttgttgtaatccgtaccgtcgaggtcgtaggtacaggtatagctgccgccgttgaaggcctggatcggggagagatagccgccgaaggcgtcgcccatcaggttgcaggcacgctggaactcgttggcccccacgtcgctgcacgggatcacggcatccatttgcatggtggtgatgtaggtcttcttgtcgaccgactgcaccgcatcgggattggtgttgaaggattcgaagtcaccggtacaggcggcaagcgccgcggcggcgaaaaatcctattgtatgattgaatcgtttcattggtctgaagttttagaattggagtcttacgctgaagccgatagtccgggagctgggctgcatgaaatagtcgagcccctggtaataggtacccgtggaagcggtgatctcgggatcgaacggcgccttgttgtagatcatccacaggttgcggcccacgagcgacacggtcatgccgaccttgtcgttgaaccacctggaaggaaggtcgtagcccagcgtaagttcacgcaggcggacgttggtcatgctgtaaacgtagtgtgaaagcatcgaaagcccgttgccgttgttggcatagaagaccctggcatcggggattttctgatcctcggagatccagacaccgccgttttcacgggcgtcggccgaatcctgcgaggcaccccagcgatccatcagggcctgcgtcgccgaaacgccctggccgccgatgcgggcatcgaacagcacgccgaggttcacgcccttgtaggagaagcggttgttccaccccaggcggaagcgggcttcggtattgccgccgtaaagccacgtattgggatcggtggtgacggtattggtattggggtcgacatagatgcgtccctggtcgtcggtcttgagccccgtcacgtagaagtcgccgatcgaaccgccttttttgaccttcatgcggtagccgccgtagtccatgttcacctcgtcgacagtcaccaggttaccggccacgtcgcgcgtgccttcgggaaccagctccttcacctcgttgcggttcatcgagaagttgacattggtcgaccacgagaagtcgcgccacttgttcttgtaacccacgaccgcttcgataccccagttgttgaccttgccggcattgatatatgcccgtttgtagccggtgctgggcggtgcatcatagctaaaaagctggttgtaggtgttggtattgtaataggtcacgtccgtccagatcttgttgccgaggaacttggcgttcaggcccacttcgaacgacttggtgcgctcgggcgtaaggttgacagccggggcataggagtccgacgaaacgataccgcccgtctgcaagggcgtattgacaccggtaataaaccgctgcggggcgttacccacctcggcataggaggcacgcaccttgaggaacgaaatgccggctttggaaaggtcggccatcgacgagatgacggccgaaaggcccaccgacgggtagaatatgttcatatggggcgtgaaggccagctgcgacgcccactcgttgcgcgccgtcacgtcgaggtagaccatgccgttatatcccagctgggcggtggcgtagacggcctgcgtctggtcgtggtagcggtcggcgtagggtttggtctgcgaatggctcatatccacgttgtagaccgagaacttgttggcgagggtggccaggtggccctcgaagccttcgccgtcgttcttgtcgtcgaggatgctcgcacccaggttgaacgacagggagaacttgtcgtcgaagaaactcttgttgatcgacagcagggcgtcggcgtagaggttgttgtgatggatcttgttgttctggtagttaccgtattcggaagcgaacagcttgtcggacgaggcatagatcttgcgcgtatagttcatcaccatgttatcggtgcgcacgcgccccgtgagggtgatccagtcggcaatgtcccacttgagcgtggcgttgaacgtatagcggtgcgccgtattctcgaacagctcgcggttggtgatccaccaggggttctcgacgccggtgatgaactccaggggccagaactgcttcatatagcccgccgtggcgtcgtaacgctcgtaaacctcgtacttggagatgtcgtcgccgcgcgggaaaaggtaaatgggaatcagcgggttgtggtagaggccctgcacgagcgggttacgcttgtactggcgcatgtaggaagcgcccaggtcgagcgtcagcttgtccttgatgagctgcgtggtattgcggaaggtaaagttgtaccggttgtagacgttgttggggatgatgccgcgcgaattgagcgaagcggccgagaaataggactggttcacgcgcgtaccacccgaaaccgagatcgcattggtctcctcgaagccagtctggaagaaatccgaggggtcgtacgaggtcggggtcgagagcttcgtaccccagctcatggacggtgccgtagcttcggtgccgtaggtgttctggaactgcggcatgacgaacggcgacgaaaaggtggtattgttggcgtagttcacgcgcacacgcccctcctcgccctttttggtcgtgatgacgatcacgccgttggcaccctgcgaaccgtagagcgcggccgccgtggcgcccgaaagcaccgtcatggattcgatgtcctcggggttgaggttcgagataccctcgaaatcgccgccgtcgggcgtttcgtaggtgccctcggtctgcgaggaacgcaggtcgggcatcgggataccgtcgatcacatagagggcgttgttgttgccgctgatggacttcacgccgcgcatcaccacgcgcgtggaaccgcccacgcccgaggcgctggcgttgatctgaaggccggcgaccttgcccgaaagcgagttcatgaagttggcgtccttgaccgtgttgacgatgtcgcccgcaacctcctgcacgttgtaggtcagcgctttctccgaccttttgatgccgagggcggtaaccaccacggcgtcgagcacttcgttgtcctcgtgcatgaccaccgacaacggggcggatcccgagacgggaagctcctgtttggtatagccgatgagcgaaatttcgagcgtgtcccccggtttggcctgcggaagcgagaaattgccgtcgatgtcggcggcggcaccggtcgtcgtacctttgataagcacggtggcgccgaccaggggcatgcccttatcgtcctttatgactccggtaacgccgccctgagcgctgtgggggggggggaatttttagctttcttcgagagcacgatgtgtttgtcccgaagggtataagcgatgtcggagcccgcgaagagcttgtccaacacggcctgcagcggttcgtcgtgcaccgagaggctcactttgcggtcggtgtcgatgtccgacgtattgtagacgaacgaacagcccgtctgctgctggatagcctggaaaaccgtgatgaccgtcgcgtccggggcatcgaggctcacacgcgagagggcttgctgcgtctgtgctgcggcagaggtggcgccgaagcatcccaggagcagcatcgggataacgaacagacaacggaaacatgtagcgacaacacgtcctcccctgcctgtcgcaaggttagtttttttcatggatcagattttaggttagtgtaatggttaggtgtcgaaacaggccgccgaaaagtgcggcatccgggaaaagagacgttaattttccataggcggatcgaagttttttaagttcgtattcggttatcgttcagggtttgcgtagagttcgatgtcgttgccgacgatcctgtaattgaatttataggtcagttgcaatacggacatgatgtggtagatgccgtcctcgacgcggaaattgcccgagaaacgcatgtcgcggagccgggtgtccatgaaacggatgtcgacgttgtagtagcgcttgagttcggcgacgatctccccgaaagtgtcgtgctcgaaacagaagcggccgtcgatccagttgatcgagcgttcggccgaggggcagtcggtcaggcgcatggcgtgcgtccgggtgtcgaagaccagttgctgcgcggggtgcaggcgtaccgaggcctgcccgtgtcccgaagcagaggccttgacggcaccttcgagcaggacggtggtgacacggtggtcattgtcgtcgttgcggatgttgaaacgtgtgccgaggacttcgacgtccaggccgttggtcgacacgacgaacggcgcccggcggtcgtgctcgacctcgaaataggcttcaccctccatcttcacgcggcgctggcgcgaaaagaagggggcgacgtactccacgctgctcgacgaattgagccacaccttcgttccgtcgggcagcactacctgcgaccgctcgcccagctgggtgacgacggtcacgggctgcgccaggcgcttggaaagcaacacggtcgtgagcccgccggccaggagcaccgcggcgaccacggccgcagcggcaatacgcaccgcgctccggcgcagggagatacggcgtccggcgtgcatgcggcgcttgaactgccggagcgaacgttcgacgtcaataccggccgcatcgttgatacggtcgctgacatacaatatataataaacctggccgagcatcctgcggtttgcggccgagcggtcgtaccacgcctctacggcctccgcctccgccgcgtccagctcgcccttcaggaaggcgaccaatacctcttcgtcgatttcgaaatttgccatgctgtttgcttgtctataaagtaatacaatccgtcagcaaaggatgctaacggaacggcgaaaaaaaattcagatttccttatcaggagaggtcaggccacagcaacagcacgagcagcggccagtaatcgctgagctcttcgcgcagcaggcgaaccgtctgcccgatacggtaattgaccgtctgcggggagacgttgaggcggacggctatttctttgtgggtcataccttccaggcggtgcatacggaaggtctgccggaattcaggaggcattttgcgcagagcttcggtcagccgctgcaccagttcgccctcgaggtagaaatcggggtcgtcgaacgtctcttcgtagcgttcggccagctggcggatgatgcggttcttgagcgtgtcgcgcaaggcgctgtttagcgacttgttctttacgatggtgaacagcagcgatttgagcggcatctcggggatcagcgaggtgcggttttcccacacccacatcagggtgtcctggacgagttcctcggcgcgtaccggcggcacgaagcgcgtggcgtaggtgcagagcggtttgtaatagcggcggaaaagcgcatcgaaacatttttcatcccccgcacggagcaatccgacaaccgtgcggttgtcgtgtatgtcgatcgtatgcgcgttatctgccatcggccggtatattcttcgggcccgccgccccgaagaacggcggagggacaaagcaaaaatacaactttatccaatatttgcaaaaaagattccgtacggggcatacggtgtgtccggacggagtatgccgaaagggaacgggggatacggcgcaggcagcgccgtatccggcgacagggaaaaggcggaagccgggacggcggcgtattgccgccgcctcggggagcaccctgccgcccggcgggaatgcgtcacggcacaggccgggagcccgggcacggcatggacgcgaataccatggcggcaagccgggatattcccggcttatgtccggaaatcgcaaccgcggagcgggaatccgccgaattttattacctttgcggggcaggcccgccctgtcgctgccggccgaggccgggagaggaaagtccgggcaacacagagcaccgcgcaagctaacgacttgatatccgtgagggtataggagcgtaacagagaacgaccgcccgcaggggatttccgtaatcccggcgggtaagggtgaaaaggcggggtaagagcccaccgcgggggcagcgatgccgcccggcagtacgtctcgcgggttgcaagaccgtgtataccggcaattaagggttgctcgcccgatgccggggggtaggttgcttgagacggcaggagactgccgccctagataaatgacaggggcccggggttcgccccgggaacagaacccggcttacagggcctgcacgtacggggatgccgccaaaaagcggcatcccctttttcgggccgctaccgcaacgggacggacggcgggagcgggagcagtacccggggaagcagagaagcccgggaaagaaaaacgcagaaggacgggcattccatgcggcaggcatcggcagcatggcattttttttgacgtatcgcccgccgatggcgaccctcggcgaacatatccggcaaagcaacgcttacaaatggtggatcctgggcatgatcatgctcgggacgttcatggccgtgctggacgtgacggtagtcaacgtcgggctgccggccatcatgtcggctttcggcatcggcatctcgacggccgaatgggtcatcaccgcctacatgatcaccatgaccgtcatgctcccctcggcgggttggttcgccgaccgcttcgggaacaaacgcatctatatcctggggctggcgctcttcacgctcgggtcgtggctctgcggcaaagccccgggcgacctgtttctgatcggggcacgcgccctgcaaggcgtcggcagcggcatcatccagtcactgggactggcgatcgtgacccgcgaattccgccccgagcagcgcggcctggcgctcggcctgtgggcaatggccgccgccgcgtcgatctcgttcggccccctgctgggcggctatctggtcgacgcatacagctggcacaggattttcgacgtgaacgtccccgtgggagtgctcgccatcctgctctcggcctttatccagaaagaatggaaaagcccggcgcggcacccgttcgactggcggggattcgtggccatcgcgctcttcatgccgctggcgatctttgcgctggcgcggggcaactcgccgaccaaccacgacggctgggcctcgcccacggtgatcggctgtttcgccgtggcggctgtggcgctcgcctacttcgtccgcacggagctgcgcagcccggcgccgctgctgcagctgcgcctgctcggggaacgcaacttcggggtttcgatggccgtgctgacgctcttctcgatcggtatgctgggcggcacctacctgctgccgctctacatgcagcgcgggctgggctacacggcgctgatggccgggagcgtattcttgccggtgggactcatacaaggagtgctgtcggccgtatcgggttacctcacgcgctatgtcaaacccctgctgctcgcggcggcgggcatcctgctgctggcgacgagcttttggctggccagccgtttcacgctccacacctcccaccggcatatcctcttcgtgctctacatccgcgggctgggcatggggctcacgttcgccccgctgaacttcttttcgctgcggaacctcacgcagcacgacatggccgcagcggcgggtatctcgaacagcatcaaacagctcgcaggcagcatcggcatcgccatcctgacagccgtttactcggcccggacggccttccatgcggcgcacgaaacggtatcggcttcccaaacctatgtcgagggggtgaccgacgcgctgggcgtagtgacatggctgaccctcgcggcggggttgccgctgctgtgggtattccgcaaaaaacggaagaaaacgccggcagggaatcagagggaggcaggggaaagttaaaccggggcgggaaaggccggaccggtgtgcgccgggccgccggatcggcaacggacggctacatcagccccatgcgcctgcgggcgaaaggcatgacccaggccggggactgttgccgcgcgagcaggtcgcgcatgtattccatatagggttcgacgtggcggaaatagcgtttcagcccctcgcagagtgaattcttggggctgccgtcggccccgcgggcgaaacggtgcttgggacattcgccccggcaggcgaaatagtagttgcaccgcagacattcggcgggcagcgtgttgcgtttatccagcccgaattcgcggcgtttctgcgagcggtagagctcggcaaggggcgtctcacggatattgcccagcctgtacccggggtagacgaaatggtcgcacgggtagacgtcgccgttgtgctcgacgaccagcgcgtcgccgcacgtctcacccatcgagcagacgcccggccgcacaccgcaccactgcgccagcgaggcgtcgaacaactgcacgaaacagcgccccacgtcgcttacgacccactcatcgaacacatcgcacaggaaatgcccgtagccttcgcccgagaccgaccagccggccagccgcgctccttcatgtccgggcgggacgatcagcggacggtggtgtcccggtttgccgacgacgtgttcgacggcgggcaggaactgcatgaagcggctgtgcacctcgtcgcggaagaagcggtagatctccccgccgcgcccctcgcagcaccggttcacgacgctcagcgtattgaattccacgccgctgcgcccgaacatcccgaccgtccgcatcacgcgctcgaaggtcggtttgccgcccctggtcaggcggaaggcgtcgtggatatccccgggcccgtcgagcgagaggccgaccaggaaattgttggcggcgaagaggtcgcaccacgcctcgtcgaccagcgtaccgttggtctgcaacgtgttctcgatccgtttgccgtcggcgtacctgcgctgcagctccatcgcccggcggtagaaatccagtcccagcagcaacggctcgccgccgtgccagcagaactgcacggtgtcgacctcattggcccggatgtactgttttatgcagagctccagcagctggtcgtccatcacggcctggcggccgccgtactgcaccgccttgtcgaggtagtagcagtagtggcagtcgaggttgcaggccgagcccgccggtttgagcatgatcgaaaaggccgcgggggcgacctgtttctccgcgtcgcggaacgtaaatatctgcttctgtttcatggagcgggctgatgtcccggacaaaaatagcaaaatccctccaatatacgccgcaaatgtccgaaagcgtgccgaaaccgtacgggctccggcaaaaaaccgggccgcagcgcacgtttttcgccggaatcgtttatctttacgtgctgaaaaaacttaaaaaaacgaaaacgatgaaaaaatcgcttatcctactcggcatgtcgctgctggctgcgtgcggcgtgcagaaaacggaactcccgctgctgcccgaagaggcattccagaccaccgtcgacggcaaaccagtcgcactctacacgctccatgcaggcgacatcaccatgcaggtcaccaattacggcgcccgcgtcgtatcgctctggacacccgaccgcgaaggccgctacgaggacatcgtactgggctacgaaaacatcggccgctacatagacaacacgggcgaacggttcctcggcgccgtggtaggcccctacgccaaccgcatcgcaaaggggcacttcacgctcgacggcgcggaatacaccctgccggtgaacaataacgggcagacgctgcacggcgggctcctgggcgtagaccgcgtggtatgggacgtggtatcggcctcggacgacaaactcgtgctgcattacctccatcccgacggacaggacgggttcccgggcaacctggatatcgagatgacctactcgctcacgcccgacaacgagttccgcatcgactacaaagccactaccgacaaaccgaccgtggtgaacatgtcgaaccacccgttcttcaacctcaagggcgaaggcaacggcacggtgctcgacaacgtgatgacgatcaacgccagccacaccaccccggtggactcggtgctgatccccacgggccagatcgccccggtaaagggtacgccgttcgacttccgtgagccgcacgccatcggcgagcgcatcggagcggagaacgaacagctgcgcaacggcggcggatacgaccacaactgggtcatcgaccgcaagaccccaagcggcatcgagcaggccgccacggtctgggaacccgcctcgggacgtaccatcgaggtgctgagcgaccagcccggactgcaggtttacagcggcaacttcttcgacggcaagagcatcggcaaatacggcaagccgcagcgctaccgcgagtcgctggcgctcgaaacacagaagttccccgacagccccaaccacgacaatttcccctcgacggtactgcgccccggggagacctatacgcaggtctgcatctacaagttcggcgtgaaataacacgcagaatatgccttggcggcggagggcacccgatggtgccctccgctgtttttccggggcacggatgccgcccgcagccttaggcgcccggacgcatcgcccgacgatataaacaaaaaaacaaacttataaatatttattgagatagtttttgtaattttggagccataaatcggctcaaaaaatgctacgttcgaacctaaataccataaacgaccggattttcaacaagaccgcaatacggatcgacgaccaggcgctgcgcgaagtggaggcgtgttaccgtttcctggagaaattcgaacagggaaaggtcatctacggcatcaacacggggttcggccccatggcgcagtaccggatcggcgacgccgacctgaacagcctccagtacaacatcatccgttcgcacagctgcggcgcgggcgaggcgctgcccgacatctgcgtacgggcggcgatgctggcgcggctgcaaacgttcctcaacgccaagtcgggcgtacaccccgacgtggtgcggatactggccgatttcctcaacaacgaaatttacccgctcgtgccgcgccacggcagcgtgggcgcaagcggcgacctggtgcagctggcgcatatcgcactggcgctgatcggcgaggcggaggtctcgttccggggcgaaaccgtcccggctaccgaagcgatggcggcatgcggcataacgcccctcaggctccgcatccgcgacgggctggcgctcacgaacggcacggccgtgatgacgggcatcggactggtgaacctggcccaggcgcgccgcctgttggaatgggccgtgaaagcgtcggtgatgctcaacgaaatcgtggagtcgtacgacgacttcatggccggggcgctcaacgaatacaaactccacgcggggcagatcgagatcgcccggcagatgcgcaccatatgcacctcgagccgccggctgcgcaagcgcgaagcggaactttacagcggcgacacgggcgtggcacccaccttcaggcacaaggtgcagccctactactcgctgcggtgcatcccccagattctggggccggtgctcgaaacgatctcccaggccgagaaaatcctcgtcgaggagttcaacgcggtggacgacaacccagtggtagaccccgcgacggggacgatctaccacggcgggaatttccacggcgactacgtgtcgctggagatggacaagctcaagatcgccgtgacgaagatgacgatgctcgccgaacggcagttgaactaccttttccacgaccggatcaacgagacgctgccgccgttcgtaaacctcggcaaattggggctcaactacgggttgcaggcagcgcagttcacggcgacctcgaccacggccgagtcgcaaacgctctccaacccgatgtacgtccactcgatccccaacaacaacgacaaccaggacatcgtgagcatgggaaccaacgcggcgatgctcacgcggcaggtcgtggagaacggctaccaggtcgccgccatcgaaatgctggcgctggtgcaggccgccgactacctgcaatgcgccggggagctctccgacgccacgcggcagttgtatgccgacatccggggcatcgtgccgcgctttgccgacgacacgcccaagcacagggagatcgccgccatcgaaaatttcctgaaaaacaattccgcttccctatgaaaaagctcctgaccaccctgaccgcgacattgtgctgtctttccggcgctttcgccgctcgctgggcgaggagttgcagcaagctataaccgcagaaaatggcaaaaacgaataaatacgcactcgtgaccggcggcagccggggcataggccgcgaaatctgcctcaaactgggcgggtgcggctaccacgtgctcgtcaactacaagtcgaacgccgccgaggccgaaaagaccctgtcgggcatccgcgccgcaggcggcgacggcgaggcactgcaattcgacgtggcctcgggcgaagagagcacggcggccatcgaggcatggcagaaagcgcacgaaggcgcctgcatcgaggtggtggtgaacaacgcgggcatccgcgacgacgtgctgatgatgtggatggaaccgcagcagtggcactcggtgatcggcaccagcctcgacgggttctacaacgtcacgcggccgctgctcaaggggatgctcgtgaaccggttcgggcgcatcgtcaacatcgtctcgctctcgggcatcaaggggctgcccgggcaggccaattacgccgcggccaagggcggcgtgatcgccgcgaccaaggcgctggcgcaggaggtggccaaaaagggggtgacggtgaatgccatcgccccgggattcgtgcgcacggacatgaccgccgacatcgacgaggcggagctccgcaaacagatacccgccggacgcttctgcgaaccggccgaagtcgccgacctggcgatgttcctcatctcggaacaagcctcctatatcacgggagaggtcatttcgatcaacgggggcttatatacctgagaccatggagaagagagtagtcatcaccggaatgggcatctgggcctgcatcggaaaaaatacggaagaagtcacgcaatcgctccgcgaaggacgctcgggcatcgggctcgacccggcgcgcagggagctgggatacatctcgtcgctgacggggatcgtggaacaaccgaacctgaaaggggtgctcgaccgccgcaagcggctgtgcctgccccagcagggcgaatatgcctacatggccaccgccgaggcgatgcgcaacgcggggatggacgaagcctacctggcggcgaacgaggtgggaatcatctacggcaacgacagcagtgcggcaccggtgatcgaggggatcgacatcatccgcgccaggcggaacacggcgatggtcggctcgggcaatattttccagtcgatgaactcgaccgtgacgatgaacctctcggtgatcttcaacctgcggggcatcaacctcacgctctcggcggcctgcgccagcgggtcgcacgccatcggcatgggttacctgatgatcaggcaggggttgcaggagcgcgtggtctgcggcggcgcacaggaggtgaacctctactcggtgggcagcttcgacgggctgggggcattctcggcccgcgaatcggatcccgcggcggcatcgcgccccttcgacaaagaccgcgacgggctggtgccgagcggaggcgcggcgacggtgatcctcgaaagccatgaatcggccgtcgcacggggcgccgaaatcctgggcgaagtggtcgggtacgggttctcgtcgaacggcgagcatatctccgtgccgaacgttgacggcccgcgccgttcgctgctgcggtgtctggaggacgccggaatgcggcccgaagagatcccctacgtcaatgcgcacgccacctcgacgccgctgggcgactacaacgaggcggaggcgatagccggggtattcgccgggtgcaacccctacgtggcgtcgaccaagtcgatgaccggccacgaaatgtggatggccggggcgagcgaagtggtctactcgatgctgatgatgcggcacgggttcatcgccccgaacatcaacttcaccgagggcgacgaggccacctcgaagctcaacatccccgtccgcagggtggacacggagttcgactgcttcctctcgaactcgttcggcttcggcggcaccaactcgaccctgatcgttaagaaatacaaataaaccctttcctaaaaatgacagaacaggaactcatagaaaagatcaataccgtactggccgatgaattcgaagtcgaccggacgaccattacgcccgaagccccgctgctggagacgctcgacctggacagcctcgacctggtggacgtcgtggtgatcgtcgacaagaacttcggcgtaacgctcacgggccccgatttcaaggagctgaagaccttccgggacttctacgacctgattatcagccggacgaatgggaaataacggcaaacagtggagcggacgctcgcgcggcggcggtttcgggtacaatttcttcatcctgctgatgaaggtggccggaatacgcagcgcgtatgccttcctctcgctggtagtcgtctatttcatccccttcgcaccccgcgccacgcgggccgtatggttctataaccgccgcatcctgggatacggcaggctgcactcggcggtgaagctctacgcccactactatgcgctcgggcagacgatcatcgaccgggtggccatcggcagcggcatggagcgaaaatacaaattcgaattcgaaaactacgacgctttcctgcgcgtgctcgacggcgggcgcggggcggtgatcatcggcgcacacgtcggatgctggggcacgggggccgggttcttcggggactacgcccgcaagatgcacctggtgatgtacgacgccgaataccggcagatcaaaagcgtcatggagaaacattgcgggcaggagggctacaaggtgatcgcggtgaacgagggcggcatcgagtcgatcctccgcatcaaggaggtgctcgaccgcaaggagtacgtctgcttccagggcgaccgcttcgtcgagggcagcccgacggtgacgctacctttcatggggcacgaagcgccgttcccggcggggccgttcgccgtcgccgggaaattccgcgccccggtggtcttctactatgccatgcgcgaacgcggcaggcgttaccgcttcatcttcgacatcccggacggggacgggtgcggcacgaaggaggccatactgggcagctacgtacgctcgctcgaggccgtggtgagacgctacccgcagcagtggttcaacttctatcggttctggtcgtgagcgcatgcagcatattactcgtatcggccaaccggcacacctcgccctaccccgtttatccgctcggactttcgtatctgaaaacctacctggagcgcacgataaacgggatacgcgtcgatattgcggactgcaacctgctttccgacgcacaactcgcggaacgcatccgcacgctggcgccccgttacatcgggctgtcgctgcgcaatgtcgacggggccaactcgctcgaccggcggggcttcctgccccagtacaaggcgctggcggacgtcatacgcacggcaagcgacgcccctctgatcatcggcggtgccgggttctcgatcttccccgaggccttcatgcgggagctggacgccgattacggcatccacggtgagggcgaagagccgctcgcggagctgatcgggacgctggagcgcggccggacggagatcgacatcccgtcggtctatacccgcgacggacgccgcggaagcggccgcaggagctacctgccttcgatcgaggtgcagttcgagcccgaattgacgggctattactggaagcggagcgggatgctcaacatacagaccaagcgggggtgcccctacgactgcatctattgttcgtacccctcgatcgacgggcggtgcgtgcggacgatggatcccgaggccatcgccgaaaatatcctgcgcgccaagcgcgactacgggatcagctacctgtttttcaccgactcggtgttcaacatcggcccggaatacaacgtccggctggccgagacgctgatccgccgccgcacggatatccgctggggcgcctacttctcgccgcggggcatcgacgcagaacagatgcggctgttccgggcttcggggcttacgcacatcgaattcggcaccgagtcattctgcgaccggacgctggaggcttacggcaagcgtttcacgttcggcgacgtcgagcgggcaagccggctcgcgctggacgagggcgtctactacgcccacttcctgatcctgggcggctacggcgacacgcgcgaaaacgtgcgcgaaacgatcgaaaactcgcggcggatggagtacaccgtcatgttcccctatgcgggcatgcgcatctacccgcatacgcggctggcggagctagccgcgaaagagggtgccatcggccgggacgacgacctgatggcgccgagctactatatctcccgggatttcgacctggaagaggtgcggcgcgcggcattggccacgggcaaggcgtgggttttccccgacgacccgcagagcgcgctggcggatacgctgcggttgaaacgaaataaaaaagggcctttatgggagtacctgagaaaaccctgattacgggggaggagatactggaatacatcccgcagcgcccgccggtcgtgatggtcgacaccttttacggcatcgacgagcgggggtgcgcacgcagcgggctgaccgttacggcggacaacctgttcgttgcggacggggtgctggacgagtgcggcatcgtggagcacatcgcccagtcggccgccctgagggcgggttacatgaaccgcacgatgggccgaagggtgcagctggggtacatcggcgccgtgaacgacctgagggtgcacttcctgccgccggtgggcagcagactcgtcacacagaacatggtcgagcagacggtgatgaacgtaacgcttctttcggcacggacggaatgcgacgggaaacccgtcgccgagtgccggatgaaaatatacctggaagagtgatggtacgcaggaaaaagagcgaggcgagcctcgtgaacaagacatcgctgcgcgtgaggttcagcgaagtggattcgatgcagatcgtgtggcacggcgaatacgtgcgttatttcgaggacgggcgcgaggcgttcggccgcgaattcgcagggctgggttacatggacatctatgccagcggctacacggcgccgatcgtcgagttgcacctgcaatacaggaaaccgctgaaagtgaatgacacggccgtggtggaaacccgctatatcgccaccgaggcggcgaaggtctgtttcgagtacacgattcgcagcgccaccgacggcgaagtggtggccgaaggcagctcgacacaggtgttcctcgacagccggggcgaactgcaactgctcgcgccggagttctaccgcaaatggaaagagcgatgggaggtgaaataacggtctggtggggccccgacgacatggtatcggcgctgggcttcggcacggaggagaacatggccgccgtacgtgccatgaaaagctcgctggcgtcgtggcacgatgccacacccgtatgcctgatcgaccggaagcggctcggggcgatggcagcggagcagggactcgcgggatatacgcccctggaacggctcgtgctggcgacgctgggcggggtggtcgcccgctcgggggtcacacccgccgacaagcggacgctgatcgtcctggcgacgaccaaaggggagatcggatcgctggggagcgccccggagcgatgcgacctgaacagaacggcggaagtcgtgggacgtcatttcggcgccgcgcaccggccgctgctggtctcgaacgcctgcatctcgggcgtttcggccatcgtcatcgcggcacggctgatccgcagcggccggtacgaccatgtcttcgtggcgggattcgacctgctgtgcgacttcatcgtcagcggattcaacgccttcaagtcggtgagcccgacgctttgccgtccctacgatgcctcacgcgacgggctgacgctgggcgaagcgtgcggcgccgtcctgctgacacgcgaccaacagctctcgggcacgggcgtgagcgtggtgggaggcggaatttcgaacgacgccaaccacatatcggcgccttcgcgcacaggcgacgggctctggtacgccatccgcgcggcactcgccgaggcgggaaccggagccggggaggtcgggctggtaaacacccacggcacggcgaccgcctacaacgacgagatggagagcaaggcgcttcacctggcgggattgtgcggcgtaccctgcaactcgctgaagccctatttcggacatacgctgggggcttcgggcgtgatcgagagcatcgtcacggtacgggagctgtgcgagggcacctgcttcggggtgaagggctacgcggagtgcggggtaccctacccgcccgacgtgagcgccgcgcaccgcgaaatacggacggacacggcgctgaaaaccgcctcgggattcgggggctgcaacgccgcggtcgtattccgccgcgcagcgggccccaacgccgcgcccggaaatgaaacggcggagggacaagggtgtgggccaaacacaggtgtgcaagacgggaacgactgcctggaggctgcctgtacccgaagcggaacggctatgagcgcgaatgaccgggggcacggcaaaaatgcggtcgggcacgggaacccagacaccggagaaaaggccggcggccatgcggaaaccggcacaggacgacacggcagcggaatccgctgtcacgatacggcacacgtcgtcattgcgcaacacccttcgctgccgttcgacgcctttatccgcgaaagataccgggcgctcgcagacccgaacatgaaattctcgaagatggacgacctgtgcaagctggcctacgtcgcctcgtgcgaactgctctccggacacaggcccgattgcccggcggagcgcatcggcgtggtgatggccaaccgcagcgcctcgctcgacagcgaccggcgccaccaggcgattatcgacgccggggacgggtgcggggcttcaccggcggtgttcgtctacacgctgcccaacatcatgctggggcaggtggcgatcaagcacgggctgaagggagagagcactttttttgcgttcccggacaaaagcagtaactttatccgggaatacaccgcttcgctgatcgccgaagggcgcatggacgccgtcctgtggggctggtgcgaattcgacggcggcagctacgattgcgaactgacattaaccgaaaaaacgggacaagatacgatggaagatctggaactgcaactcaaacaacaaattatcgaagcgctgaacctcgaggagatcaccgccgacgagatagcgaccgacgcgccgctgttcggcgacgggctgggactcgactcgatcgacgcactggaaatcaccctcctgctcgaaaaacactacggcatacggctggcaaacccggcccaggccaaaccgatattctattcggtagccacgctggccgactttatccgcaagaaccgcccgcaatgagcatagccgtctgcggcatagggatcgtctcggccatcggcatcggagccggggagacgctcgggaacctgcgcaccggacgcagcggaatcgggaagccgacgcttcccggttcggctgtcggcgtgcccgtgggcgaagtgaaacgggacaacgcggcgctcggggagctgctcggcatcccggagcgcgagcacccctcccgcaccgccctgctgggcatggcggcagccgcacaggccgtagcggatgcggcgatccccgccggggcgcgcgtagcactcgtctcgggcacctcggtaggcggcatggatttgacggagaatttctaccgcgacttccgcacggacaaggcgaaagggcggctgcgcgacgtggcggggcacgactgtgccgacagcacgcaacggatcgcccgctactgcggcatcggaggttacacggcgacggtcagcacggcctgctcgtcggccgcaaacgccatcgtcaccggcgccctgctgctcgggagcggcatggccgactatgtggtggccgggggcacggatgccctctgccgtttcacgctcaacggcttcaactcgctctcggtgctcgaccgggaaccctgccgcccgttcgacgccacgcgcgccgggctgaacctgggcgaaggggcgggttacctcgtcctcacgcacgaaaggcccggcatgcgcacctactgccgcctgacgggatatgccaatgccaacgacgcctatcaccagacggcctcgtcgcaaacgggcgagggcgcataccgcgccatggccggggcgctggcgcaaagcgggctgcgccgcgtggactacatcaacgtccacggcacggcgaccccgaacaacgacctcacggaaggcaccgccctgcggcggctgttcggcggacaggtgccgccgttcagttcgacgaaaggctacacggggcatacgctcgccgcggcgggaggcatcgaggccgtattggcggtgctggctatcacacacgggctgcgctacggcaaccccggattcgcggagccgatcccggaactcggactgcaccccgtagcacggacgcaagaggccgacgtacgttcggtgctctcaaattcgttcgggttcggcggcaactgctgttcgttaatctttgccaaatgaaactctacgtcaactgcatcacatcgggcgccgggctgcgccgcgacatcaaggagctgatccccgaaatgaacctccgccggaggatgagccgcgtggtgaagtcgggcgtcgcggcgggcatcgaatcgctgctggaattcggcgaccgggcggcggtcgaggccgtggtcacggccacggggctggggtgcatcgccgacagcgagaaattcctcgattcgctgatcgccaacgaagagcggatgctcaacccgacgccgttcatccagtcgacgttcaacacggtcggggcgcagatcgccctgctgcgcgggctgcactgctataatacgacctacgccaaccgctggacgagcttcgagaacgccctgacggatgccgcactgcgcatcggcgcggggctgtcgcgggcggtgctggtcggggcgttcgacgagacgacgccgtcggccgggataatcctgcaacgcctcggggtggcacagcagggcggctggggcgaatcgtcggtattcttcgtgctgaccgccgaagcgttcgacacctcggtcgcggcgatcacggggatccggttcacggacggcacagccatcggggaaagcgccggcacgggaagaatccagtcccgggaagatgccggcacaaggacatcggccgggggaaacgccggccgtgaaatcccggccgggggaagtcccggcacgggggcggccgccgggaacggggaggaaccggggaatacgccgcaaagcggcgagtgccggacggtacgtgcgtcgatgagcggcgtgacgccccatttcacggccatcgccgaggtgttccgccgtgtggtcgccggggaggccgggaatacgggtaagaccggaaatatcgggaacgccgggagcatagaggacaccgggaacatcgggaacgcggggaacgccgagcagaggatcgtgctttacaacgatttcccgggcagcaccgtatccgccatcgaattgacatgtatgtaattatcgccataatcgccgcggggttcgcccttttctactgctcctaccagatcaggctgggggcgtatgtccgcagcctgtgccgcaaccgggcggcggggcgcgtcgtggcgctgacgttcgacgacgggcccgaccccgagcagacgccgcgcgtattggacacgctgcgggcgcacggcgtacgggcgaccttcttcctgatcggcagcaaggccgagctgtacccgcagatcgtacgccgcatggccgccgaggggcatgcaatcggcattcacacgtggagccacacgcccggcttcccgatgctgcgaagcggggcgatggcggccgacatcctgcggtgccgggagtcgctgcgcgagataaccggcgtggaaaccgaccttttccggcccccctacggggtcacgaacccgatggtggcacgcgccgtgaaacggacgggaagccgctgcgtgggctggagcatccgctcgctcgacacgctccggcagcgcagccgtgaggccgtggcacgccgcatccgccgacggctgggcgacggcaaggtgatcctgctgcacgacgaccgccccggtgccgaacggctactggcgatggtgctgaacgacctgcaacgcgggggctaccgcacggcgaccgtatgcgaactgtttaaaaccgagaaaccatgaagatagcgtcacttcttttcatccccgccctgctcctgtcggggctgacggcccgggccgggctgcccgcgtcgttcaaagagcggctcgccgaagccagccgcgagaacaggactatccagtgcgacttcacgcagcgcaaacaggtgcgccgcatgaagaacgagatcgagctcaaaggccgcttctattacgacaacagtctggccatggcgctcgactacaccgtgcccgaaggcgacaaggtgattatccgcaacgaccgcatcatcctcaaaacggccgggcaggtgacccagaccgcgacgtcggccaaccccatgctgcaacaggtggcgctgatgatccgcgccagcatgaccggcgacctctcgcagttcggccaggggtggcagatcggctacaccgaaaaggagggtgtcggggaggtgaaaatggttcccgagtcgaagcgcgcccgcaagtacatcgactcgatcacgctctgcttcgacctgaaggacatgaccttagatcgcatggaactctgcgagacccaaggcgggcattcggtctacgaattccgcaacaagcgtttcaacctcccggtcgaccccgcaaggttcaacccgtaacccagagaccacgcccgatgcaagacctgttcaccagcatagacaactacttggcccaggaggggcattacgctttccgcgtgcggctcgatgcgtcgcacccggtctaccgggggcatttcccggggcacccggtgctgccgggggtctgcacgctgcaactcgtacgggaatgcctgaaccgcggcacggggcgcaggttccgctatgcagccatccgcgaatgcaagttcctcggcatggtcgtaccgcaggcggacgaactgctggagatcgacatcaggctcgcggacgacggccccgcggcgaagaagctcgtttgcaccgtcgccaacaacggcaaaacggcactcaaactcaaaggaaccgtcagcgaagagctatgaccagcgaaaaaaacgacatactggcggtgatcccgacctacaacaacgaaaagaccctcgcccgagtcatcggagacgtgcgccgctactgcacggacgtgctgatggtgaacgacgggtcgaccgactcgacggcggggataatcgccggggcgggcgtcgggagcatctcctacgctccgaaccggggcaagggctacgccctgcgccgggcgctgcgctacgccgcggagcacggctaccgttacatgctgacgatcgactcggacggacagcactacgcctcggacatcccgaaattcgtcgaagagatcgcaaagacccccgacgcactgctcgtgggggcccgcaacctgaggtcggacaacatgccgggcaaaaacaccttcgccaacaagttctcgaacttttggttccgcgtggagacgggcatccgcctcgacgacacgcagtcggggttccggctctaccccgtgcggcggatgaaggggatgcgtttcgcgacgcgccgctacgagttcgaggtcgaagtgctggtacgcgccgcatggcgcgggatcgaggtgcgcaacatcccggtgagggttttctaccccgaaaaggccgagcgcgtgtcgcatttccgcccgggcaaggatttcacgcgcatcagcatcctcaacacgctgctcgtgctcggggcgctgctgttctattatccctggcggttcctgcggtcgctcacccgggaaaacatccggcgcttcgtggtcgacaacatcacccggtcgaaggactcgaacccgcggctggccgcctcgatcgggctgggcgtcttcttcggcatcgccccgctgtggggctaccagatgatcgcggccgccgttacggcgcatttcacacacctgaacaaagccgtggcggttatcagctcgaacatcagcatcccgccgatgatcccgttcatcctctacggaagttactggacgggggcgcaggtcttgcagcgcgacatgccgctctcgctctcggacatcaccctggaacgggtggccgcagacctcgtacaatacatcgcgggcagcttcacgatggccgccgtatgcggtgcggccgcgacggcggtcggctatgccctgctcgtactctgtaaacgcacgcccggccatgaataaacttttcatcaccctctacgacttcttcgaacggcgccgcgcactgctctgcacggtgctggcagtgctggtcgcggcgatgggtgcggcggccctgcaactgcgtttcagcgagaacatcaccggcttcttccccgacggggagcggaaggccgcggcggcattctcgaacctgaagatcaaggacaagatcgccgtgatgatcaatacccgggaaggtgcagaaggcacgggagccacggcggaggggatgatggcctgcgccgaccggctggtggaactgctcgaagccgatacgcttttccaccgctgggcacaggccgaggcttcgttcggcagcgagctggtggacgacatgcgggcgttcctgcaagggcacctgccgctgctgctcaccgaggcggactatgcccgcatggacacgctcctcacgcggcagggcatcgcgcgcgcgatggagagcaactaccgcaggctgctgtcgcccgtcggcgggttcatcgacgaatacatctacgacgacccgctggggctgtcgttcggggcactgggaaaattacaggagctgaatatcgggggcaattacacgctcttcgacgactacctcttctcgaaggacatgacgacgctgatggtcttcatctcgccccggtacgagagcagcgacacgggcatcggcgaccggctggtggagcggatcgaagcggtgctggccggcctgaacgccgagtacgccgcccagggcatctcggccgactacttcggcgccccggccgtggccgcatacaacgcgcggcagatcaagcacgacatgatgctgacgctgaacatcgccatcctcgtcatcgtggtgttcatcaccctctcgttccgcaacaagctgtcggtgctgctggccctgatccccgtggcgctgggcggattgctggcgctggcggtcatgtcgctcgtgtgccacacgatctcggccatagccgtcggggcaggaaccgtcgtcatgggcatcgcactgagctactcgatacacatcctctgccatgccaaccactgccacgacccgcggcagatcatccgcgacctagcctacccgctgacgatcggcagcatcacgaccatcggcgccttcgccgggctgcttttcaccgactcgcagctgctgcgcgacttcgggctcttcgcttcgctgacactggtcggaacgacgctgttcagcctcgtcctgctgccccacctgatccgtaaggaggatcgcgggggggggtcggccgtgctggaaggcgtggagcggctcacgagtatgcgccccgaccgcaaccgcgtgccggtggcggcgatactcgggctcacggcggtatgcctcttcttcttcaaccgcatcggcttcgacagcgacatgatgcacctgaactacaacgcaccccatctggcgcaggccgaggagcgtctgggccgcctgatggacgacgaccgggaacgttcgaaggtgctcttcctcacggcggccgacaccccggccgaagccgtggacagctacctgcgcctgggacggcagctcgactcgctgaaacaggccgggaagatcgactcccatgccggggtgacctcgttcgtggtggacagcgccgagcagctgctgaggctggagcgctggcgaaagttctggacgccgcagcgccgcgaagtgctgcgcgcagggatccgggagggcgaaaggcgctacggattcgccgaaggggccttcgacggcgcactggaactggccggaagggagtacacgaaactcgactactcgtccccggcggcacgggaggtatttcgcgaatggatcgacgggcacggcgcgacacccatattcttgagccatgtgacattgcccgacagctgcaagcacgaggtttacgccgtgttctcggcggcggacgacatcgtggtcgccgaccgggcgttctacgccgggaaaatggcgcggagcgtgaaccacaacttctacctgatactctcgatctcgtcgatactggtcaccgtggcgctattcctctgctacgggcgtatcgagctgacgctgatgtcgctgctgccgatgggcatcagctgggtcatcatcctgggactgatggcgatgttcggcgtggaattcaacatcgtgacgatcatcctctcgaccttcatcttcggcatcggcgacgacttcagcatcttcatcatggacgggctgctgagcgaatacaagaccgggcgcaagatgctcgacacgcacaagacggcgatcttcttttcggccttcaccgtcgtggtggggctcggggcgctgatcttcgcacgccatccggcactgcactcgctggcgacgatctccctgttcggcatcgtcgccgtggtgctggtctcctacacgatacaacccgtgctgttccggatgctgatcacctcgcagaccgaaaagggcggggcgccctacacgctggggagcctcgtaaacacggcctacgcattcgggttgttcgtgacgggctgccagttgttacaggcgctgattttcacgctctggccgttgccgatggcacgccgccgcaaacagcgcatcgtgcagtggtcgatccaccacatgacgcggggattcctgcgggcgatggtcacgacgaagaccatacgcctgaacgagccgggcgaacggttcgaaaaaccggcggtcgtgatcgccaaccaccagtcgttcatcgacatcctggtgctgctgagcatctgccccaaagccgtgatggtgaccaacggctgggtatggcgttcgccggtattcgggcgtatcgtccgctacctggggttctaccacgcggcggacggatacgaacgcctcgccccggcactggcgcagaaagtggccgaagggtacagcgtgatcgtcttccccgaggggacgcgctcggcggacgggaagatcggacgcttccacaagggggctttctacctggccggggaactggggctggacatcctgccgatctgcctctacggcaacggcatgatctcgtcgaaaaggcagcccatctatatcaaacacgggctggtggtaagccgcgtgctgccgcgcatggccgccgccgaccccgcaaactgctcggcgcaggccaaggccgcctgccgcctgatgcgccgggagtacctcgggctgtacgaaacctacaacaggccgtgcaacccctattttcgcgacatgctcatcaagagttacacctacaagggccccgtgctggagtggtacatgcgcgtcaaggtgcggctggagcggagctacgagctgttcgaccgcatcgtgccgcgcgatgcggcggtcgtagacctcgggtgcggatacggccccctgagctacatgctcgccatgctctgtgagcggcggcgggtcgtcggcatggactacgatgcggaaaaggtcgagacggccagccagagcttcctgcggcggccgggcatcgaattcatccacgccgacctgcgcacggcggagctgcccggggcagacgccttcctgctggtcgacgtgctgcactacatgcgccccgaagaacaacgggcgctcatcgggcgctgcgcggcacggctcaacgcaggcggacggatcatcatccgcgacggcgacagcggcaaggccgagcggcacaaggccacggcgatgaccgaggtgtggtcgacgaagatcgtggggttcaacaagaccgacggcgggctgcatttcacctcgacgcccgagctggcccggatcgcccgcgaactgggcatggagatacacgccgcgcacaaggacacgcgcacgtcgaatacggtatacatactgacccggcgggaagcggagggccgaaaggaggagtgacatggaggggcagttcgacataatcgtcatcggcagcggcctcggaggcctggagtgcggcgccatgctcgcccgcgaagggatgggggtctgcgtcacggaacaggccgacgtccccgggggctgcctgcaatcgttctcccggcggggacatgcgatcgacaccggcatgcactacatcggcagcatgcaggccggcggcatcatgcgccgttatttcgaatatttcggcatcctcggctcgctgcgcctgcggccgctcgacgaggcattcgacgtcgtgtcgctgcccggagcgggcgactacgcctacatgcacggttacgaagccttcgaaaagcacatcggggaattgttcccgcacgaaaaggcggggctcggccgctactgcgcgaagctgcgcgaaatcggcggcagcatcggcatcagggtgcaccgcacggggcggctgtcggccgggggaacgaaatacctcggggcaccggcggccggattcatcggcgaatgcgtcgcagacccgctgctgcgcaatgtcctcgcggggacgaaccccctctacggaggcgtgcgcgaaagctcgacgctctaccaccacgcgatgataaaccactcgaacatcgaaggcgcctgccgctttacgggcgggacgcagcagatcgccgacgcactggcggccaagatccgcgagcacggagggacgacgctggtgcggagccgcgtcgtcgccctgcacaccgaagggcggcgcgtcacgggcgtggagctggccgacgggcgaatgctgcgggcaaaaaccgtcatctcggccatccatcccgcggagacattccgcctgataggcccgacgcccgtcgtccgcaaggcattcagggaacggatcggcagcctgcccgactcgtacggactcttctcggtatacctgctgctgaagccggggcagttcccctacatcaaccggaacctctattacttcgccgggaaagatgtctggaagacgcttttcgacccggaggccatgcggccggggatggtgctgctcagcgcacaggctccggacggcgacccggcatggtgcgacgtcgtaacgctgatgacgcccgtcgccacccgcccctgggaggcgtgggaaggctccgccccgggacgccgccccgaagcctacacggcgctgaaggccgccatgacgcaggcgacggtcgatttcgcctgcgcccgccttccggaactgagggatgccatcgcccatacgtatgccgccacgccgctcacctaccgccactacaccggcgcaccgcacggcgcggcatacgggctgctgaaagactgccgcagcatcatggcgtcgcacatcccggcccgcaccaaattcgaaaacctgctgctcacggggcagaacctcacggttcacggcgccatcggcgtcacgctgtcggccgcggcgacctgctcggaaatagtgggcacggaatacctcgcaaaaaaaatcgccaacgcatgaaacgcctcttcaaatacacactcatcgcactggcggcaatcctcgtcctgccggcggcattcctctgcggcctctatttgacggccgacatggagcaaccagcggtgacgatcgacactgcggcctaccgcgtcacaaaccacggtggctacaccacctgccacggcagtttcctgcgccgcaacccccacggactctgggagctctataccgccgggccgcccgaagagtcgggggcggcggcaggcgccctcaccgcagggctgatgcactaccaggaacaggttttcgtagaccgaatccgcgaattcgtcccctcggagggctacctgaaattcctgggcggcatgatccggatattcaaccgcaacctggggcggcacgtccccgaggagtaccggcgcgagatatacgcccggtcgctttactgctcgcacgacttcgacgccatcggcaccccctacgaacgccagctcaactaccacgcggcgcacgacatcgggcacgctatgagccagtacatgctcgtgggatgcagttcgttcgcggcatggggcggtgcgagcgacgacggaaaaccggtcgtcgggcgcaacttcgatttctatatgggcgacgacttcgcccgcaacaagatcgtgaccttttgccggccgcaggcgggctatcccttcgccagcatcggctgggcggggatgatcggcgtgctgtcgggcatgaattccgaagggctgaccgtgacgatcaatgccgcgaaagggcccgtgccgctggcatcggcgacacccatctcgatcctcgcacgcgagatcctgcaacatgcggcgaccatcgcagaggcgctggagatcgcccgccgccgcgacaccttcgtcagcgaatcactgctcgtggcctcggcacgcgacgggagggcggcgatcatcgagaaaacgccccgccgaaccgtgctctacgagggcgacggggagtacctcatatgcacgaaccactaccagtcggaggcgttcgccgacgacggggacaaccgcgagaatatcgccatgaccgacagcccccatcgcttcgcccggctcgaagagctcatggcggcgaatgcgcccctcgacgtcccggcagcggccgccatgctgcgcgaccagcgcggcacgggcggcaaagacatcggcgtggggaacgactgttcggtgaaccagtcgatcgcccaccactcggtcatattcaaaccggcaaccctgcaaatgtggatctcgacctcgccgtggcagggcggcgcctttgtctgctacgacctcggagcaatcctgcgcaaccccgaccccgccgcagagctgtacgacgcggcgctggagataccctccgacacggcctacctcgcccgtgactacccgcgcgtggtcgcataccgccagctcggcgcccgcatccgccgggcgataaaagcagggaggaaggccgacggggaattgacagaaaccttcgcccgaaccaacccgcagaatttccacacctggaaactgctgggggaatactacctctcgcagggcgacgacgagcgcgcggcacagagcttcggcaaggcgctggaggcaggggttccccgcagggacgaactcctggcgatagaaagactcaaatcggaatgcaagccatgatacgaaacccggaaatacaattcgcatcggccgatgcggtcgcggcgttccaggaggaacgcctgcgcgaagaggtcgcctacctctatgaaaattcgccttactaccggcgcatgttcgacggctgcgacatgcagcccggcgacatccgcacaacggacgacctgcggcgcctgcctgtaaccaccaaaacggatctgcaactgcaccccggggagttcgtctgcgtgccccgcaaccgcatcatcgactacgtgaccacgtcgggaaccctcggcgacccggtgacgttcgccctcacggaagaagacctggcccggctggcctacaacgaggccgtgtcgttcagcacggcgggatgtaccggggaggacatcctgcagctgatgacgaccatcgaccgccgcttcatggccgggctggcttacttcatgggagcccgggagctgggatgcggcgtgatccgcgtgggaaacggcatccccgaactgcaatgggacaccatccggcgcatcggccccacgggctgcatcgtcgtgccgtcgttcctgataaaactcgtcggctatgcgcaggagcacgggatcgactaccgccgctcgtcgctgcgccgtgcgatctgcatcggcgaggcgctgcgcgacaccgacttcagcaacaacacgctgggagcgaaaatcaccgaactgtggcccgaactggaacttttctcgacttacgcctcgaccgagatgcagacctcgatcaccgaatgcgggcaccactgcggcgggcatgttccggccgacatgcttctggtggagctgctcgacgagcagaacaaccccgtgcccgagggacaggagggcgaggtggtcattacgacgctcggcgtgcggggcatgccgctgctgcgcttcaagacgggcgacatctgcatcgcccgcacgggacgctgcgcctgcggccgcacgacgatgcgcctctcgtcggtgatcggacgccgggggcagatgatcaaattcaagggcacgacgctctacccgcccgcgctgtacgacgtgctggagaatatccccggcgtgaacaactacatcatcgaggtattcaccgggagcctcggcaccgaccagatcgtgctgcgaatcggcagcacgcgccgcgacgaggcgttcgagaaggagatcaaggacacgttccgctcgaaagtgcgcgtagcacccgaggtggtcttcgagcaggtggagtacattgcgaaaaaacagatgccccaaatgagccggaaacaaataaaattcgtagatttacgcgaacaaaccaaataaaacccaaccatgaaaaaattactgagcatagccctgtgcctgatcgccgtcagcggtttcgcacagaagggaaagacgaagatggcggccgacttctacggcgtggattacagctgcgtgagcgtcatcggggccaacgagcagccggccgagttcatcaaggcgttcgaggccatcaaccgcctcttcctcagcgaacccaagaaatacgacgtggccggattcaccggcatcgacatcctttcgaccaatgtcgaacaggccaacgaggcgttgggcggcctggctgcggagcagttcacgccccgcagcacgaaggccgacatcgcggcgcagctccccgggatcctcgcccgctacgacaacggctcggggaacaaggggctggtgttgatagccacgacgctcgacaagggcaacggcatcggatactacacggccgtgttgttcgatcctgccacgcaggagatcatcctccagatggacatggccggcaagcccggcgggttcggcctgcgcaactattgggccggctcggtatacaacgccctcaagaagcagggtaaatacctgaccaggtagggggggggtaccccgcaccgacacaccccgcacggcttcgtgcggggtgtgtcgtcataataggcaaagagcgcccggagcggggacacgatccgcaccggcaggaaaccctgtacgccgccggataaaaacgcccgggaggcggacttacccggcagccccggagcgggcttccgggcatctcccgggcggcggatatttcatgcgcgcatcgtcgagcaccagtacccaatcgttccccttgccgcaagtcgggggcgtgaaggtcatcgtcgcaccggcatcccggcggcggaattccccgatccgcagcgggcgcccgctgcggacatcgtaccaccaggccacgatccgcttcccggaaacccgttccaggtcgacggcaaacggccgtccgctctcggaatagaccatggcataggtgccgaggctgtcgcgggtagccgtacaacgcccgtgcccgctgccggcatctccggcgataacgccctgatcgggaatacggcggaaaaacggacggctctcgataagttcccgcccatagcacacctgataagccccgggcagcgacagggattcgcgccagctccgcacgggccccgtgacaggcgcataccggccgggttcccacatctgccatacggcatggcagccgtaggtatgtccgcaggctccggaaaagacctcgtggtagaatgcccgccgcacatgcagggcttcggaagtgccgtatttttcccggtcgaagtcgatcggatgttcctcgtagatcggctccccgtccagcacgggtttgacgggccgccgggcataatcgcgggcgatgcgctcccaaaggtcgaaatcgtaggcatggccgttctgctgcatgttgaacgcgagccacggctcgtcgtgcagccagtcgcccgaagaggatttcccccacggatggtaggtaatcaggcaggccgaataatcctcgcggccggcgacaccgcaggcgatgccgcgggcgaaggcccgcaatatcagttcacgcccttcgggaggacggtcgccgcccagtatccagatgatattccgccgggtgcggtaacgctcccccagatagcgcccgaaagcctcggcacgcccccccgttgtgaagatctcgggcccggggccccatttgaggcagaacttgtcgccccatgcgggcagcaggccgatgagcagccccagcgaatcggccatggcgaccacttcgtccacatacgcgaaataacgctcgttgggccgggtgaaccccgcatcggcaaacggcaggtcgccgtaggcattggggacacgcagcccgtcacgttccgcgaggcagacggcctgtatgaccgtgaaccctttccgggcgcggtcttcgagatagaggcgcgcctcttcgcgcgtcgtacggtggaacaactcccacgccgtgtcgcccagatagaagaacggcctgccgtcggcatattgcaggtaacgcccgccgggatgcacgacgatgcgcccgcgggagaaaggccgggcgccaaggggcgcaggcgcaagaaagagcgcaaaaaacaggaacgcaaataatttcctcataaaaaacgatttcaggcgacagccgggaacaaaacggcagtcggggccgccggaggcgaccccgtgccggagtggcggcaaagccgggttacagcccctccttcgaaagcagctccgacgtgtcgatacgcacctgcgtcgttgtgagcttgtcgttgagcgcataacgcgtcgggtcggatatggtgaccggcagggaaaaatccttgtcggcattcgccttcagataggcgatgtcgaccatgaggaaaaaagtcgcatcgcgtttcccgtcggggcagctcaccgaggaaggcagcgtgtatgcccggcccggcagcaacacagtcccgtccaggggagtgctgcccacggagacgctgaccgtataggcctgcaactcggccagcccggcgcggtagatgcccaggaaaatgtgcaccttccccgcctgcgcgtcgatgcggtaattcttgttggactgctgcgccgtcccgccgttgggcacggcataaggggtgtaaccggcctgcggcatatagatcaccgcactgccccagggcctctcgctgtcggccttctggcatgaggctgccccgcatgcgaggagcagcacagaaaagaatgtaacgatcgttctcatagttcgatatttttcggtctaccaacccggattctggtcgagtaccccgcccgattttacgatttcggcctgcgggatcggataaaggttcatcttcggggcatcgaagatgcgtttggccacttcgaacggcgtgtaggcaaagccgtcgccgctgcgggtcaccttcacgccgcgcaggggccggttgagcaccgtcccggcatcgtcccagcgccggagatcccagtagcgatggtcttcgaaggccagctcgatgcggcgttcgtgtttgatggccgtgcgcatggcggccgcatcgcccgggtcgacatcgaccgggggcatccccaccccggaacgggcacgcacggcatccacggcgtcgcgcgcactcatcccgtagccgtgggcgtcgtccgggccgtaggcttcgttcatcgcctcggcaaaattaagcaatatttcggcatagcggaaaacgatccagctgcgaagccgtttgtcgtcattggtgaggttcaggttctcgttcaggaacttgcgcaggtaataccccgtgggcgaagcgttctgccgggcggggtcgtcggcgccgcccgcatagatttcgagcgtgcgcccgttccacgtatcgccgttgcgcaggacggtggcgtagaagcgcgggtcgaggccggcataggcatcgcccgtatcctcccccgtagattcataggcttccacgaggttctgcgaagggcagatacccgtaccgccgccctgcgtgccgatggggtaattcttgcgttcgaactcgttggtcgcccccatacgcaccgcccagatggtctcggggctggtcgtagaggtttcggcgacgaacagcccgccgtaatcgggatgcagggaatagatgcccatgttgatcacttcgaaggccgcagcggcagcggcagcccacttggacttttcgcccgagggattgaactgcggactggcggcatagagcaacaccctcgacttgagggccagcgccgcaccacgggtgatccggcccgacttctcctcgaggttctcggcccgccagtcgacgaccagttcgttgcgcaccccctcgatctcgcgcaggatgaggccgaccacctcgtcgaacgtgccgcgcggaagattggcctccttctggtcggcatacacacggtcgatgaggggcaccccgccgtaacgcttggcaagctcaaaataataataggctttcagcacatgcgcctcggcgcgcagccgctgcacgtcgacgatgtcgcggcggtagctgtccaggccgttcgaagtgagcgtgtcgcggtgcataccgaggatatacctgtaatccaccgacttatcgaggtagtcgtgcgccgcatagatgccgttgtaatagctcgtatagcaatcgtcggggttgtaataggcgctccagctgccttcgttgaaccgctgcgtggaactgaacgtggtcacgtattgcgcctcgtcggaaacggctgcgaagaggttgccgtcgatcgccgtgaacccgtaggggatgtgttcgtaaacgcggtagccccagtcgaacatctggtaacggcgcgtggccatcatctcgtccgtcaggttcaggtcttccttggtgtcgagcgcatcgcaccccgccagggacagcgaacaaaggagggcgcccgcgaaaaggattctcatattttttcgtatcatggcagtcgtgtttagaaggttacggtcagtccgaggttgtaggatttcagcgccgggtggccggaaaggatttcggggtcgatgtcgtagtcgcgcatcagcctgctgacggtcagcaggttgacaccgctcaggtagatgcggatcttcgagatgccggccttgctcagcgacggctgcgcgaaggtgtatcccagttccacgttgcgcagcttgaggaagtcgccgctgcgcctccagagtgtcgaattgcggtagttgttgctgttgtcctgcaacgaaaggcgcggataggtggccgtagcccgcgtgtcgatgccctgttcgggatagtaggcccagcggccttcggcaatcccgtagacgttgccgttgtcgcggaaggcaatgttctgcaagggcgcatcgagcaggttcacgtcacggccggccgccccctgaaagagggcgaagaggtcgaaccccttgtaggatgccgccagcgagaacgagtactgcaacttgggcaggtacgagtcgccgatggccgtctggtcgttctcgtcgatgaccgtatcgccgttcaggttcttatacttgatgtcgccgggctgcacggcaccaaacgtaggcttgggaagcccctccctgagttcgccgccgacgtcgaaatcgtcccagtcgtagaacccgtcggccacatatccgaacagggcgtcgagccgccgtcccgtgcgtgccgcggtcggcacggtcacgacctcggccatatagtcgaccttgttgctgttatacgaggccatgcccgtgagcgcgtaattgaaatcgcctatgcggtcggcccaggaaagctggacttcgaagcccctgttggtcatcctgccgatgttgcggtaaggcggattgtccacgcccgaggcaccggggatcatccagtcctgggtcacgatgcccgatcttttttcgaggaacaggtcgacgttcagggacaacctgttccacaggcgcaggtcgatgccggcgtcgtacttcaggctcttttcggcaaaaataccggggttcgggaggtaggacagcgccgttcccccgtgccacgtgtgctcggagtttcccgtattgaggccgccgcggccggtatagtagccctcccagaggtaacgcatctcgcccatcggatcccagccgttcttaccgaccgaagccctgagcttgagcagatcgaccgtgcggctgtcccgcaggaaacgctcgcgggaaacgatccagccaaggccgagcgagggatagaacccccagcggttgccgggcctgtaattgtccgaaccgtcggcggcgaaggagaaggtcgccacatagcggtcgtcataggcatagttgaccgccccgttgacggtcatgtgacggtattcgaccatcttgccggcagcgccgttctgcgaaaagtctgtcttgtagatattatagagtatcccggccgaggcggagaccacatgccgcccgaacgtgccgtcgtagccgaccgtggcattgtagtgctgccacgtccactggttctggccgctgtcctcgccacgggtatagggggtgtcgttatcggtggtctgctgcaccccgtcgagccagcgcgaatagttgcgcgtgttgctcgcaccgtcgcgcgtccagctgctcagcgacatcgcctccgaaaggtagagcccctccacgaggaagtcgagccgctccttgagctggaaattggcctgcagggtacggtcgtgcgtggagttgcgccccagcgccttgatcgaggccagggggttgaaattgtagatcggggtacccgtccacgtcccgtcggggttgcgcacgggataaaccgagccggggtatttggcaaggtcgttccacaggtcgcccgcggcgcggttggggtaacggcggtcttcgatccggcccccgacatcgaccttggcctccaggaaaccgaagaggttcatatcgaggttcgtgcggatattgtagcggtcgatgcctgcgttggccagcgtgtcgttggtaggcgtgtcgtagattccccgctgccccatgtagccgaacagcacgaaatagcggacggtcttgtcgccgcccgagaccgacacgtcggcatcggtatagggcgtggccttcttggtgacctcgcggtaccagtccacgtcgggcagtcgggcgacctggtcggccgtgtaatagggtgtccagacgttgccgttgtcgttgctcagcgcctcgttgtaaagccgggtatagtcgcccgtacgcaacggtttctggagggtcataggctgctgcacgccgccccggacattgaccgtgacgcgcgggcggccgatacggccgcgtttggtcgtgacccaaatcacgccgttggcgcccctcatgccgaagggagccagcgccgcggcgtccttcagcacctcgatccggtcgatctcggcaggcgagaggaactggaaataggccatattggtctggaagccgtcgacatagaccggcagcgacgagttgttgtaggtcgccacgccgcggataccgagcgcagccgcatcgtagccgggttccccgttggtctgcgacacgaccagccccgggatacgtccgtaaagcatgttgttgatattggccgaggggatggacacctcgtcacccgtcacggaagagacggacgaagtgaccagcaccgccttcgtgcgggccgatgtcccggggatcacatattccagggccgtactgtcgggctgttccgcagccgcggtatcccgggcggaaaccgggccggcaccaccgacggccagaaccgcgagtgccgcgcctgagaggaacacacttttcatatggttgggattcatgtaattctgattttttcggtaaacgattgtgtatgggcggatcaatatccggggttctgcaccagatagcccttattcacctcgctgagcgtaaagggcgaaagggacatgcgctcgtgccacgtgtattcggggacataggagggcttgcgcgtgtaattggcgaactcctcgggtttgcgggggttccacgacacgccggcggcctgcgagaactcgaacttgtacttggccccgccgaccatcgacgccccctgcttccagtggcgggcgtggggataccactggttctcctcgtagaattccacagcccattcgcggtggatgctccgccgcagccccacccggtcggtctgcgtttcgtcggggatgcctccgcgcctgcggatgtcgttcaggtagcgcagcgccatggtcgggttgccctcctcgttgtaggcctcggcgatattgaggtaaaactccgccatgcggtagatcgggaattcgaaccattcgcgcgaaccggcttcgtaccaaaatttgatgttcttggcacagccgtcctgccacttgtattcgagctgccagttctggtacagatcccaacggctgttgccggtattgttcttggggttgacgccgtagaaatagagcgacgcctgcgcacggggttccaactcttcggccttgtcgcggtattcgccggccgggcgccagtcgtccacgcccgcccacgtctgatccgtaccatcggccttgcggtactggcagagctgaccgtagccggtgccgcggtactgccccaggtcgtggccggtgtgggtcggcatgaaggtgtagttcttgtagataccgttgtcgtcggcctcgcgctgctgcttgtaggccagcagcacctcgcggttcgacggcgtgccgacggccgtgccgtaatccttgatggggtcgcccgtgtcgatcaactcgaagccgttggccttgccccagtcgatcacctcctgattggccaggcgcgccgtttcccagcgcttggcatcgtagcccccgagccagatcatctcattgttcgcggggtcggccatctgcatgtagggagcgtcggcattgaagaggggacgggcggcgtacatcagcgcttcggccttgacggccagcgccacgcccttgttcacgcgccccagccagtcggccggccagcgcacgccttcgagtgtcgcggcggccgcgtcgcacagcccgacaatgaagtcgagggtttgctgcacggtagagcgggggcgcacgtcgaccgtggtgagcgtcgattcgaccagcggcacgccgccgtagcgcttgagcatctctacgtagcggaaagccaccagcacctgcatttcggccttgacgatggctttgtcgcggtcggacatgtcggcgaccttgtcgatgttctcgtacacgagccacgccttgcggatgtaggcgtagttgttggggaaatagtcgtcggtataaccggcgccgttattctcgttgttggccagcatacccgccacgacctgcttgtccatgtatccccatgtcaggcggcaaaggtcttcgccgcccatgatggcttcggtcgtctcgtagggcatgatcggggagttgttccacaccagtacgggtaatcccgaggagaggatcgtggcgtaggcctcggcgatcgccccctcggcgttcttggccgtgctgaagacctcgtcctgatccatgcccgtcacttcgggcttctcgatgaaccagtcctggcaggaggtaaggccggccgccagcaacaggccgagaagcatataaatggtctttttcataaggctgcgacttaaaattggatgttgaaaccgaagttatacacgcgcgtgagcggatagatgatgccttcggacgtactgccgtcctgcaccagctcggggtcgatgccgtcgaccaggtctttgccgccccaggtacagaggttgttggcattgacgaatacgcggatcgagccgatatgcgccttgcgcatccagcgggcgttccggaacgtataggccacctcgacgttcttgagcttgatatggtcggtcgaacggaaccagaaggcattgttctggttgttctggctgttggccatgttcacggacatgcgcgggaaggtgatctgcttgccggcggcatggcgttcgggcgtccagcggccgttcatatagctcagcggcgtgccgttgccctgcgcgaagggcgtgatgaggtagccgttcatgttgaacgtcccctgcgccgaaccggtaaggagcgcggatatttcgaaccccttgtagccgaagctcaggttgctgctgaacgcgaagcgcgggacgttcgagaagcccgtcggggtaatgtccttgtcgtcgatgatgccgtcgccgttgacgtcgacgatacgcaggtcgccgccctggacacggttgccgtcgatggcattgtagggatggttggcgacctcctcgggcgtattgtaaaagccttcgttgtaataggccttgtactgtccgtaggcgaagcccgtttcgttcatccaggcgtacatgtaggagggttcggccttgtagtcgatcttgttgacggcataggagacctgtccgcccacttcataccagaaatccgtgccgacgttgtcgcgccacgagacctgtatctcgtaaccccggttgctcatgcgccccacattcacgggcggcagggcgtcgccgctcaggccgatgatgcccggcgtgacccccagtttggtgaggatgttgttgcgcttctcctcgaacaggtcgaccgtgaccgaaagccggtcgcggaacatgcgcacctcggcggcgatgttgtacgactccttcttctcccacgtgacgtcggggttgcctgtcgactgttcgtatttgccggggaaggccgggttattgaccgaaccgttcgacgagccgaagaaatacccgtcgagcggggtgccgttccaggggccgtagctgtggctgccccaggtgccgggcaggaaaaggaagcggtcgccgccgatctcgctgttgccggtctgcccgtacgaggcgcggaacttgagccacgtgaggatgtcgttcttcgggaagtagggttcgttcgacacgacccagcctaccgaaacggccgggaaaaacccgaaccgcttgccgggcgcgaagttctcggaaccattgtaacccatgttgaattcggccaggtaacgctggtcgtaaccgtaggtgacacgccccaccacaccgtaatagccgcgggggacgttatacttcagcccgggcgaggtgtagcgttcgccggtgacgagcgccatggccgtgacggcgtgcttgccgaaatcgcggctgaagtcgatgccggcctcgacatagaccttgcggtttttgccccagccggtctcctcgtaggatttggcattgtgttcgccgccgtaatagagcagctcggccggatcggcggggttgcgcgtgatcgaatagacgggcaggttgggggtgacgcgcagcgtcttggtaaaataatggtcatacgacaacgccccgcgtacggaaagcccttcgacgaggtaatccatccggtggcgaatgcggatcgaggtattcaggctgctctggttgatgcgcgcctgtgccttttcgagcatgtaggcgatcggggatttgccccatgcgcccttgttgctgtccatgatcgtaccgccggcataatcggtgatgatgcggccgtcggagacgcccggcgccgagaagggcggggcttcgtagatattgagcatcaggtcgcggtaacggccccacatgtccacgctgctgttgcggtcggtgatgatcttcgtctcgcgcacctgccccgagagcgaaacattgatctcggtgagcgggatgatgttgaaatcgaagttggtgcggaaattatatttgtggctgcccgagttagaggccgcatcgctgaacccgaagtcgttggtgaggctcttctggttggaataccccaccgaggtgaagaaggccaccttttcggtaccgccggagatattgacgctgtactgctgctggggcgacaccccggcgtcgaaaatccgcttcatgtagtccgtactgccgtagtagatggcggggctgtcgagcagcgcctgtttctgttcgggcgaaaggtgtcccatcgcctcgacctcggagggcgtatagtcgcggttatgccggaatttccacagttcgtcctgcgaaaagaccttgatgtcgtcgggcttgccgtcgttggcgaacgcctcgttgcgcagcacggcatagtcgtaggaattgaccaggctgggcagggtcgtcggggaggtgaagccgacattggccgtgaacgagattttcaggttgccttcgcggccgcgcttggtcgtcacaatgatgacgccgttggcaccgcgcacgccgtacacggcggtcgccgaagcgtccttgagcacgttgacgttctccacatcgttcgggtcgagcatgttgaaggccgtcatgtcacgcacgatgccgtcgatgacgatcagcggattctggtcgccggcatacgtccccacgccgcgcacgcggatcgtggactcctcaaagccggcctctccggtcttctggacggcggccataccggcgatacgccctacgagggcattggaaatattggtcacgggggagcgcatcagctccttgcccgacagctgcccgatggcgccggtgacggtctccttcttctgggtgccgaagccgaccaccaccacatcgtcgatgctctggacattctcctcgagcacgatgcggatatcggtctgagttcctacgggcacctcccgggtggtatagccgataaatgaaactgtcaacgtcgcatccttggccgccatgaccgtgaaacgcccgtcgaggtcggtcacggagccagtctgggttcccctgacgaccactccggccccgacgaccggcatgccctgctggtcgacgaccgtcccggagaccctggcaggggagacgtcctgcgcaccggcgccgaaagcgaccgacaggacgagcagcagagtcagcccgatcttcgcgaatctgcgcagaagccccggcacattcaaataatggttcattttcataggtatttaggttgtagttggttgattgcgtcccgcggggagaatcgccgccgcgggacaggcccgcactgaggttcaccgagagggccggatcacaaaatcgaaaaggtcggagcgtctttttctttcataggctgataggtttggttatgcttcaggattttcgttacaacaaatttaggaagacggaacagggatataaagaacggatttatcatttatttgtccgttttcatcatccaccctcctgcgcttcaatattcgatccggacgaccaccgagcgcgtgaagtccggaagcgatacgtcggcacggcgggacgcgcgcacccactcgtcccgccaggggtcgtagatccgcactttcttcaccctgcgcccgccgagcagcggtgtgaagtcgacctgcaggccggacagtcgctgtgccggaatgcgttcggagagctcgtgccgccacgtgctcaccgtatcgcggcaccaggcaagcagcgtgtgttcgccccgcagcacatagacccgcagccccgccgtatcgtggcgcacgggttcgaacccttcgcggagggggtcgacaccttcgacggcacgcgcgaagcgccccatctggaaccaggtatgctgcttgtcgatatggtgatcccaatgccagaggtgccccggcccggcggctccgctgaaaaagggggcgaagagcacgtcgtggagcacggaacccatcgtatctaccttatatataggatgggggccggtatgcacgggtttcacggcgcccgactcggccagcagcatcggtttgcggaggccgtatccgcgcagcacggcgatggcatcggaggccatgctgtcgaccggagcgccgcacacggccagttcggaaccctcgtcgatatagcggtgcacctgcgccacctcgttcgaaggcaggcggttgatgaattcataaatcgggaagctcgactcccggtcgagcgagccgaggctctgcatcaccaggtttttcgggaagatctccttcacgcgcggcagcatacggacattccacgcgcgcaggtgttcctcgggcgtctccacggcgttcatttcgttccacagctcccagccgaaaacggcaggatggtcgccgtaacgctcgcggaagatgcacacgcggcgcaggaactcctcctcaccacgctgcgaagtgatataatcgtcggcatcggcaaacgggccgccgttcgaggtatggtacgaggctttggtgtcccacttgttcacgcccggccggatatggcggaaactctcgatgcagaacttgatcttgatgccgtaccggtcggcgagctccagcaggcggtcgatgcgcacgagcttggcggtgtccacctcgccgtaacgggtttcgatctcgaagaggttcgtattgagccatacgcggccgaaattggcgccgttgcggtgcatcttcccgaggtaatgttccatgtcggcaaccgaccccatcgcggcgatgttgcatcccacggggatatacggctgcccgtccgaaaggcagaaataacggggatcccgggcgcttacctggacgaaagagcgcctgaaggagcgcccggggcgcttggcccacgcctccgctaccgacacgaaggcaaggaggcaggtcaaaaggatgagtcgtttcataggtcgtagtcttaggtttgagcgacaggataaaagtagggaattccccgcgcacggaatgtaaccggttcagcagatgctaacacattttcgtcgggacagcgcaggaggggcgaaaggccggttttctgttaatttttgataaatccgtgcaaatccggcgggtggagtattcctatatttgttccatcgaaaactctaccttatccgaactatgaaacgacttacggcaatcttcctgtgcacgcttgcatacggcgccgcaacagccgccgacggatgggacgccccggccgaccagcacgtcaacgccctgcgccgcctgcccgcccgggccacctcctactcctacaagaccccgcaggatgcactggcgggagaccgcgcccaatcacggatgatgccgctcgacggcgtctggaaattccgttttgcggaagacgccgcccaaagccccgaagggttctggcaaccgggcgccgacctcggagactgggacgagatagaggttccctcgtgctgggagatgcagggctacgggtatccgatatacaccaacatcccctatccgttcgagttcaggccgccgtcgatcacacgcgacaacccgacgggatgctacgtccgaaaattcaccgtaccccgaagctgggaaggcgaccgggtagtgctgcacttcgggggtgtatactcgggttattacgtctgggtcaacggcaccctggcaggatatgccgaggacagctgcctgccctcggaattcgacgtcacaggcctgctgcgaccgggcgagaacacgctcgccgtgaaggttttcaaatggacggacggcagttacctcgaagatgccgaccactggcgcatggcgggcatacaccgcgaagtataccttgccgcaaaacccgacgtggccatcggcgacttcggggtgcggacgctgctcgacggcgacatgcgcgacgcgctgctgcagatacgccccacgatcgacctgcgcgagggcaccccggcggcaggatggcatctgcgggcgcaactccatgcccccgacgggacgcccgaaggccgtgaaatgggactaccggtcgaagaaatcctgtcggaggcttacccgcaacgcgacaacgtctacttcgcactgatggagcagcgcatcgcggcacccgaaaaatggagcgccgagaaccctgcgctctacaccctcgtgctgaccctgcgcaacgatgacgggcaggtcgccgaatcgcgcagctgcaaggtcgggttccgcgacgtccggctccgcggacgcgagatgctggtcaacggcgtccccgtgaaactctacggcgtaaaccgccacgaccacgaccaatatacgggaaagaccgtcacgcgcgaagggatggaacaggacgtaaggctgatgaaactgctgaatttcaactccgtgcgtacgtcccactaccccaacgacccctatttctacgagctgtgcgaccgctacggcctttacgtcatcgacgaagccaacatcgagagccacggttcgggcgggaagctctcgaacgacccggagtgggccgtcccgttcctggagcgtgtgagccggatggtcgtccgcgaccgcaaccacccctccatcgtcatatggtcgctgggcaacgaatcgggatgcggcccggcgcacgcggcggcggccggctgggccaaggattacgaccccacgcgcctgatccactacgaaggggcgcagggacaacctgcgagcccgctttacatacccctcaggcgcacttcggcggccgtattcaccagtgccgcccccgcagacgggaagccaggcaccccgcaacagccgcaggacggcggcaatccgaccgatcccgcctacgtggatatcgtgagccgcatgtatcccacggtcggggagctggagcgcatggccctcaacccgcggatcgaccgccccgtgctgatgtgcgaatacgctcactcgatgggaaattcgaccggcgggctgaacgactactggacggtcatccgcagccatgagggactgctgggcggccatatctgggactgggcagagcaggggctggtcaaaaaagatacctgccaacgcacctactgggcctacggcggggatttcgaaccggcaggggagcatcacgacgcggcgttctgctgcaacggcatcgtcaaccccgaccgtacgctgaagcccgcggcactggagtgcaaatacgtattccagcccatcgggttcacggcggacgaccttgctgccggaagggttgtcgtacacaaccgtaatttcttctccccgaccgaccgctacgacttcacctgggaaatatcgaccgacaagggcgtattgcaacgcggcagtttcgacgtgccgacgacgcccgcgggcaagagcgccccggccaccgtcgggttccgccccttcgagcccgaacccggcgccgaatacctgctccgcgtacaggcccgggaaaaacgggcgaccccttacgccggggccgggcacatcgctgcgcaagagcagttcggactgcctttctacaaggctcccgcgcataaacccgccgcaggcagggcggccgtctcgcaggacggggagcgcatcgtgctgagcgccgcgggtgtccgggcggaaatcgaccgcagaagcggctacctggtctcctatacggtacgcgggaaggcattggtatgcgacaccctgcggccgaacttctggcgggcgtcgaccgacaacgactggcgcggatggcgcgtcgggcagatcgccggatgctggaaagagatgcccggaaggatccggacggaaggcatccgcatcgacgaagccgcagggacggtgcgtgtcgaaaagggggttcccgacagcgtgcggctgacgctggtttatacgctcgacggcacgggggcgctggccgtgtcgtacgacctgcagatcgccgggcagttgccggaaccgctgcgcgcggggctacgaacccgggttcccaatacactggggaggatggcctacttcggcaaagggccccaggaaaattactccgaccgctcgtgcggtgctttgctcggcctctaccggggtacgcccggggacttcatgcacgactacatcaccccgcaggagaacggcaaccgctgcgcagtgcgttggctcacgctgacggagggcaacgggcacggcatccagatcgcgggagacagccccctgagcatgtcggtatgggactgcacgcaggaggcgctcgacagggcacgccacgtcaccgaagtggagcggcttccggatgccctgacggtcaacatagactgcgtacaggccggggtcgggggaaccgatacctggagcctgaatgcgcgcccctcagagcagtaccgcctgctggcaaaacgctatgcctataaattcacgctacttccctgcaacaacgaatccgaagcaatccgcaacggccggaggctttgcaacaaacgatagaccatgaaaaagataatcctgttactggcgttgggattcctgtgccaacccctttacccgcaacgcaccgaatacccgcagatcggggcgcaggtgttcatcgaaccggggcagaccgacaagcagatcgacgggttcttcaggatactcgcgcagcacggattcgaaacggcacgcatccggatgttcggggcgcacatgctgcgcccggacggatcgtgggatttcacgctttacgacaaagcattcgatgccgccgggaaacacggcgtaaaactcttcgccacgctcttcccgccgaccgacgagctgggcgacgtgggcggattcaaattcccccgctcgaaagcccacctgctggaaatcgccgattacatcgaagccgtcgtgagccacttcagggggcatcccgccctcgacacctgggtgttgcagaacgaaccggggacgggcggaacggggcccgggcgaaacgacctgaccgacgaggttttcgcacgctggaaagccgcacagcagactccggcctacgacaacggctacctgaaagccgacttcacgcaagagcggttccacaccgacttcacgacgtggtacctgggatggatcgcatcgcaggtcgatctgcacgaccctgcgcaccacaaacacatcaatccccaccagcttctggacaacctcaccgactacgatttccccgcctacgaagggtttctgacctcgctgggcgtgtcgatgcacctgagctggcacttcggttatttcacccgggcgcaatacccgctgggaatctcgctcatggccgacatcatccgctccggagccgggaaaaacccgttctggatcaccgaaatgcagggcggcaatgtcacggccagcggaagggaggtactctgccccacggcgcgggagatcacgcaatggctctggacgggtatcgccgcaggcgccgaaggggtgatcttctggacgctgaaccagcgggcgtcggcactcgaagccggcgaatggggtatgctcgatttccaggggcggccgagcgaccgcctgacagcggcctcggaagtcgcccgcacggcgaaagcccacaaaagctttttccgcgaggcccggcccgtacggagcggcatcacgctcctttacaacaccgaatcgctccgcacgcagcaaaagaatgcggcggagtcggacgacggccgttacgaagggcgcaaggccagcgcaaccatgaaatcgctcgcgggggcctatgaagccatagccgcctggggcgtggttcccgaaatctgcgaaatgggcgcatacgactggagcaacccgcagggaaaaacgatcgtattgacgaacctcgtggcactgccttcggaggtatgggaacggctcgacgatttcgtccgtaaaggcggccggatgatcgccacggggctcaccggattctacgaccagaacatgcactgcatcctgatggacgactttccgctgcgcaggtgcttcggcgcacagatcagcgagtacaaggccgtcgcaccctattttacgatcgcatgcgacacccctgccacgaccctgcccgcgcatctgtggaaagggatcctcacccccgacaaggcgcaggcgatcgccatgcacggcgacgatgtggtcggcacccgccaccgctacggcaagggcgaggccgtgtggcttccctcgctcgtcgagctgggcggctggcacggcgacaacaaaggggtcgcggatttctacggcacctactgccgcgggcagatcgaccgtgccccgctgcacttctcccgcccggcggacggggtgctgatgcgtctgatggagtctccgtcgcaacggctggccgtactggtcaacaaacgcccgcacgccgtcgaaatagggctttcgcggccgctgcccgcctcggcacgccggttatgcggcgaagcgtcgcccgaaggcgcctccgtcaggctcggagccgaagagtgtgcggttttcctatgggacaaacaggcgaaatgatgcaaaaaacaggtatatttgtcgtagcaccttaaattacgaccgatgaaacaccttgctgccggactgttgctgttttgctggctgcccctgtggggacaggtcacgaacctccatttcaccaacctctcgatcgacgcgggactgtcggacaaaatggttttcgccgtggcacaggacagtacggggctgatgtggttcgggacggccgaagggctcaaccgctacgacggctacaatttcgaaacgttccgctacaaccccggggattcgacgtcggtcagcgcctcgttcatcaactgcatacacctcacacgcacgggcgaattgtggatcggcaccgagaaggggctcgacctctacgaccccgtgacggaaagtttcgtgaaataccatgcggacaacgactcgctgcggctgctcaacaacctgcgcatccgctgcatccacgacgatccgcaaggggtgatgtgggtcgggacgctcgaagggctgatccgcctcgacctgcggaaacgctatatcaactatttcgtactggtacccgatgcattcgaccggatggccaacgaaatccgcagcatctgcgccgaccggcacgggatgttgtggctcggcaccttcgacgggctctaccgcttcaaccccacggacaacagtttcgtccgctatgaaacccggagccggaagctgcccaacgacacctacaacaacctggtcaacgcgctgtatatcccggagaacacccccgacctgctgtacgtcggaagttccagcggcctggtcgtcctcgacatccggcatcccgagcagccgctcggcaccctccgcgcggaagacggcggacttacggacaacgacataaagagcatcctcagctacgacgacacgcacctgctgctcgcaacggccgacgggctcacgctctacgacacccgcagctgtcgggccagcgcctattacagttcgctgtccgacccgacgtcgctgcccaacaactcgctgcgcacgcttttccgcgaccggcagaacatcgtctggatcggcaccgacagcggactggccaaactcgacctcaaacgcaagaagatcgactgcgtccgcctgaccaacgacaggaaaggggccgaacgcaaagtcatcgtcaacgacctgctcggaacccccgaccacagcctgtggctcaccacgaacgaaggcgtcctgcggtacgacagcacgcgacgcgacgcaggatacacgcgttacatggccgacaaaggggtttcgcacagcatcgccaagcggcttatccgcgacagccacggcaccctgtggctgggaaccaacgacgggatcgactactacgatgccgcgcgcgaccgtttcgtacgcgccgagcactcgaaccagaacttctcgctcaaatacatctacgacatcaaggaggacaccgaccacgacatcgtgaccaacatcagcagcggactctgcttcatcaccccgcattaccgccccgacggcggtatctcgcacctgagctacaagacccggctcatcagcggcatcatcaactcggacaactgcgacatcggctatttcgacgtggatgcaaagggcaacatctggttcgcggccacgcaggaggggctgttcaaatacgaaaagcgcaacgaccgcttcatacagtacaaggtgcgcacggacgacccccgcagcctgataagcaaccgcatctacaccatccacgtagaccgtaaggggaatgtgtggacgggcaccgaccggggcctctgcaaactcgacccggcgagcgggctgttcgagcgtttcgacaacgacctcgacctctcgcagtcgatccgcacgctcacgtcggacagctgcggccgcatctgggccgccacgaccaacaagctcatcatgtacgacccggtgcggaaaaacaagatcgtctgcgacctcaaccgggatctgaggatcgacgaactgatttacaacagtttcttcatcgacccgcagggccatatctacatgggcggcgacgggggctacatccgctaccaccccgacgcgatcctgctcaacgaggacaaggcgccgacggtcgtcacatcgttcagcctgtggaacaaggaggtgcgccccggacaccggatcggcaaacgcgtcgtactgccgcgctcgatcctgcacagcgaccggctgcggctgcggcacaacgaaaattcgttccgtttctacttttcgctgctcaacttcgcatcgtcgaacaacaagtacgcctaccggctggaagggtacgacaaggagtggcagatgacgggcggcacgcagaactacgccgcctattcgaacctctcgccgggcaggtacctcttcacggtcaggggctgcaactccgacgggatatggagcgaccgcacggcacggatcgaggtgcgcatcctgccgccctggtggctgagctggtgggcatacctgatctacggggtgctggtcgccgtggtgatcgtcgtagcctacaacctgacgctcaccaaaatgaaactcctctcggaactccggctcgaaaaactcgaacgcatgaagaccgaagaactgaaccaggtcaagatgcgtttcttcaccaacgtatcgcacgaattcaaaaccccgctttcgctcatcctgggccccatagagagcctcggggaacagatccgggacaagcgccagctggagcagctctcgctcatgcggcagaacggcgaacggctgctgcggctgatcgaccagatcatggatctgcgcaaattcgacaacgggaagatgaaactcaaccccagcacgggcgagttcgtgtcgttcgtgcgcaggatttacgaatcgttcgcctatcaggcgcaacgccggggaatagactacgatttcgaagcctccgaacccgagctcaccttccagttcgacagcgacaaagtcgagaaggtgctgtacaacctgctttccaacgccttcaagttcacgcccgacaacggacatatcggcatcacggtttcgctgcgccgcagcgacgaaggacggttcgccgcagtcgaggtgtcggacaccgggataggcgtcacggaggccgaccgggaacatattttcgagcggttctaccagggcagcaacccgtcgttcgagtcgatccgaggcacaggcatcgggctgatgctcgctaaggatttcgtcgagctgcacggcggcacgctgaccctggagagcgccccgggccggggcagcgccttcacgttcacgctcccggtcgacccggcgggggcggcacccgccagcgggactgcggaaaggcagcccgaagcgggatccgccgagcgcaacccgaaggtgctcatcgtcgaggacaacgaggacatgcggaatttcctgcgcataaacctcgaagaacagtacgaaatatacacggcacacgacggcaacgacgggtgggagcagatccgaaacatctaccccgacctggtggttagcgacgtgatgatgcccggcatggacggcttcgaactatgccgccgcagcaaggcggaactgctcacctgccacatcccgttcctgctgctcacggccaagggcgacgaggagaaccgcgccgaggggtattcggcaggcgcagacgggtatatcgccaagccgttcagcatcaatacgctgcgcacgcgggtcaactcgctcatcgagcagcgcatcaaactgcgcgaacgataccgccagaagctgctcaccgacccttcggaaatccagatcgaatcggaaaacgacaagttcatcgacacgctggtcaaggccatcgaacagaatatcgacaactccgaattcggcatacaggagctgtgcgagatttcgcgttactcctaccagcaggtttaccgcaaggtcaaggcgctcaccggggagtcgatcaacgaattcatccgcaccgtgcggctcaaacgggcggcgcaatacctcgcgcaaagcgacacccgcatctcggagatcatgtacagcgtagggttcaactcacactcctattttaccaaatgcttccgcgagcatttcgggctttcgcccaaggagtatgccgaaaaacaccgcaggaaatagcccgaacccgcagggacagagaggcggccggacacggatccggccgcttttccgtttccagcccccgcacgggatcaagacgcatggcccctccggccgggcagggaaggcaaatggcggaaacgtaatagtatttgataattccgggataatttaagtcaggcgggcggactatttttgttataccgtaccacgggagaaacaacctaaacctgataaactatgaaacaatccttactcatttgtgccgcggcggcgctcctggccggaagttcctgctcggagcaggaacccttcgacgccgcgatgcccgtccggctcagcgtcgcaggcatcagcccgggaagccgggcggcggcgaactacgcggcggacgactacttcggccttcggggaatggccggggcctcggtaagcgtaaaggcccggacaacgacctatatctatgcggacgggacattggcgggcgccaccccggacgacgtgctctacttcccggtggacggaagcgccctgtcctccgtcaaggtatactggccggaggaggccgtacgccaggcacagggcggcgccatcgccaaagaccagcgggagaaggaagcgttcctcgccgcggactggctttcggccgagctgaaggaggtcgccccagcgcaggccgtcgccctgacactggggcacgaacggccgaagctcacattcacgctcgccggcacgatgtcgggcagcaggatcacggcgctctcggtcgccgggtacgatgcctactgtgaccctcagaccggtgatgcccagttgattatgctgccgggtaatacggaaatagcccccgaagccatcggcacggtcaccatcggtggccaggagcgtccccggaacttcgtcgtcaagacgatgccggccctcaaagcgggggaaaaccacacgatcgagatcaatttctaatataaaagagcctatcatgaaacgacatatcctctatctggccatgctcgcactgggcacggcagcgacaggatgctccgacgacgacaccgcaaaggagggccggacggagcctacgacggtggaaagcatctccatccgcacccaaatggccgaggtttcacgcgcccaaaccggagacgacgacccgacgatgggcccggcatcgacccgtgcggggcacacgatgacggtgacgctcggcagcggcagcgaacgcatgcaggccacgtatgaatacgacggcggcaaatggatccccgccggagaggcggtcgtattccccgacaacaagcgccagcccgtcgggatcatcctcaggaaggagggcacggccatccaggacggtacggcgcagggacttatcgacgccgaccagctggggtgggacaaccctgcccaggtaccgctgcgggagatggccaacgtcccgatgcggcacctgaagaccatggtggaattcgaactgggcacgatcgccgccacggcactcacggtcgacggcctcaaagcctgccacgtcgggaacggcaacaaatggcaggcgatcatcgagccgtcgacacccgggttcagggtttcggtcacggtcaacaacaccgtcagcacgacggaggtcagcgcggcggcatcccccaccgacggggtgttcctggccgattaccgctacacggtaccattggtattgaacggcagcgaactgacgctgggaaccatcggcgtgggcagttgggacgaaggagccgggggtacggcccagggcatgaccccgacgcattaccggatcgaagggctggaaaaccgcaccatcgaagtttacctggccgggtcggacagccccacgcagatcaccctcgatgcaaagggcgaggccatgcagcaggccggggttccggtcggcatcgtcgccaggatcgcctgcgacggtacgcaatacgagatcgggcgggaggagagcagccagatcagcctccggatcgtcgacgggaaagtagccttccgcgaggcggacgacaagggcttcatccccgtcaacacgatcgccgaactgaagatgatcgacctcgacgacgccagccgggggcgcaaatacctccagcagggcaacatcgacctgctcgacgccgagtggacgccgatctcgaaactggagggcatctatgacggcggcaacttcaccgtcgcccgcctcagggtttcgctcgggaacggcaatgccgggctcttcgcagccaacggcgggacgatccgcaacgtcgtgatcgcctcggccagcgcactcagggggcagtggcatgcaggcatggtctgcggtgagaacacgggaacgatcgagcgatgcaccaaccgcgcatcggtgactgacggcggcagcaacacgctgggcggcatctgcgggtacaacaacaacggcaccatatcggagtgcctgaacacaggcacgctgaccatcgacgccaccgtaccgtcggacggcacgggcggcatcgtcggctactgcggcaaagggacgatcacgggctgcggcaacacgggcggcatcggcggcaaacccagcaagacgggcggcatcgcggggcaggccgacgactgccagatcgccgactgctacaacacgggcgacctcgtcctgccgtggggcgcaggcgacaacaacggcggcatcgcggggctcacctacaatgccacgctcatcacgcgctgctacaatacgggcaccgtcacggtcgaagggtcgcaggccgggggtatctgcggccagctcaacgccggggcgacgatcagctcatgctacaatgcgggcaaggtgggcgccaagtggaattcgggcggcatcgcgggtcaaagcaccgacgccgagatcatcgcctgccacaacgacgggctgatagagagccagacctcgggatgggccggggcaggcggcatctgcgggttccacaagggaaccatcacggcctgctaccacatcgggcaggtgacgggcgacagtgccatcggggcgatcgtcggcgagcacaattcgggcaacatctcctactgctactggaacggcgacctggaaggtatcccggcaggcggcggaggcagccagaccggaaatgcgaaattcggcgccgcatggccccagccctcgacgcatgaggcatggcgaaccacggccgacaccccggccgcctattggcggacgctgggcagcgcgggcggcggctaccccaaactcgcctgggaaaaataacgcggcacggcaccccggccttctcgcaggccggggtgtacgggatttaacctatatttgaaaacggaacgaaaccaacaaaaacccgaaccatgatcaagacacgctttatcgttgcaataggcctgctgatgacactggcctgctgctccaactccggaaccgaccagacccccgaccccaacccgcccacgccgccgacgccacccgcgacgggggattacgtatcggtacaaaacgggaaaatatatgcgcccgacggcggggagctctcgttatggggcgtcaacttccagccctgcctgagctgggaatacaacgaccgcctcaagaggcacgggataccccaaacggccgaggcgctcaggcgcgtggccgaaaacaacctcgaagaggtgaccaaactcaaagtttcggtcatccgctgccacctgacacccgccgatttcaccgatgcggagggaaacctggtcgaaacgccctacctggacgtgctggactacatggtcgccgaagctgccgaacggggcatttacattacgctggcccttatcaaccacatgggcagcggctacgtgcccaattcggtattcatgaccgccgcccgccaggagtgggtacacgacaaggaggtcgtccggaaatcgaaaaactacgtccgccagctgctcacgcgcaaaaacaactattcggggacgacctatgcggctgagaaacacatcgccctgtgggagctgatcaacgaacccgaagccttcagctatacggacatacagtccaaccccgccgcctacgccgatttccagtcctgggcggccggcaacgggcagcaggacaacgacgcttcgtatgcgctcttccggcaggaactcatccgggattatatcgacggcatgtacgacgtcatccgggaggccggggcgcagcagcccgtcgtctggagccacaactggcaccgttaccgcaacggcaacccggatattttcaaaggcgccctcgcctcgaaggccgaagccgtggcctgctgcaactatccggggcaggatctcgtgccgcagaactactggagcaatcccaaagacctcacgtcgcaggattattcgggctggttcaaccagtatttcgacgacgtgaatggctacgggtggatgacgctccccgaatacgccggcaaggcgaagaccgtctacgagttcgagaccttcttcaaccaaagcgcctatctctaccccatacaggcgcagtatttccgggcgctgggcgtgcagtgcgcctcgatgtggacgtataccatgcaggaatacgccccctaccactgcggttcgcatttcctgagcctcacgtgcacgccgaaaaaagccgccagcttcatcgtggcgggcgaaatctacaaatccaccccgctgggacaaatgtatgaccgtttggtcaacgaacaactgggcagcaacttcgccatctcgaaaagccgcgacgtgagcatcttctcctcgccggaaaaattctaccactcgggcgacgtgacgcaatggtgcccgctcaatgtcagcgacggggtcaggagcatcgtcggcataggcagttcgccgctggtgacttacacaggaacgggcatctacttcatcgacgagcaggacggcgaactgttcgtcacgctggaacccaaccaccgatggctccgggagccgtgggacagccgactgcagacgaaggtcagcgcgctcgactacgacacgccgaacacgatgagcatcgggctcaaggcgtggaaagagggtaaatatacgctctaccgcatctcggacggcaggcggcagaaggcaggcgtcctcgacgggctcggcgggatgtcgctcacgcccggcgactatgtgatcgtgcgcggggaagagtaaacgccgggatcgtgccgggcttgcggcaggagtgtgccaccaccttgcggcacacttcgtcgggagcccggcaaagacccggcggaattccggcagaggctcggcaaaaggccgtcagaagcttggtatagactgggcaaaatgccctcagaagcccttcgggaactcggcgccgacccatcagaggccgatatgcttgatccgggtctcgaaatcgctgcgtgaaccgagggccgaattgcgcagcttggtgcggtaggtatagaccgtcgccgaagcacagttgaggaaaccggcgatgcggccgctgtcggtaatgccgaggcgcatgacggccaggatacgcagctcggtagggagcgtccggtcggcccgcacggggaaccgcgccggctcctcgagcagcgcattgacctgttcgacgaaatcgggaaagatacccaggaaggtctcatcgaagatccggtagaaatcgcggtagtcgcggtcgacgtccgacggcgagcgcagcttgcgcatcagcgcctcggagccttcggactttgcggttttgagcagctcgccccggtattcgccgacccggccgaggtactgcgtggccaggagcatgtagcggaacacatagttgtccttgatcttgttggcgtcgcgcaggcagtcgttcagttgccggaactgttcgttgcgttcgctgagctgggcattgaccgcggaaagctgggcgttggtgcgccgctgcctggcatgttgccgcagggtatggatgagcagcagcacgatgatgacgaacagccccatgaaaatgttgatcatgacggtcaggatacggctgcgcgaattgatgctgtaaacgacggcctgattgatgatcatctcggcctggctggagtggaggatacgggtgttgtaattacaggcaagcatgtcggccatcgtacactggatatagcgcgccgcacgctccatatcctgctgctcgaacatcagcagggctaggttatagagggaaaggtactccctgacaggagtttgaaggtcgcagatcgccgccgtggcgagccagtacttgtgttgttcgacgtcaccgagcagataataggcgttggcaatgttgtaggcgatgcgggccagcgtgcggctattgtatttcgcgggatcgtaaagcggcagcaaaacctccagggcttcgtcataacggttcagatccatcagttcgagggcatacatccgctgccgcgtgacacgggagtggccgtcgaaaccgatccgtgtgtggcggagcctgaaaagcgaatcggcataggccttccgccgcgcctccgacccgtcgcccgaggcgagccgcccgaagaccaccatctgctgggtataatagctggcccgcatccgccgggtgatgccgaccgtatcgagggaaaggatccgttcgtaggcctcttcgatgttgttgcgggcgatcagcaccgaaacatcgcaggtcgtcgaaaggaatttcatctcccggctgccggtcgcgtcggcgtaattgtgcatcagccccgcgtaacgggcggccgtgtcgatattgtaggtgatataggaatcgaacaggcggttggccgtctgccaccgcagcgtgtcgtcgcccgcggcgcggagctcccggcgcaacgaatcggcatggcggacgaaacgctcctcatagagatgctttttcgcaataacccgatccagtttatcgaatatctgctcgttttcgctcttatggcacgcacagagcagggctacaccggccataaaaacaaggcgggggggggaaatgttcagctttctcatcggctcgacggtttggatacaaatttacaaaaaaaacggttcccgcgtccgtggtggacacgcgaaccgcctcccgggcaccggctccgggcggattatccgaaaatttcgatcttcacctccttgcggatgtccgtcgacggcacctctaccaccggacacctcagttgcccgtcgaacgcaggcttcaccgtgcggccgttgaccttcacccggcggaactccccggcggcgggcagctggagccggtaggcgcggcgcggctcctgcccccggtagctgccggcggcgggacggacggtgacggtcgtcacatcgcccgcacggcggtagttgagctctgtggtggcatggatgccgcgttcgtaatcgcggctaagcccgtcgtcctcgtagagcgtataggtattgtcggcatcgcccgccgaggggtaaacgcgcaggacgagcgtcgtgagcggcgtcgaagcggggcgcggcgtataaggctgcatcggcagcacccaaccgccccggacgtagagcgggaactcttcgagcggcttggcgatgcggcattcctgcccgccgtcgaaccgttcgtgggtgaaatagtcgtaccacacgtcgccggccgggaaccagaccttctgcgaggctgtcttgtccgcgccttcgcccggcgaagcgatcggggcggcgagcaggatatccccgaaaaggaactcctgttcgttttcatacgcgcgttcgtcgctgccgtagtcgatatacatcggccggttgagcggcaccatcgtcgagtgggtctgccatacgctgctgtaaatatagggcatcagctccgagcgcatgtggtacatgcggcgcatggcggctgtttcgcgctcgccgctgatccacggacggcggtcgagccgcgcgtctttggtcgaatgtacgcgcagagcggccgagagggcgccgaactgcgtccagcgcaccgtcagctcggggttcggatcgccgcggaacccgccgatatcatgcgcccagtagtaacagcccgcgttgccgctggcagccgtgagcttaacctcgaaagccagcatttcccagttggcctgcgcgtcgcccgagaactggatcggatggcgatggtcaccccaacccgcccaacggctgtaaccggcgccgcgcagccccttgcgctcggtctggcgatagtagagctcgttgatccactgcaacgacgtggagcggtagccgcgcacctcgggatagaggtagttctgctgccagtcgagccaccagaaatcggcgcccatatcctcggtggcatggtgcgcatgtttgaaaaacgtctccatgtatttccggtcgccgaggtcgaaaagcagcggatgggcggggtcggcccccatgtccgccataaaggcggcgtacatctcctcgtggggacgtatgccgtcgtggggatggtcgttgagcgacacggtgacgccgcggcggtgcacctcggcgatcagcgccccgggatcgggaatgcgtttgcgctcccacgtatagcccgtccagctgcggctgccggcatgcccggtaccgatcttggcatcgtaagtatgccaacccatgtcgaagacaaggttgtcgagcgggaaatcgttctcctcgtagccgtcgatgatcgaaaggaactcctccgacgtatagtcccagtaacggcagtaccagacgccgtggatgtatttgcgggtcatgggaacgcggccgctgatggcgcccaggtcggcaagggcggccttgtagttgttgccgtagacgaaacagtactgatcctgcacatggcttttcgtatcgcgcgggcaaagccagccgtcgaccagcaggtcggagcgttcgtcgtcgatcacataccagccgtcgcggctcagcaggccgttctgcatggggatctccccggtaacgcggtcgagcgtctcgaccgggccgccgaggttgttgcggaaaatacagcggttggtgaacttcttctccttgccgttgagcttgtagtaggccgcaaagttatgcagcccgaacgggaatccgtcgtgttcgtagacgatgcgcagggccgaggtggtgatctcgtagcggttcccgcccagctcccgcaccctgaactccgacgcggggagcaggctgccccggtcgtaagcgaaataggtggggtcgtcgatgaatttgccgtcgtgggcgaattcgaggcggaacagcgtcggagtgatgagcgtcaggcggttctcaccgaaaacgagcgggttgcccgaaggctgtgcgacggcggaaaacccgccgcacaggaagagcagaaaaatcagaaaaggatgtttcatgatcgggatatggttgaaaaattctccgcaccgtcggaacgggcagtgcggagaaacgtgtttgcgaaaaatgggtctattcgttgcggatgctctcggtatatacgttcccgtaggggtcggaagccctcaccgtgaccgttccccaagactccgacgcgggtttgtagtagaacatgtggtcgttctgggattcgggttcggccgtcggacggtgctcgggtttggtgtcgccgaacatgaaatcgtaggcgcggcgatccatttcgtacctgaggttcgaatcggacggaagcgttacccagccggcattatcctcctgcacctcgaccgtccaggtggtatgccagttgaagatgtttaggatgaggccgtcgcggtatttttcggaaaccgcctcgccggggccatagaggtacatctggtattcgcgcgggaaagcagtgcccttatagtaccagttcctgatccggttgccctcgatctcatagacggcgtaaccgcgggggctgccgtcgttgcacagctcctcgccgttccagtaggcacccatcaccgctccgagcgtattctcctcgatggtttcggaaatcgtggtcgtatagttgttgtgcgagtgtcccgaaagtatccggacattatagccgtcgagcagggcgtaaagctccttgtaatcggcgacatggctcgtgggacggttgcggcgcgaagtggcgatatgcaggccgatgatgatgagcttgtccttggggacatatttcagatcctgctccagccatgccatctgttcgtccgtgatgtcagcggtataagaggacgagccggtgtagagcacgtcgtcgagcacgatgaaatgacagtcgccgatgttgtaggagtagtacgtgggaccgaacgccgcctcgaagctggcatcggcatcggcatcgacggttatggctttattgtgatcgtggttgccgatgacctggaaaacgggcacgccgatctttcggatacgctgcttgtaaacctcgtggaagggcatgttgtcccagaccaggtcgcccagcgaaatgccgtaaacgggggcctccagttcctgctgcacgtaagggatcagcaggggcaacacctcctcgtcgagcatcgtcacctcgtcgtcgcggccgatctgcacgtcggccagcgccagcagggtgaaacgctcttttttgcccgtgcgttcgagcttgaagctgcgctgcacgacgtcgttgtcgcccatggcgatcttcttatagatcttcggcatgccgttctccaccggaatttcgtattcggcggggacggagacgaatacgaacggggcgttccgcttcacacgcatctggtagatgccctgggcgtcggtggtcgtcaccgtgacgccgtcgctcacgaccacgccctcgatcgggccggcaccgtcggtgacacggcccacgaggttcatgccgggctcgggggtgatgtccaccttttcgtagaggccgccgagaatctgggcgccttcgtcctcgctgcaagccacgaagccggtggccagcaggaagaccaacagatatttgatgtattttatcattttttcggttttttaaaattcatatcttgccccggggccccggacaggcgggatcccccgggatcgccggggatcagtaaccggggttctgctcgatcaggttgttggccgagatcgccgagttggggatcgggaacaggtttttgttcttgtcgttgagcggcgtatgatcccaccaggattccgtcacgaacttgtcccagcggatcagatccgtacggcggcgtccttcgcccaggaattcgatcatccattcgtcgagcatacggtattcgtcgaggttgtcggccgtcacggggttgggatccgcgctgccctcgaagttgcgcccgcgaacctggttgatcaggccggcagccgtcttcttgtcaccggcacgcagctcgcactcggcaagcatgtagtagatctccgagaggcggatgaccgggcaatcgggattccagcgcagcagcttgtcgtcgaggttgggctgcggcgccttcaccaggcgtacgcccgaattctcctcgccgtcggccatcgtcgaggtaagctcggcgacggaattgtatttggtgcccacttccgagaaacgggcgacctggtcgaccaagttgatcaccttgccgctatactccttctgccccaggcactgctgggaagggttgttggggttggtctggtcgccgacgaggaacatgccttcgtatttgcggctacccaggtaacggtagggcttttttcgcaagtccttgtcgttgaatttctggtagggattgcccagtttccactgcgtgtagtagcgtccctggggatcgagcgacggcgtgagcatgaaaccgttgtagcctgcggtctcgataccgaaatattcgtaggatgaataatggtagaaatatttgaaataccagttccactcgactttggagttctccgaaggcaccgtccagatcacctcgggcgaggtgttgttgtcgaaacagtgggggccgtaccaggtcttgtccagctcgtaggtgccgtagacaccgccgatgatgtcgcggcaaatctctgcgcactcgtcgaaatgctcctcgccgatgtaggccaccgcattgaaatagagctgggccagcagcgccgcggcggcagcctgcttgatgtaaccgtcttcggaagccccgagcgtcgttttcttcgacagggcgggaatggcgtccttgagcagggtttcgatatgggcgtaggtctcgcgcgccgtgctgcgggcgcacaggtcgtcgtccaccgagtagtaaatgggcatgccgccgaaatagtcgaggccgcgcatgtagaagtaggccgtgatggcattcagctggttgatgtggtcggccttgacggcgtcgttgagcccgatggcgttgtaatcgaccccctggaggtcggacttggcttccagggcacgcgaaatacccccggtcgtaccgtcgtaggtattgacgacgaagcggtcgtcgggcgaccaggtgtggtaatgcaggcggtagtactcgccgctgttataccagtcgctgccgcgcttggggcacaccatctcgtcggtggtcagctcctggaggtaccaccggtcggcaccgatgtaccatttccagtgggtgaagggacggcaaagcacggcataggtgctttcgggcgaggtgaagaacgtatcgggggtgacttccgagtagaacttctcgtcgaggtcgcaggaaggcgcgcagagggcggcagccccgaccgtcacggcaattatatgtttcagtttcataatggttctcggtttggaattagaagtttaactgcacgcccagcgtaaaacgggtcgtctgcgggtacatcgtcgaggtgtcgttgacatactcgaaaccggggtacaggccgttgatgttgacctcgggattgaggccgttgtagtcggtgaatacggccacgtcgcggatggtcaggtaaagtttcgcagactggatataacgcgtccatttccgcaggttgaacgtatacccgaggttgatggcgtcgatcttgaggaacgagccgtcgtcgagccagtagtcgcagaggatcttctcgtccttgatgttgcggttgcgcgtgtaggccgacttgaggacgttgagctgcgaatcgttggccaggccgtagtacatgttcacctggctgaagacatcgtacccgagccagctgcgcaggaagatcgacagatcccagttcttgtacttgaacgtgtgatcccacgagaggatgaccttggggatcgcattgcccacgaaatgtttgttctcggccacgaggttcgacgtgctgccgtcggtggccggcacgatctcgttgttcttgtcgtagatcagccacttgccgttctcgtcgagcccggcgtacttgtagatgaagtactgccccagctcgaggccgttctgcaggcggactgccgtacccgggttgcccggcgaggggaacttcacttcgtcgaggaagaacccgtcgtcgcccatgctcttgatcttggtcttgttatgcgacagacgcagggtcgacgtatagcggaaattcttgctgcggacgatgtccccgcccagttcgaactcccaacccctgttctcgaggctgccgatgttcttcatcacctcgtcgtgtaccatcggaggcatcggggcgttggccaaatagagcatgtcgtcgacctggcggaagtagaggtcgaacttaccccagaggcggtcgttgaaaagcgagaagtcgagaccgaagttgagctcggatttctcctcccacttcaggtcggggttgatattgcggatcgaaccgtaaccgggctgccagaccccgttggtgggccacatgtcgttggctttgtacatgcgggtcgtgtagccgttcccgaagccgttgttacccgtgacgccgtaacccaggcgcaccttgaggtcgctgatccagccgacgtcgcgcatgaacgcttcgttcgagagacgccagccgcccgaaacggcccagaaattaccccaacggttgttcacgccgaacttcgaggaaccctcgcggcggaagctcaccgtagccatgtaacggtctttatacgaatagttggcacgcccgaacatcgagagcaggcgctcgcggggatccttgttcgaatccatcgaggcacggccgtccgtgaggtacgaacccacgcccatgtcccacgggccgacgccgtcgaccgggaagtcgtagttcgacatgctgaaatcctcgccgcccgcctgccagaagctgtaaccggccacgacgtcgagcgtatggtcttcgcggaatacgcggtggtagttggcataggcctcgaccgaaacgcggttgtccttgctgaacttgtgcgacgcaccgccgcggcggctgttgtcgatcgactccttgtggtcatgcgaaacgtaggtatattcctggtactggcgtttgtcgatacccacggttccctgcagcgagaggcccttcatcaggttgatcttcacagtggcgtcagccagcagccactggtctttgccgttcttcgtgcgcagcatgatgtcggccacgggattgaaggtcgtgccggagatgccgttgccgaccacgttgtacttggaagggttggccgggtcgtaaagcggaatggtgggattgaggccgaaggccatcttgaagatgcccgacgagttgcggttgtcgcgctcggcctcgcggaactgggcgttggcgcgcacctcgaccacgccgtcgaagaggttgaaccgggcgttgacacgtcccgaatagtccttgcggttgtcgccgatgacgatacccttctggttctgggccatgaacgaagtatagacctgggccacctccgtaccgccggcaatgctcaccgtatggcgctgcgaaaagggcgcatcattggtcagttccttataccagtcggtatcggcgccgtagtcctcgcccaggccgtactcgatatactcgctcgacgagagcagctcggggtacttgcggacggtctcgaacgagaactcgcccgtatagttggccgtcacgctgccctgcttggcgcgtttggtcgtaatgaggatcacaccgccggcggcacgcgtaccgtagatcgcacccgccgaagcatccttcagcacgtcgatcgactcgatgtcctcctggttgatcgcccgcatgtcaccgcccgggatgccgtcgataaccacgagcgggctctggctggcattgaccgacgcgatgccgcgcagctggaaatcattgctgctgttggggctggcgctgcccgagatggtaagtcccggaaccttgccctggagcgccgtggcgatggtcgaacctcccatgccggccgtcaggtcatcgcccttgatcgaggtgatggacgaagtcaccgacttcttttccatcgtaccgtaaccgatcaccacgacgtccttgagtacctggctgtcgtcttccatgacgatgtcgatgaccgaacgcgccccgacattcacggtctgctcggcatagccgatgaacgagaatttcagctggctgtctgccgcggcattgatcgtgtaacttccgtcgatgcccgtggtcgtacccgtcgtcgtgccgaccaccaccacggtggcgccgatcagcggctcgccggccgtgtcggtcaccttgccgctcacctgattgcggctttgcgcctgtgaggacaacgcagacgccgtcagcaccaggcagaacacgaaacgcagaaaataccctgcataggatttccccgtatctgcaaatctgtttttcatatctttttctctcttgtttttcattgatttgtcaccgcaggactattcggctgcgattttcgtcatcttgacattgtcgaggtaccagcagtaataacccgataatccctgctgggtggagcggatgacgacccgggtttcacccgtaatcccgtaaagcttcacgctcataggtgtccattcccaatgctctccgggtgtcatcggctcgctctcttttccctgatcgccgtttatgctgccggggccctcgagaatggcgactgtgacggttaccgcgtcgggcttgcccgtaccgtcaccgccgatattcgatgcggccacgaacgtcagttcaatatcagtggcctgaccctcgggaatcgcaagagccggcaggatgattccggtctgcttgtcgcctgcacccattttgagataatccgagcaggcgtaaatcgtccgtacatcgggattgaaatcggtcagcccggcatcggaaaacactttgtctactacatatttaccgttcacctccgagtagatattgaccgctcccttctgtgtatgttcgcccacgcagtcggtacctttgaacttcgaagtccagtcgaacggctcgtcataatagacatagccgacctccttgccgtcgtcgtcgaagagcgagttcttcgcattctgggcgacccggacaacggtctccaggccggtgagcgaggtcagtatcttcacctctccgttgcggggcgcacccgtggtgttctcgcccacggtgagcgtcacctcggtctggcccgcatcgcccgaagccgggctgggcgtcagccagccgtcggactccgccgtccatgcctcggccgccgtgacggtgaaggtaagcggcgtgcgatcctcgtcggcaaatccgaacttattgacggaaaagctgttgacggaaaccttcagtccttcgagattctgggtgacggtgacggtcgccgttttcgaatcggccgtaacggtgaacgtacccgtacgtactccatcggtcgtattctgggcgatatccaggtcgatgctctcgtctccgggagcacccgaagtcttgacaggggagatccacttgctgtcgtcggcgacggatatttcccagtcgcagttggtggagatgaagatcgcagccttctcgccggtttcgagcagacccgatttcacgacggtgatcttcgccggcgtaacggaaagtgcatcgaccttgagtttctgtgtcacggctatcgtacggcgcgtgccgccgtcgccttcgaagatgatgaaaccggtgcgatcctcgcccgtattgttctcgtcgatggagaggaaaatacgcacgcggccgcggtcgccttcggtatgggtgaggtggatccactcctcgacataggtggcccgccacgagcggttcgtacccaattcgaaattgaccatttccccttcggtggtgaggcccgtgtattcgacttcgatctcctggcgggtaaccgagaggaacgcgtcgggatcagcgtcgtcgcaccccgcaaaaccgaggcccgagacgagcagcagggcggatgcggccctgaataacatatgcttgaaattcatgttggttctgtttatgattatggacacctgttagtcgcggggagccttgaccatcttaatgttgtcgaggtaccagcggtgatagcccgacacaccgaactgggtggagcggataacgatccgcgagcggtcagtaacgccgtagagcgtgactttcatgctcacccactggttccacgagctaacgctcgacatggaaagcgacgcgctctgtttcacagaggggctgtcgaccgttccggggccttcgtaaacctcgacggtcaccgccgtgtcgtcgataccgcgcagcgttatgccgctgcccgtaccgtcaatcgaaacgaccggagccgcgtcgaacgtcagggtaatcgtggacgacttgcctttctggatatatttgcccatgtcgatggccaggccgttctgctgatccttcttacccatcttgaagtagtgcttggccatgtagaaggcattgccgccgtaattgtactcgctgtaccccatctgcgtaaatttgagcttggccgcagcatggttgcgcacggcctgcgtggagccctggtcggggaactgcacctgatcctggccgccgaactgctcgcaccacgaaaggtcgtcgtcgagataaacatggtcgatttccagcccgtcgtcggtatcgggggcaagcgtctgggtcacggttacggtttcggaaagcccgccgctcacgacggcgaggtgccccacacggatagcttccgtctcgttgggcttgacatcaaggacgaccgacacacggcctttcccggtaggtttgtcgaccgaaagccaatccgcatcggaggtaatggcatacccccggttggccagcacatccagcgtcgctttcgaccccgtactcagcgtaccggttcggataacctctacgctgactttacttacggtgagtctggctgccgcatcttccgctttgtcctcgacacaggacggaaaacaacaggcacaacccatcagaagcaacaagtgtaaaaatgttttcttcatagattagcaggtttagtttgtgatattatggattaggattttttaaaaaaattacaaatcgcaagtcaggaacactgcgcagcaacaaaagtatccattttaaaggggcaggtaaagagtaacgaccgataatatagaaattaaaatttcttatcttattgataataattattttataaatacaccatacagaatgttatatagattcgggaaggccgaaaccggcataaacgaggcgattcagcaccggtttcaggccggatcgaagcacggattccgcagtttccgtctttttttcggatttcgcatcgaaataaatcgaaacaaaacgatacatccgccgatccggcagccgggaatccggcgacggccgccggacaaggaaacggtaaaccgaggaaaccgggacgcggggaaaaccgggatgcggaaaaagccaggacacgagagccgaacggaggctgccggatacagccctctttccggacaacccgggcgcacagaaccctcggagcatcccggatggcccgagtacctcaactttccaggcgacgcaggacactccggggacaccaatcttcgggacaacccggactcgggcaggcacggccgacccgaaatgcaggcgcccatgcaacacccggcacacacggagtcgcatcgcgcaggtgcggacgcggcgggcatccggtaaaaatggtagcatgaaccgtaatcggggtaacagatagtaggtcaggacatattatctttgcatcgtggaaacggccgtttccccgaaaggcggggagcggagggacttgcgacacgaacgaacatgacaaaagaacaaaagacacaggctatcgaattgttattcgcagaaaaatgctcgtgcgtaatccgcaacggggattcgatgcggatattccgcgaacggggcgtggccgacctcttccggctgctgcacgaagagccgcaactgctgcggggcgctttcatcgcggacaaggtcgtcggcaaaggcgccgcggcgctgatggtactgggcggcgtggaagggcttttcgccgacgtggtgagccgcccggcgttagagctgctcgccggagccggcatcgcggtggaatacacggtcgtggtgcccggcatcatgaaccgcgccgggacgggcacctgccccgtggaacagctttgcgccggggcggagacggccgccgagtgcctgccgttgatcgaagggttcatgcagaaaatgaaggaacgacatggataggttaatgaaaaaattgggtttgctgtcgctctgcacggggctgtcactcgcagtacacgccgtgacgccgcaggcggaagcccctgcggagcaaaacgtgaagatcgactcggtcgtcgtgacgggggcgcgctatgcgtcggacatccgccacctgccgatgaccgtgtcggtggtcggccgggagaagatcgaacaaagcttgcagccttcactgctgccgaccctgaccgagcaggtgccggggctgttcaccaccgcacgcgggatcatgggctacggcgtgtcggacggcgccgcgggaggcatctccctgcgcgggctgagcggaggctcggggcggctgatggtgctcatcgacgggcacccgcagtacatggggctgatggggcacccgatcgccgatgcctaccagtcgctgatggccgaacgggtcgaagtgctgcgcggcccggcatcggtgctctacggttcgaacgcgatgggcggcgtggtgaacatcgtcacccgcgggatgcgcgaggacggcgtgaagacccatgccgacatcggctacggctcctataacacattgcagacggaagcgacgaaccgcatccgcaagggacgtttcacgtcggtggtcagcggctcgtacaaccgcaccgacgggcaccgcgccgacatgggattcgagcagtacggcggttatgccaagctgggctatgagatttcgcaggcgtggaacgtgcgggccgacgtcaatgtgacgcacttcaacgcctcgcagcccggggcggtgaccaacccgatggccgatgccgaccaacgcatcacacgcggcatgacttcgctctccgtggagaacaactacggccggacttccggggccctgagcctcttctacaactggggccgccaccggatcaacgacggctacacggtcgaccccaacgacacgaacaatccgaaagattaccgcttcaactcacgggacgacatgatgggcgtatcgtggtaccagagcgcccggcttttcaggggcaaccggctgaccgtcggcgcggactactaccgcttcggaggcgaggcgtggaacagatacgtcgagggcgaccgcaagggcgagcgctccgacatcgccgacaagtcgcaggacgaggtggccggctacgtcgatttccggcaggacatcgggggctggctgaccttcgacgccgggctgcgcgtcgaccaccattcgcacatcgggacggagtggatcccgcaggcggggctttcgttccacctgccgcacgccatcgagctgaaggcttcggcctcgaagggtttccgctaccccaccatccgcgagatgtatatgttcccgccgcagaaccccgacctgaaacccgagcggatgtggaactacgaggtggcctattcgcagcggctgctcggcgggcggctcacctacggcatcaacctcttctacatagacggcgaaaacctgatcgtcgccgtgccgcgcgaggggacgacgccgctgaacatgaacaccgggaagatcgacaacgccggcgtcgaggcacaggccgcctaccgcatttcggaggcctggtcggtcgccgccaattacagttacctgcacatggagaaccccgtgatcgccgcaccggagcacaagctctacgccgaggccgggttcgcccggggccgctggtcggtgagcacgggcgtacagtacgtcgcggggctctacacttcggtaaaggccaacggccggggcacggagaacaccgaagatttcgtgctgtggaacctgcgggcgtcgctgcgcgtgagccgctgccttacgctgttcgcccggggcgaaaacctgctggcgcagcgctacgagataaacgccggataccccatgccgcgggcgaccttcatcggcggcatacgcctggatttttaaatacgggcggaaaacactatttttgacataaccaataacgacaatatggaaacaacggctgtaaaactctattcgacgggctaccgcgaggcgaagacctacctcgcggcggcgctcttcgtggcaggcaacatcgtcctgccccaaatctgccacctcgtgccgcagggcggcctgcggtggctgccgatctatttcttcacgctggtcggcgcctacaaatacggctggcgggtgggtctgctgaccgccctgctctcgccggcggtgaactcggcgctgttcggcatgcccgcagcggcgatgctgcccgtgatcctgctcaaatcggtgctactggccgtcgccgcaagcctcgcagcacggcgggcggggcgcgtaacgctgcccctgctggcgggcgtcgtcctcttttaccagctgttcggctcgctgggcgaatgggcctggacaggctcggcggaagccgccctgcaggacatccgcatcgggctccccggtatgctggcgcaggtatttgcaggatacgcagtgctccggtacctattacgtaattaacaatcccaagagatgacaaaaatgtatatggtttcgttattgtcaatcctgcctttcacggccccggcctgcggatcggcacagggcggcggagaagcgcccgaggcacccaaggtctatttcgtgcgggacatcacgccggagaatatggtgcgcctgtacgaggcgctggagcgtccggcgacgggcaaggtggccgtgaaactctcgacaggggaacccggcgggcacaactttctcaagccggagcttatcaaggatctggtgcagaaggtgggcggcacgatcgtcgaatgcaataccgcctacggcggcggacgcgccagcacggaaaaccacctgaaggccgccgccgaccacggcttcacggccatcgccccggtggacatcatggatgccgaaggcgaggtaagcctgcccgtgaagggcggcaggcacctcagggagaacttcgtggggtcgcactaccccgcctatgatttcacggtggtgctctcgcacttcaaggggcacgccatgggcggcttcggcggtgcggtgaagaacatctcgatcggcatcgcctcgtcggcgggcaaggcgtggatacattcggccgggaagaccaagaatgccgcccagatgtggggcaacctgcccgcgcaggacgattttctggagtcgatggccgaggcggccaagtcggtggccgaccattgcggggaaaagatactctacatcaacgtgatgaacaacctatcggtggactgcgactgcgacgcgcaccccgaagacccgaagatgagcgacatcggcatcctggcctcgaccgacccggtggcgctggacaaggcatgcgtcgacctggtttacgcatcgacagacccgggcaaggtgcacctgatcgaacgcatggagtcgcgccacggcatccacacgctggaacacggcgaagcgatcgggctgggctcgcagcaatacgaactcgtggaactggaataggatggagtaccgcatactggggcgcaccggactgaaagtcggcgccatcgcactgggttgcgaggggttcgcggacaagacggccgaagaggtgcgcgccgatttcgatttcgccatccgcaacggcatcaacttcctcgacctttacgcctcgaaccccgagctgcgcagcaacatcggcgcagcgctggcgggcaggcgcgagaagttcgtcatacaggggcacctctgctcggtatgggaagaggggcagtacctgcgcacgcgcgatccggagaaatcgctggcggcgttcgaagacctgctcgcacggctgggaacggactatgtggagatcgggatgatccactacgtggacaccgaggccgacctgcgcgaggtgctcgacggcccgatcatgcgcctggcgcaacggctcaggtcggaagggcgcatccgccacatcggcctgagcagccacaaccccgtggtcgcgcacatggcggcccggacggggctcatcgacgtgctgatgttctcggtgaacccctgttacgacctgctgccgccgagcgacgacgtggatacgctctgggcggacgagagttacgcgcgggagctgcacaacatcgaccccgaacggcaacggctctacgaattctgcgaacgcgaagggatcgccatcgacgtgatgaaggcctacggcggaggcgacctgctgagcgacgccaactcgcccttcggacgcccgatgaccccggtacaatgcctcgaatacgccctgacgcgccccggcgtagcggccgtaatggccggctgccgcagccgcgccgagattgaagcggcactcggctggtgttcggccacggccgcggaacgcgactacacgggggcgctggccgggctggacaaattctcgtgggaagggcactgcatgtactgcgggcactgcgccccgtgttcggtgggaatcgacatcgccggtgtgaacaaatactacaacctgaccctggcacagcacgagataccggagacggtgcgcgaacattacaggctcctgccgcaccacgcctcggtgtgcatcgcctgcggccgctgcgaacggaactgcccgttcggcgtcgacatcatcggccacatgcggctggcggcggcgaaattcggatattagaatgacggaacgaatcatagcacaaagactcaggatcagcctcccgcaggtgcagggcacggtacgcctgctgcgcgaaggcgccacgatccccttcatcagccgctaccgcaaggaagcgaccggctcgctcgacgaattgcagatcggggcgatcaaggaacaactggacaggctcaccgaactggaagcccgcaggcagaccgtcctggcaaccatcgaggggcagggcaaactgaccggggagctcagcaaacggatcgaagagtgctgggacgcagtggagctggaggacatctacctgccctacaaacccaagcgccgcacacgcgccacggcggcccgcgaacgggggctggaaccgctggccgacatcgtcatggcacaacgggcacacgaccttctgcgtcaggcgcaacgcttcgtctcggccgaggtagcgacccccgaagaggccattgcaggagcctgcgacatcatcgccgagaggatatccgaggacgaacaggcccgcaacaccgtgcggcgcacgatgggacgcgaaggggcggtgcactcgaagctcgtgaagggcaaggaggccgagggagcgaagtattcggactacttcgacgccgcgtcgccgctgcgcagcatctcgtcgcaccggttcctggccatgcgtcgcggcgaagacgaggggatcctgcgcatctcgatcgacgccgacacggagcgcatcaccgaagcgctctgccgccggttcatacgtcccggatcggcaacgcgcacatatatggaggccgccgtggccgactcgctcaagcggctcatccgaccgtcgatagagaccgagctgctcgcggccgccaaggagaaggccgacgacgaggcgatcggggtattcgccgaaaacctgcggcagctgctcctttcggcgccgctggggcagaagcgcgtgattgccatcgaccccggattccgcacgggctgcaaagtcgtcgtcctggactcacagggcaacctcgtgcacaatacgaccatctacccgcacccgccgcagggccgctatgccgaagcggcggaaacgctgcgggcgctggcggggaaatacagggccgaggccttcgcaatcggcgacggtacggcggggcgcgaaaccgagcagttggtgcgcggcctgggactggacggagccgtggagatattcatggtcagcgaggacggcgcatcggtctactcggcgtcggccgcggcgcgcgaggagtttcccgattacgacgtgacggtgcgcggctcggtgagcatcggccggaggctgatcgacccgctctcggagctggtgaaaatcgaccccaagtcgatcggcgtcgggcaataccagcacagcgtcgaccagggaaaactcaaggccaggctcaatacggtggtcgaaagctgcgtaaacagggtcggggtgaacatcaacaccgcctcgaaacacatcctcacctatatttccggactggggccggcgctggcggagaacatcgtggcgtaccgcgccgcgaacggcgatttcaagaaccgcaaagaattgctcagggtgccgaggctgggcgccaaggcctacgaacaggccgcgggtttcctgcgcatcgtcggcgggcagaatccgctggacaacagcgccgtgcatcccgaatcgtatcatatcgtcgagcggatggccgccgacgcgggcgtgacggtcgacaggctgctcgccgacaaggagctgcgcaggggcatcaaacccgagagatacgtggacggacaggtcgggattccgaccgtgacggacatcgtcgaagcgctggacaagtgcggcctcgacccgcgcgaacagctgcaggccttctcgttcgacccgaacgtacatacgatcggcgacctgcgcgaagggatgacgctgccgggcatcgtcaccaacatcacggccttcggggctttcgtcgacatcgggatcaagcaggacgggctggtgcacatttcgcagatggccgaccgctacgtcgcctcgccggcggaggtcgtgcacctgggacagcaggtcgaggtgcgggtcaccgggatcgacaccgcccgcgggcggatttcgctctcgatgcgcaaataaagcggggagcgaacgggcgcggacaggcaggaggtttgatgctcaccgggttgcggacgggcgtcccggaaaaggaaatgcagggccggaatggccctgcattttttgtttacaatttgttcattaattgcccgcacgcatatttgcgatccgggaaagtatgtctacatttgttccggagcaaggttccccgccggcggctgccggcacgggatcaaaagggaactcctgtgagaatcaggggctattcccgtagctgtaagcctcgattgcgttccgcactctcttgagccactgtcccccgggacgggaaggcgtgcggatggggcgagccagaagacctgccttgcgagctgcgacatccgccttcgggatttagggcggtgcccggaacagattttacaccggacaattcaggggtaaggacatggctgtcctgcgtactgcgcaggcggggatgccgcctccgtacggcaagacttacaaacaaatacagatacattatgggcatttcggaaatttacatcgtcaagcgcgacggcaagcgcgcccccttttcgctcgagaagatcaaacgcgcgatcagcaaggcattcctttcggtaggcggatacgccaccgacgacgacctcacgtcggtactcagtcgcgtacatatctccgacggcatgaatgtcgaggagatacagaaccaggtcgaggtggcgctcatggccgaacgctatttcgctgtggccaagagctacatgctctaccgccagaagcacacagaggatcgcgaagaccgcgaaaaactcgaattcctgatcaactactgcgacgcctcgaaccccgcgacgggttcgaaatacgatgccaacgccaacgtcgagaacaagaacatcgccacgctgatcggcgaactgcccaaacagaacttcatccggctcaaccgtcggctgctgaccgaccgcatcaaggagatgtacggcaaggaactctcggacaaatacctccgcctgctgaaagaccacttcatctacaagaacgacgaaacgtcgatggccaactactgcgcttcgatcacgatgtacccgtggctgctgaacggcacgctctcggtgggcggcaactcgacgcgcccgaccaacctcaagtcgttctgcggcggcttcgtcaacatggtcttcatcgtatcgtcgatgctctcgggtgcctgcgccacgccggaattcctgatgtatatgaactatttcatcgaacaggagtacggagaagattactacaagcgggcggacgaggtggtcgacctctcgaaaaagcaccggacgatcgacaagatgattacggactgtttcgaacagatcgtctactcgatcaaccagcccacgggggcgcgtaacttccaggccgtattctggaacgtggcctattacgaccgctactatttcgaaagcttgttcggcgaattcgtattccccgacgggacgaagccgcactgggaatcgctatcgtggctgcaaaagcgtttcatgacgtggttcaaccgcgagcgcacgaagaccgtgctgaccttcccggtcgagacgatggccctgctgaccagggacggtgacgtgatggacaaggagtggggcgacatcacggcgcagatgtactccgaggggcactcgttcttcacctatatcagtgacaacgccgactcgctgtcgtcgtgctgccgcctgcgcaacgagatacaggacaacgggttcagctacacgctcggcgccggcggcgtatcgaccggttcgaagagcgtgctgacgatcaatctcaaccgctgcatccagtatgccgtgaagaacggcatgcactacctgacctacctcgaagagatcgtcgacctggtgcacaaagtgcagacagcctacaacgagaacctcaaggatttgcaggccaaggggatgctgcccctgttcgacgcaggctatatcaacctcgcgcgccagtacctcacgatcggtgtcaacgggctggtcgaggcggccgagttcctgggcatcccgatcaacgacaacgacgactacgtcggtttcgtacagggtgtactggggctgatcgagcgctacaacaagaagtaccgttcgaaggagctcatgttcaattgcgagatgatcccggccgagaacgtgggcgtgaaacacgccaaatgggatcgcgaggacggctacgtcgtaccgcgcgactgttacaactcctatttctatgtcgtcgaggacgaatcgctgaacgtgatcgacaagttccgactccacggccgccgttacatcgcccacctcacgggcggttcggcactgcacatgaacctcgaagatcacctttcgaaggagcagtaccgccacctgctgcgcgtagcggctgccgagggatgcaactatttcacgttcaacatccccaacacggtatgcaacgagtgcgggcacatcgacaagcgctacctgaaggagtgccccgagtgccacggcgacaacctggactacctgacgcgcgtgatcggctacatgaaacgggtgtcgaacttctcggccgcgcgccagaaggaggccgcacaccgctattacgccaaagcggagtaaacggacgatggtcagataccataatttcgacatcgtattcgcggaaataccctgcgaaacgacgctggcgatcaacatcaccaactgccccaaccgctgccgcgggtgccatagcccgcacttgcaggccgacatggggcgggtgctcgacgaggcggagctgtgcgggatactcgcccgctacgggcgctcggtgacctgcgtctgtttcatgggcggggacgccgcaccgcacgagatcgccgcgctggccgacgtcgtgcggcggaaattcccgatgctgcacacaggctggtattcgggacgcgcccggctgccggagggagtgcggccgcagtcgttcgactacatcaagctgggaggctgggtcgaggagctggggccgctgacgtcgccgacgaccaaccagcgcctttacagggtcggagcggacggcaccatgcaagacatcacggagctgtttcagcgcaggccgtaggtatttcaagggcgctccgggcaggctgcccgacacccgggaaacccggcacggcgaccgtacgggcatcacggtgtaattttttcggccccaacaatggcggtttgcccgaaatggactatttttgccctcgttatgaagaccagacaagagctgacggaaatcctcgacttcattgcggaatatgcgacttacctgctcggatcgggcgtgcacacctcgcgcgtgatccgcaactcgcagcgtatcggagcctcgcagggggtcgacctccagttgtcgagcttccagaaaagcacgatcatcaccgcccacgacgaagagagcggcgaggccatcacccgcgtagtgaagatcccggcactgccgatcagcttcgagcgcaactccgacctgagcgccctgagctgggatgcgctggacgaaaggcttccgctctccgaaatccggcgtcgctacgacgaactgactgcaaaaccgcgcatagacccaatcttcgtcctgctgaccgtggggctggccaacgcctcgttctgccggctgttcgggggcgactggatcgccatgagcatcgtcttcacctcgacgctcgtgggtttcgccgccaaacagcgtatgcaggcacacggcgtgaaccacttcctgatcttcatcatctcggcgttcatggcgtcgctgtgcgcctcggcagccctgaggttcgactgttcggcggaaacggcgctcgcgacgagcgtcctgttcctcgtaccgggggtaccgctcatcaacggcgtgatcgacatcgtcgaggggcacatcctgatcgggtgcagccgcctgatcaacgccctgctgcttatcatctgcatcgccatcggcctgtcggcgacattgttaatggttaaggacggtttgctatgatcgctgcggacatccttctcgacgggctctttgcggccatcgcggccatcggtttcggcgccgtttccgacccgccgatgcgggctttcccccgtatcgccctgctggcggccatggggcacgccctgcggttctgcctgatgcactacttttcggccgacatcgccacggcctcgctgttcgcctcgatcagcatcgggttcggcagcctgtggctggggcgcggcatccgctgcccgatgacggccctttacatccccgccctgctgccgatggttcccggcatctatgcctacaagaccgtcttttcgctcatcatgttcctgcaatcgctcaacgacccgggggagggattgcaatacatgcagcaattcttcctcaacgcaaccgtatcgctgagcgtgatcgcactgctggcagcgggggctacgctgcccatcttcgtattcaaccaccaggcattctcgctcacgcggcgccgcaagcataccgacaaataacgatccatggaaatcttctggaacaccatcgcctcctataacgccgcgacatggcccgtacagatcctactgacgctggttgcggctgtgctgacgctgctgctctacctgcgcccgacgcccggggtacgtatcgccatgaagacctttatggcgctgctcaatttctggatcgctggtgtctattacctcttatacggcgaacaacgcgagcacaacgacatgctggcgctcttctgggcgatcatggggtgcatctgggtatacgacctggttgtgaaacacgcttcgctccaacgcacgcacaaccatacaggcttcgcgctgctgctgttcgccatgccgctcgtctacccgctcttttcgctggcgctgggacgtacgttcccgatggtcaccacgcccgtgatgccgtgttcggtcgccgtgttcaccatcgggctgatgctggccttttcggagcggatcaacatcgtgctggccatgttcctctgccactgggcgctgatcgggctctcgaaggtctacttcttcggcatccccgaggactacctcctggcatgcagcatcgtgccggcactctacatcttcttccgcgaatatatccgcagtaacgagggccggccgacaaagccttcgccccgggtactgaacgcactgctggtggtattgtgcatcatcatcggcgcctccttcgccttcacgatgctgcaccagctcaacctctttacggatgtctgacagccgaaggaaatccgccgcacgaactgttccaaccaaactttccaaacggtagctgcatgtgcctgaaagcagaacgcaggatttaccgtgtgcctaacggcaaggttgtgttttcgtaaacgaaacaggggcttgcgggattgtcagtgatcccgcaaacccttgttcgttcggatgattggccgcttattgccgttcgctcaactctttataaagctccagccgcaagccgcagtagttttcgatgatatggcccattttttcgacgcgttgcaggtgcatttccaattcctgcggcgcaacatcgaaaccaatgtcgtagcgtgcctttaccagaaaactcttcaggcgcggcagcgtgaagatattttcgatatggttatcgtctaaaaccagcatcagctgcgtcgagagcgtccgcatccgttcgtgcatcacgaccggatcgtgaatatcgaactccagcccgtgataaacataatagagagtgtgataaaagtagactgcagcctgcgccatgaacaaagccgccagacgcatattgcggctttcgctgaaggcgtcctgcgcctgttcgatcaattcgttgcccagcatccggaacgtatcgaaatgaaatttggcgtccgcataggctgcggcaaagttgatcgggtgtttcgggcggcggaaatggcagtggtcgctgcaatagagcaattcgccctcggagtgtgcaaagtagaggaatggtgttttattcgactcgacatagctcaaaggcataatgtagaggttgatataggtgatctcgcgcctgctgtacggcactttgtaacgcaggatgcgttttgcctgaatccaattgtattcgggcgtttcccgcacgaccatcagcaagtcataggccatggcgtcgctatggtgtgtaccgccgaccaatttcccgaaaagcagaatatattcggggttgaaataatcttccgtcaggctttggacgatccgggcggcttcggcgggattgtagagtttttccgttggttgttcgggttgcggttctggctttggagcgagttgcccggtcggctgttccggagagggtacgggctgttgttcggcttgggtgttttcgggggttatgtactgtacagactgttcctgcacggggttttgattcgtttccatttaattgattgttagaaatttgacataatgagggctgtccttatcgtgcggcatcgcacaacaaagagaatagagatttggttagcagttacttgctaatccggcgggtggaaatggaaacgaatcgagaggttgcatggcggaaaccgcctgcggctggccttgcggcgtgcctgtaccggagtacggacatgatgcattgttcgcataaagataaaaatatgcgcagctgcgaacaatacatcactcttttacaagctcagcaaagtgccgttcgcgggtcgctaaaccccaacggctctgcgcatacctttaatatggttgctttgctggctaccacgtaaaagaattttataacatattgttcgcaggggcaaaggtaggaaaaatttgataattagaatattttacacagccttaatattttaaaagatctttctattagaccaaaagagaatatcaagccacgagaccgaaaaggagtttatgaaatatatcaagggttcagaagaagaaactacactggaatttgcaaaacctccatatttcaagaattgtatatgtattttttcacataaatagaaatcatttttagttttatgcattatctttgtataacagactacaactattaaacactataaaacagcataataaatgcaaatcaatttaaacattttttgcattaaactattttatttataattttgtaccactaatcagccaaatatatgtcggtcaatgtcagccaaaacgtacaagcaattcgaaaaaaattaggtttttctgaagagcaggtgtccacttatttaggagtgacaaggtctgtattaagaaaatatgaaagtaatacagatagtattccttttgatgtttttgataaattaagcaatctgtatggtgtagatatgtctgtatttttcgaggaaaatatggatgattttcaacaatcattagtttgtgcattccgtacagatggtattacccctgaagatatgcatacaattgccaaattcaagagcattgtcaacaactaccttaaaatgtgtaatcttttaaaataatggcaaggccactatcaataacgttagaaattgaggctaacgaattgaggcgccgtattgcattgggagatacggcacccgttgacacaagaaaagcattacagcaattaggtgttttgtgtgtatttatgcctatgcaagaaactttttctggaatgtgcttgaaacataaagagaaaagattcatgcttgtaaattcaaaagtcgcacttggtcgtcaacattttactattgcacatgaattatatcatttatttattcaagaggaattttcttcgcagatttgccctcaatcctcttctgacccggttgaaaagcaagcagattgttttgcaaccttttttcttatgcctagaaatggtgtgattgaagagttcaaaaaacttggaatgaaatatactgccgatgtcaatatagctcacgttctttacctacaacaatatttcggagtttcattccagtcaatgatctatcgtctaaacaacttgaccctgatttccgacaagcagaaagaaacttttttactataccaaccaaccgctgttgcaagggagtatggatatagcacaagtctttatacgccaacaaacgagaaaatagttttaggagactatagtgccaaagcacaatctttattcaacaaagaactgatttcagagggacatttaattgatctactctccgaaataaaactagatgaataatgtcacaacaagttcagatcgttttagattcggatgttattatccattttataaaagggaactgcttaagtatcttacccaagattctacctcaatataaatatgtcatattaagtatagtatacgacagagaattatccagagactcatctacaaaagcacagatagacaatcaaatacggcttctgaagaatatacaaattatcccttggaaaccagattctaacattataaaagaatttgcccggctcaacaaaacaaaaggtacaggtgaatcagcttgtttggcatattgcaaatttcataataatgttttggcaagcagcaatttaaaagatacaaaagaatactgccgaacagaaaatattacatatttgacaactttagattttttgtggtatgcaaagaaaaataaagtaatgaccgaaaaagaatgtaatgattttattcaaacggtcatatcaaaaaacagtattttaccaaatatctctatcacaatatacacaccaaccattaattttttatagtattcaataggtcttgtgtcccgatttctacgaaaaccctacttcgttactttcaactttcagtatgcatgacaatccaaaaaacaaaacaccgttgtagattactacaacggtgttttagtgaggtctgaagcggattcgaaccgctgtacaaggttttgcagacctttgcctagccactcggccatcagaccatatgttccccgacaggttcctgttcggctttcattccgtaactacaagtccgttgcttccggattgcatgccgcgccggaaacatccggtttattttcaggcgcatcgggagtgcaaatatacaaacatttctaaaatctgcaaaacttcgacccaactttgcgctatttcccaaaaatatttacctttacaagataataaacgacattttgcggttatgaccatcgaggatatcgccttgcagatgaccccgggcatcggcgtgaaaggcgccgtgcacctgctcggaatattcggcgacgcacggggcattttcgcggcggcacccgaggagctggccatgaaagccgccttgcgggaagacattatccggaatatcgtccaccgcaaaggcttcgccgccgcagaaaaggaactcggctactgccgccgcaattcgatctctgcgatcgcttcgaccgaccccgaattcccggcattgctgcgtgaaatacccgattatccccatgtactatacctgaaaggcaacgccgccgccctctcggcacgctgcgtcgcgatggtcggcacccgccgggcaacgccctacgggcagacgatgtgcaacaggctggtggaggggctcgcggcacaggttccggggctctgcatcgtgagcgggctggcgttcggcatcgacgtcgcagcacaccgggcagccctggccgcaggggtacgaaccgtcgcagtactggcgaacccgctccccggcgtcatgcctgcacaacacacggccgtagcgcgcgacatcctcgaccacggcggggcactggtcacggagctccactcgcagacgcggcagaacggcacggcatacctggcccgcaaccggatcatcgcagggctgggtgccggctgcgtggtcgtagagtcgcccgacagcggcgggtcgctcgccacggcgcattgcgccgacggctacgaccgttcggtaatggccgtaccgggacgcgccacggacggcatgtcatcggggacgaaccacctgatccgcaaccgcaaggcgcaactcgtaatgaccgccgacgatattgtccgcgaactgatgtgggatctcggcccggaaccggcagcattccgggaaaaaccgtccacgccggagcttacgcccgacgaagctgggttgctgggctgtttccgcacggacgacccgctggcggtggaaaccctcgcggaactgagcggactggatccgggtgaactggctgccctgctcgtagggctggaactggcgggagccgtacggcaactgcccggcaaccgatatatgaaaacacgatgaaactgacggatacacattcacacctgtacgatacggcgttcgacgacgaccgcgaagaggcactggcccgcgccgcggcggcgggcgtggaacacctgctgctcccgggcatagactccgaaagccacggggcgctgttcgacctctgccgccgccacccggtgcaatgcgtcccgatgatgggactgcaccccacctcggtgaacgacaacccgcactggcgcgaggagctggcgctcgtcgaacgttacctcacggccccgcccgagggcatcgcacgtttctgcgccgtgggcgagatcgggctggactactactggagcggcgagttcgtcgccgaacaggtcgaggctttcgtttcgcaatgccgcctggccgcagggctcggccttccggtggcgatccacacccgtgcggcatgggacgacatgtgccggatcatcggggaggaagcgacggccgcggcggaggccgggcggaggctgcggggcgtgttccacgccttttcggaggatgccgtcacctaccggaaactgaaagcctgcggcgatttcgccttcggaatcggcggcgtggtgactttcaggaagagcaagctggccgatacggtgcgtgaaatggaactggacgacatcgtactcgaaaccgactgcccgtacctgacacccgcaccccaccgcggcgagcgcaacgagtcggcctacgtgcggttcgtgtgcgagaaagtcgcggaactgaaggggctgccccccggcgaagtggcggccgcaacgacggcgaacgccgaacgtattttcggaatataaccccataagaccataccatgaaatcttcgatcctgatcatctatacgggcggcaccatcggcatgaagaacgatgccgaaaccggcgccctggtgcctttcgacttcagcggcatctatgatgaattcccttcgctcaagcggctcaacgtggacatcgacgtgctgacgatggatcccgtgatcgactcgtcgaacgtcaccccggcaaactgggcggcgctggccgagctgatccgcgacaactacacccgctacgacgggttcgtcgtactgcacggcacggacaccatgtcctacaccgcatcggcattgagtttcatgctcgaaaacctggccaagcccgtggttttcaccggcagccagatcccgatcggcgtgctgcgcacggacggccgcgaaaacctcatcacggccatcgagatcgcgggggcgcacatcggcggacgccccgaggtacccgaagtgtcgctctatttccagaaccggctgttccgcgccaaccgtaccaccaagcgcagcgccgaggcgctgagcgccttccgttcctacaactacccgcccctggccgaggtgggggtcaacatcgcctataacctcgcggcgatccttcacccgacggaaatctcgccggaactgcgcatcgccacccgcctggccgacggaatcgaagtcatcaagcttttcccggggctgggcgaaaatatcctgcgggcgatgctctcggcaccggggctgcgggccgtggtgctggagacattcggcgcgggcaacgccccgaccaacgaatggttcatccgcgtactgaaagaggcgatcgaccgcggggtcatcatcctcaacatcacgcagtgcggcgggggcaaggtttcgatggaactttacgaaaccgggctgaggctgcagaagatcggcgtcctgtgcggccacgacatgaccaccgaggcggccgtcacgaagctgatgtacgtgctcggactggagctttccgacgaacagacccgcgcattgctgcggcgccccctgcgaggcgaatttacagcctaagacgttgcacggaacgatttttttttctatatttcgcactgctaatgtactttatcgggtcgccaaagaggggcaacatgaagaggaacagaggcacaactcgctggtaaacaaatgtttgggtcaattcggagtgaaatttccggaatttgcccgtacttgcgaaaccggcaggggaaagccatggatcggggtaaaaagatgccgcaaggatacggaaaggataaaaaaaatatttttttaggatttttttaaccccggtagaattgacgaaatatcattgaaaccggaaaaatatcgtgaaatacctaaaaacacaacaataaaaaacaactaaacaaatttaattttatctaatcacaactatgaaaaaactttttttgattctgtcagtggccctgttcgcattgggtactgttaacgcttttgcgcaggaggctgccgcagctgccgaaacccaactcgccggcgaaagcctgcaccacgtgatgatgcagaagttcctcgagggtggttgggaatggatgctcccggtgcttctctgcttggtaatcggtctggccgttgccatcgagcgtatcctctatctctcgctgtcgacgatcaactcgaagaaactcatcgccaaggttgaagaagccctgaagaacggcggtatcgaagctgccaaggaagtttgccgcaatacgcgcggcccgatcgcttcgatctactaccagggtctcgaccgttacgaccagggtctggattcggtcgagaaggctgtcgtttcctacggttcggttcagaccggccagatggagtcgggtctttcgtggatcggcctgttcatcgccctttcgcctatgttgggcttcatgggtaccgttgtcggcatgatcgcggcgttcgacgccatccaggctgccggcgatatcagcccgaccctcgttgcaggcggtatcaaggtcgcccttctgacgaccctcatgggtcttatcgctgcggttattctccagctgttctacaactatatcgtttcgaagatcgactcgctggtaaacgatatggaggattcgtccatcacgctgatggatatcctgacggcttacagcaagaaataatcccaacgatttaaaaagagttaaaaggcaattatgaaaaagatattaaacatattgctgggtgttctgatggcgatcacggtcatactcatgatctacgcgatcgctacgggcggttccgacgctgcgatcagcatgaatctcgtatggggatatttcctcatcgtgttcgcgatcctctcagccttgttctgtgccgtcttcggaatgattaaaaacccggcaggcatcaaaggcaccatcctttccctagcgttgatcatcgtgatcgtgggcgtggcttacttcgtggcttcgggacatgacatccagatccccgacctcgccaacggcgggtttttctcccaaggtgaaaccgtcctgaccgacaccagcatcctggtaacgtacgttgccctggtcgctgcgttcgtgacggctatcgcaaccgaaatttacggcgctttcaaataacaacgaacaatggcaggaaataaaagacaaatacaggagatcaacgccggctcgatggccgacatcgccttcctgctgctgattttcttccttgtggccacaacgatgaatgtcgacaccggtttggtgcgtatgcttccgccgatgccccccgagaaccaaaagcaggaggacatcaaggtcaaggagcgcaacctctttctggtgctcatctcgggcagcggcaacatcatggccgggccctcgggcaaacaggagatcatcgacctgagacaactcaaggacaagacgaaggaattcatcctcaacccgatggacgacgagaacctcccggagaaaaccgaaaaggaaatcgagttggccgacggcagcaagtgggtatatcccgaaagccagggcgttgtttcgttacagaccacccgtgatacgggctatcagtcctacatcatggtgcagaacgaactcacacgcgctttcaacgaggtacgtgacgaagtcgccatgaagaaattcggagcaaaattctcggagctttccgaggatcagcgcaatgcagtatccaaagcagtacctctgaagatttcggaggccgaaccgcgtactataaagaagtaagttatggcagtaatgaaaaagaagggcaataaaagtttgccccctatctcgacagcatcgcttcctgacgtgatcttcatgatcctcttcttcttcatggtgtcgaccaccatgcgcgaccaggaactgctcgtgaggtacaaactccccgaggcaaccgaagtgcaaaagctcgagaagaaatcgctcgtaagctacatccacatcggacagccttcgctggtgatgcaggccaaattcggtactgcaccccgtatccagctgaacgactcgtacaaaacgaccaaggatattttggatttcgtagccgcagagcgcgacaagctcagcgaggccgaccgagcctcgatgacgatctgcctcaaggccgaccagacaaccaaaatgggtatcgtaaccgacgtgaagcaggaacttcgccgtgccaatgcactgaaggtctcctacgccgcttccaagtcgctgggatactaaatcccgagtcatatcgaaaaagggctgaagtcggacttcagcccttttttatgtgccataccgatagttatacggcctccagcatcttaaaacggatgcccgtcactgcaagacggcagggtaaattcgggccggggatttatgcgcgggagatgatcgtatccgatcaccacgggatttcccggcaacacgcggaaagacaatccccgctcagaattgcaactccaactggccgatcccgtggctgaacgacaggcggtggtggggcgtaagtccgtattcacggattgcgagccgatgctcgcgggtcgggtaccccttgttctttttccagccatactgcgggtattcctccgcgaggcgcaacatgtactcgtcccgatgggttttggccagcaccgaagctgcggcgatgtcggcatatttgccgtcacccttgaccacgcaacggtagggtaattcaagacgtgtccggaaacggttgccgtcgatcgcaaggaattcgggcggcggatcgaggcgggcgacagccagcgacattccctcgaacgaagcgttcaggatgttgatctcgtcgatccgggctgcggaaacggcctcgacggcccaggccacggcttcacgctcgatgatcaggcggagcctgtcccggttccgctcggtcatctgcttcgaatcgttgagcaacgggtcgtgaaaatcgggcggaaggatcaccgcagcggcgaacaccggcccggccagacacccccggccggcctcgtcgcaaccggcctcccgaaactcgtattggtattggttttctaacatcgtaccacaaagttaggtaatattccggcttttttcgctaattttgcctgaggaaaaaagccttccgacatgaaattcgacatcgcccggcagccgctcgtaccggccttcatgaccctcttcgcactcgccgtcgcagccatgtgtgcaggaatccccgtgcccgataccgaaaccagtggagcggtgcgcgaagcgctcccgcttctgggcggccaactcgcccggtttcaggcggcatatccggtatggtcgaagtttgccgccgggttcatgctgctcttcaccggaatgtgtgcgggacggatcacgatccgctacaacctctatacggtgggcacctgcctcccgattcccctctatgccatcgtcgcctgcgggatcacaacaggcgggaattacctcgcagggttcgcagcgtcgatgctgctcgcactggcaacgaaaaattactgccgcgccttctgcaacgggtacgggttcgacgccatcttccgtgcctcactctacctggggctgatgccgctggtatatgcccccggcttgccgctgctgctgctcctgccgctggccgtactgcttttccggcgcaccttgcgggaagtcgcggtagcaacggccggactgctgctgccggtcttcacggcctgctatgtcagctggggcaccggggcggaattcacggctcccctgatcaaattggggcaatccgccatcgaaggtatgccgctgcatctctttctggatattcccctccccgcactcgtcatggcaggcgggatcgtgctgctcgacctgacagcgcttttctttttcctggccgacatctatgccgcaggcaccaaaccccgcttcatcctcttttataatataggtatactgatattgactctggctgggctatgcagccccgccgcaacacccgaggcattcgccctgctcgctgtcccgtcggccatactgatcccggtattttttgtccgcatacacaggggaatagcattgcccgtatacctgatttttctggcggcagccttcgctggaatatttttacaatattatatttagtcattattatggtatctttagtcttatttgcctgtttgtgcctttttagactattcattattttataaaacaaatattaaattgtatttttgaaatgagcaatcggtgacgcaactcattgttcaaaaaaacttaaaatacgatttgatatgaagaattcattaaattcgtcggcccagcagccgatgattgtgaagtacgtagaagcccttcacaacggaatccagtctcaggcgctttcgcgttacgcaatcggttacatcctccgaggcacgaagtatatttacgacggggataagcgccagacccttacgcgcggagacgtattctacctcggcatcgggcatcactatatcgagaacttcccggaaaacggacaacccttcgagcaagtgctcttttattatacgccggctgacctccagcggatactgctgcacctgaacatcacctacggactgaacatttcgaacgaacattcgtgcgaaaactgccgcaaccgttcgcacgtctctatgcctgcctggaattcgatccgcaactttttcatcaacaccaacaactacctgcgcgacgaggatttccaccgcgacgagacggccgagaacatcaaaatgaccgaattgatctacctcatcgcctcgcacgaagactgctgcctgaagagcaaactgctgagcaacgtcgacgcggccaaggagaatttcgaacagatcgtctacgaccacatcttcaaggatatttcgatcgaagaactttcaaagctgacgaaccgttcgctcacctcgttcaaaaaggaattccggcgccatttcatgatgccgccccacaaatggtacatccgccagcgcctgatgcattcgcgtctgctgctgatttcgacttcgaagtcgatttcggaaatcggcaatgcctgtacattccccaacacgtcgcactttattaaacttttcaaaaaggagtaccagatgacgccggccgcttaccggaaccgccacatcacttcgctcgctcccgaggcgcagcccgccgctaaggaaaccgaggaaatccgcgaggcgttatagttcgcaacttacaaaaccgttagtattttaaaatttttaattataatttaaaagatttttttcggttaggttaaaaaaatgttacaaaagatttggaagattgtgattttccatttatctttgtataacaaaacgtgggattctcccactctcattaacctaactaacctaaccagaggggtttgctactgccaggcagcaaacccctttctctgtgcaaaaaagtcctccggcagtatccgatattgaataattgcgattttcgaggccgcattttttatttttttaattgcatactgcgaataccgccgccggcgaaacccgaaaacagcccggggaaaggcccggagcaggcaaacccgcgaagaggcgtatcaggaacgagatgccgaaagaaaatagggcattcataggaattatcaattattttttcgtatttttgcatcaattggaaaataatgaacttaaatgccgaagttttatgacaaggtagatgtactgaaaaaaccaggatggttgaagatccggctccaccgcaccccggaatatgccgaggtacagcaaatagtcgacaaacatgcgttgcatacgatttgcagcagcggcatgtgtccgaacaaggccgaatgctggagccgcagaaccgcgaccttcatgatcctgggagacatctgcacccgaggctgtcgcttctgtgcaacgaaaacaggacacccccttgcccccgacgccgaggaaccccgacgggtcgccgaaagcgtcgcactgatgaaactgaggtatgtcgtcgttacttctgtgacgcgtgacgacctgccggacggcggtgccgcacactgggcccaaaccgtccgcgccatccgcacacagaatcccgacgccgtaattgagctccttattcccgatctcgacgcacagcccgccccgctggacgtggtcatcgcgtcgaagcccgatataatcgggcacaacatcgaaaccgtcgagcggctgaccccggtggtgcgttccaaggcaaagtaccgtacgagcctggaaaccctgcgctacctgagcgcacagggtgtcgcaacgaaaagcggactgatggtcggacttggcgagagcgatgatgaagtattacaaaccctgcacgacctgcgcgacgcaggcgtggggatcgtaacactcggtcagtaccttcgtcccactctggagcactaccccgttgcggcgtatatcactcctgaaaaattcgaatggtacagactgaaagcgctggaaatgggcttcagctactgcgcgagcgcaccgttagtccgctcgtcgtacatggcggaagaggccctgaagagcgtcaaaagtttgtagcgatggaagcctcctgccgggatctcggactgatggactacaaaacctgctgggaattgcagcagggcttgttcgacgccctggtagcccgcaaggcagcctgcaaaggcgcaacgaaacaggcggcggcacccctggcggcaaacgccgacactgcggaagcaagtaaggcatccgcgcgggagccggcacagcgatcggcagaggcaatgcccagcaaggcgggaacgcaatccggcaaagggccggaatccccaacgggcagcgtatccgcagcagagggcgtcgaaccgtcaggcgtcaccggagatggctccgccagcgcaggcactatccttttggtggaacacccgccggtatacacactcggcaaaagcggccatgccgaaaacctgctgataggccgcgaagcgctcgaagcgatgggcgcacagttctttcacatcgacagagggggcgacatcactttccacggcccggggcagctggtctgctatccgatcctcgacctcgaatgtctgggcatcgggctgagggactacatcggggcactggaagaggccgtcatccgtaccgtggcggtatacggcatcaccgccggccgcatggcaggcgcctcgggggtctggatcggccccggaatcggcggggaaacagggagccggacaaccgcctgccgcggagataacggcggcggcaactgcaacatcggcggtaactgcggcaacaaaagcgtcggcggcaaaagcggcgacagcggcgaaaaccgcaacgaggcaggaacctgcgatagcggcagaatctgcgatagcgaaatcggcgtcgggaaccggacatccgcaagggtgccgcgcaagatttgcgcaataggcgtccggtcgtcacgttatatcaccatgcacgggttcgcgctgaatgtcacgaccgacctcgggtggttcacgcgcatcaacccctgcgggtttaccgaccggggagtgacctcgatcgaacgggaaacgggtcgcaaggccgcaatgggcgaagtaaagtcgctcgttgtcaaatttttaagtgagatattaaatgttagaatatataaatagtaaatcgtatgcctatagaaaaacgatgggtagtgaaaccgcagggcgattccgaggcggtggcgaagctcgctgccgtgctcaggatttctcccgtgctggcgaacctgctcgtacagagaggcatagacaccgtagaaaaggcggacaagttctttaaacccagtctcgccgacctccacgacccgttcctgatgaaggacatggacaaggcggtcgagcgggtcgagcaggccgttcgtaacaatgagaagatcatggtttacggcgactacgacgtggacggctgtacggccgttgcactggtgtacaagttcctgcgccagatcgggcataaaaacctgatgttctacatccccgatcgctataccgaaggttacggtatctcggtcaagggtatcgacctggcagcccgcaagggcgtgggtcttatcatcgccttggactgcggtatcaaagccacggaaaaggtagtctatgcaaagacgaagggcgtggatttcatcatctgcgaccatcacctcccggccgaggaaattccccgtgccgtagctgtcctcgatcccaagcgggtcgattgttcctatccgttcgacgaattgtcgggctgcggcgtaggcttcaagctcgtgcaggcctatgcgcagaaaaaccggatcccattcgaacagatcagcccgctgttagacctgctggtcgtgagcatcgcttcggatatcgtacccctggtgggcgaaaaccgtatcctcgcccatttcgggttgaaagacctcaaccgcgaaccgtcgaaaggattgctgtcgatcatcaagatctgcggcctggacaagcacaacatcaccatcgacgacatcgtcttcaagatcgggccgcgtatcaacgccgccgggcgcatgcggatggacgagaacgacgaaaacgcctcgccctcgggcgggcacgcggccgtcgagctgctgatcgaaggcaacgaaagcatcgccgcggagttcgggaacgtcatcgacgcctacaaccaggatcgcaagtcgatcgaccgttcggtgacgcaggaagcgcacgattttatcgagcgcaaccccgcaatgaaagagctgaagagcacggtgatctacaatcccaagtggatgaagggcatcgtgggaatcgtcgcctcgcgcctgatcgagacctactaccggccgacggtggtgctgacgatgagcaacggcttcgtgacaggatcggcacgctcggtaccgggcttcgacctttaccaggccgtggagtcgtgctcggatctgctggagaacttcggcgggcatatgtatgccgccgggctgacgatgcgacccgaaaacgtcgaggaattcacgcgcaggttcaacgcctatgtcgaggagaacatcgacccgcagatgctcatgccgcaggtggatatcgacagcgaactgctcttctcggacatcacccccgcgttccgcaaagacctcaaccgcttccagcctttcggccccggcaacacggccccagtcttcgcgacctacggcgtaagcaaccacggcgacgccaaactggtcggcatggagtgcgagcacctgcgcatggatttgatccagcggcagaaacccaacacgaagatccagtcgatcgccttccagcaacccacgcattacgaatgggtgcgctcgggacgcccgatcgacgtatgctaccagatcgtagagaaccactaccgggggacggtaaccacccaactccgcatcaaggacatcaaaccggtcatgaaccgataactttacataagaagggagggggctgtcttccgacagccccctcccgctatttttgcgtcatgcactactcccttgcgtccctttttcccatgaacatcccgaccacccggctcggcctacggccccggcccttcacatgggtcttacttttaggctgcattttagcatcccccctcgcatcggccgtcagcagcccttccggcgacaaacgcgattatatactggtcatcaacacctatgcggaatcgaccccgtggagcagaggcattattaccgacatcacggcgcgcgtcgagcagatcgaaaacctggaactctacaccgagcatataaacctgctgttggtagattcccctcgggaaatcgagaccttcgagacgaacctcctgcgagaatacggcaaaaaaccaccccgggccctggtgctgatcggaacccctacggcgctgctgcgcaatttcattaacagcatatggaaaggcattccgaccatcgtatgcgcagaacaggattttgtcgggccggataaatattaccagaaaaggcttcccattccggcctcggaacaggtacctctgcggacactggcagaccgggacaatctgaccctgctttattcgccggcctatctcgaccagagtatcgacctgatgaagcgcatactgcccggcatggatcggctcatattcatagacgacgcacgctacgtcaaccggcaaacggaacacgacctcgcggaactgctcgactcgaagtacggcggcataaaatacacggtttattcggccgatgagatcgggatagaccaactgctcgattcgctgagtacagtcgacgtaaaacgcaccggcgtgctcttctcctcgtggcattacctgaagaacatgtccgggcgcaacgaaatcatgaccaacccgttcaagatcatcgccagttcgtccgtaccgttgttctcgctgcgtccgacgggactcaagagcagcggcatgatcggaggttacgtatacgacgaaaacgaatattccgaccggctgatagctaccgtaaacgcagtgctggagggcaagcagccgcgcgacattcccttttacacccccgtccgagtacaacccgtcttcaactatccggtactgctccggcacaacatctccccgaacacctgcccgacgaacactctgtttttcgacaaacctgcctcgttcatggagcggtataaaacatggatcggcgtctgcggcggtattttcctgttattcctcatcttccagcaatggaggatcgccgtcctgcgcaaagtcgacgcagcccaccagaaggagcgggaaacccaggccacatattcgcacctgttcaacaacatgccgatcctgtatatgcaggaacgggccgtgttcgacgcacagggaacggccatagacactgtttacgtcgatgtaaacgcctattttgaacattctttctaccgcaaggacgatgtgatcggcaaatccggatcgacggtttttcccgagtcgcagtcccaattcatgccgatcatcgacatcgtcctgaaggaaaagcggagcatcaccttcccgtattaccacaaaccggtggatatcttctacgaagtcgtcatctgcccctcgtaccgaaaggacacggtcgacattttctgcatcgacagcacggccctgcacaacgcccagaaaaaggtggattcggtgaaccgaaaactcgcattggcgctcaacgtggccaacatcatcccctggaagtgggatcttacgaaccacactatcctgtgcgacctcaacaaggcggccaagatggccgccggaatgtcgctggcaaacaacgcctcgcttgcggtggacgaggagtgctacttctcgaaagtccacaaggaagaccgggaacgcgtccgcgcagcttacaggaacctgatcgaagggcatacggagaaggtctgcgaagagttccgcgtcgtatccaacgagagcgggcactggcacatggagtgggtcgaggcacaggccacggtcgaaacccgcgactgcgatggcaggccgctgtcgctggtcgggacatcgctcgtgatttccgaacgcaaacagatggagcaggagctgctcaccgcacgcgaccgtgccgaagagtcgaaccgcctgaaatcggcattcctggccaacatgagccacgagatacgcacgccgctcaatgccatcgtcgggttttcgggcatccttgcctcgacggacgaagagcaggaaaagcaggaatacatgtcgatcatcgaaagcaacaatacgttgttgctgcaactcatcagcgatatcctcgacctttcgaagatcgaggccgggacgctcgaattcgtccatacggatttcgaactgaacaagctgatgcgcgagaaagagaacgtcatgaggctgaaaaccgaccaaaacgtggagctggtattcgaacagcggtatgaaacctgccacgtccgcaccgaccgcaaccgcctttcgcagctgatgataaacctgctgacgaacgccgcgaaattcacgcaccggggatcgatccgcttcgg

SEQ ID NO: 314 - DNA, 95729 bp, Alistipes onderdonkii
  source 1..95729: mol_type = genomic DNA
ggtacttaataggtacaatatctatttttctgattacctttgtcggtaacgatatgttttctcaaaatttttcacgtctatgaaaaagaaatttcgcaagctcctatccgaaaaatgcaaggatatgggactaacagacaaggcactcgacgacctcacggatattggggcggagggtcttgacgacgatgcctcggacgaagacatcgccgcgaaagtggattcgctcgtgccctatgcaaaggcaatgcagggggagaccacgaggaagacgcgcagtccgaaaccgcaatcaaaaaaaccgcaatccaacgacgagggcgatgatgagggcggaaaagctgatgaggctcccgaatggttcaagcctttccaagagaagttgagcacgctcgaaaccgagaatgccacgctcaaagcagaaaaggcgaaaaccacccgtcaggccgaaatcgcagccaaggctaaaaagctcggaatccccgactacctgatgaagcgggtgtcatttgccgatgatgccgatctcgacaaggagctggcggactacaagcaggaattagtcaccaacaacctcatgccccaagagcaggcgcatgaattgggaagtaccgacgaggccatgaaagccgaagccaaggcatgggccgaagcactccccaatcggtaagctctgaatcattcacccttaaaattgattgcaacaatggctattgatttcaagaaaacgcaagtgcagggacacatgcccgaaatttggcgcggcgagtgtaaaatcctgcccggcggtttcaagccgatgcagaatttcccggtagggacggtgctgcatcgcggaaccccgcttttcgtcgatttcgatgcgatgtcggcagccgtatgcaagaccgccaaggttctcgcaggaggcacgacgaccgcgccgcgcgtcgccaaagggcattacttcgtcgtcggcgacgtggtgatgaagctcggcacgaccgacaaatccccggtcatcaagtccatcgacacgaccaacagcgactacgacgtaatcacgttccagtcggcaattacggggctgacggcagaggatgtcctcgtcgaagcctccgaatatgtcgctgctggcgagggaacggaagctgttccggcggctcccctctacacgccgaacatgattgtcggcgcagtcaaggaatttaacggaaagggtcttcccaccatcgacgccgcatacgaggccgtagttctctacccctcgctgtgctttcccattcccgacgaatggctcatcgacggcaagaaaccctgtctcaagtcaaacccgaacatcctgttcattaaacagtaacgactatgcccgaattgctttacagttcgattttcggcgatctgacgaagaacgtacagattcgcttcgacgcagcatcgcagttgcgtaaaaagctcttcgacaacgtcatcttcgagcagtacctcgactgggatgccccgaccatcggcctcgacttcgaggagatcatcggccagtacaacatcaccgtcgcagctccgaccatcggcgacctctcgaaagaggccatcctcggcacggagggcatggagacgctgaaagagcgcatcctcaaccacgcgatcacgctgccgatgacgatgcaggactaccgtaaaatcctgcaaatcctcgattccaagtctctgcccgacaaggtcaagacccagcagctcgtgaacctcatgttcggcaatgtgcagaccgtcgtaggctcggttctcgcaaagctcgacgttatgttcctccgtcctctctcgaatgagggcgttatcgagctggacgaaaccaccaaccccgaaggtggtgttcgcggcaagatcacgttcaaccagcccgcagagaacattgcgacctccaaaatcgcatgggctgatgccaacctcgatacggtggactgcttcgaggatgttcaggccatcatcgacgcggcgcaggacaagaccgtgttcgagaagatcctctgcgctccgtcgcgtatctcgtatatgtgccgcagcaagaagatcaagcagatgatctggggtacggacaagtccgcgaagatggtgcagttgaaagacctgaacgcctacatgcaggagaacaactatcccgtcttcgagcctatccgccgacaggttcgcattcagaacgggcggaaccgcgttccctattcgccttggaacgagaagaacatggtcttcattccgggcggcaagctcggcctcgtgaaaaacgcatgggcgaacagcgagctgaaacaggaggcgggagtagcctactccaactacggacgcatccgcgtatcgcagtggggcgtcggcgaaacgcagggtagcaacggcgttgagttcaccaaggccgaaatcctcgcgttgcccgtgattacggagatgaacggaatctacaccctcaaaacgcagcagtaatcgtggataaccttaccgcaacgaggagtttgtgtaatgcgatagcaaacacattctatcctgataactcaacgattgagtttgcgcttttcaatgagggcatcgacgccaaggcagaagcggccccgaaagacccgcaaatctttcgggtcgccgcccgccttgtcatcggatatgtcgaaagcagccgttccgagaatggcgtttcgacctcggtgatgagtgaagatgcgctcaaacaaagcctctcgatttggtgcggttattacggcctcgacgcggatgaggtattatccgattatctgcgagtgatcgaggatggctcgcatctatggtgatatgaggtacaacggcacattacaatacgagatactttccgagggtggcattgatgagatgggcgagccgatagaggctcaatcgtcatggagcgaggttataccttgctcgatcaagaccaatcaggataaccgaaaaggacgatacgaagacggcgaatttcggcaggcttcgtttacgatcctcgtagagtgcatccctttcccccacaatcgggtgaaactcgaaagaatgggcgaaaacctcggagaatttcgggtgatgtccgccgaacctcttaccaccgtagggcgaactcaaatcacggtgtgatatggcgaaagttgtcagcactcacggcaaatacaagggcgtcatcgtcagcaagacggatatgcgcaagctgaaatccaacttgcaggcaaagatgaaagacattgtttccttgctcgtaaaacagctctcctacatcggggaagaatgcgtaaggatagcccgtgagagcggcagctacaacgacattaccgggaatttgaggtcatcaatcggctatgtggtgcttgtggatgggaaacccgtcgtaacgggggcctcgaagcagtacgacggcaaggatggcagcggcgaagccgggccgcccgccgccgaagcattgctcaaaagcctgcaagcgaaatttccttggggcgtggttctgatcgtttgcgcaggcatgaaatacgccgcctacgtcgaagccgtccaccacaaggacgttctcacatccgccgaattgaaagccgaatcccttgccaagaaattgctcaacgggttaatcgaatagcaggatgataaagacggagatacaggtcgaacgggatttctactctttcgtcaagagcagtaaactcggcaaagccatcaagggaagcgtttaccgctccgacatgcgccccgccgatgccaaaacggaggatttgatcgtcaagttcctcgcaggattggatgagcaggtgcaatcgggcgtggtaatcttcaacctctatgtccccgacatccctcatgacggcggccgaaaggttccgaacaagaaccgcatcggcgagctggaagagcttatcctcgcatttgtagagaccgcaggaggcacagagtattggttgcagaccgacacgacgccaaccacgatgcgcaacgaggagatagagcaacatttcatttacgcaagaatcaagtttaatcgcataacagaataagattatggcaaagaagacaattatcatgtcgtggtcgaagtgcaagatcgaagtcggcaagactggcgacgacgatgctatggccaccgagctgtcgagtgttggaaccatcaacaacaaatcgacgtcgcttgccaccgaggacggcgaaacgctgaccgccaccgcatcgggcggcatcgtggtcgccgaagaggagggcgagccggtcgttaccctgactacccgcgtcaaggagatggatttcgacaaggagaagatgttcaccggggcggaagtcgaggagacgagcggtgatctcgtcgtcaagaccaacgtcgtatcggaggacttctccgtgaagctgacgccgaagaacatcggcgccatcggcatcaaggttcgccgggcgcatgtatcgtttcgaccgggtagctccgaggaggagggatcgtatgtcgatctcaaattcaagattctcgcctgcgccgacggggagctttaccgaaagttccgcgtcaaggccgcagactgggctgagcccacaggagcatagtatcgcaagatgctgacaagcggaatagacgccctttgcggttggaggagaaaccgcaatccggagggttggcagagtggctgaatgcacctcaccgctaacgaggcaagccgtcaggcttcgggggttcgaatcctccaccctccgcaatattatttcagacaatggaaaatacaactatcgaaagccgcgttgcttcggccatccttgaaaggagtacaggaagcatcgagatagagggcaacacctacgagataggcgcaccctctaccgctacgctcattctcgtctcggaattggtcgccacgctccctatcgtggagaaagtcccgaaaaccgagatggtaaactccgtgctgcactatgcgcggttctatcggccgctcggcgatattgccgccgtgctgatcctcggagccaagaatctcaccgaggaacgtatcgaagtgcgtgaggagcgccgtctcttcgggcttatcaggcataagaccgaaaccaaggtcgtagtcgataagaaagcggaactctccaaactcattttggataacgtccgcccgacaatcctattcgatgtcgtagtgcagcggcttcaagatacggagattggcagttttttcgccattaccacttccctgtcagaggcgaatattctcaaaccgacaaaggaagtggtgaaagactgaacgacagcatttgggctaccatcctcggaatatcaagaacgctcggagtaactgaaaaatatgccttatacgacatcagctatgtaaacgcgatcatgtatagccgtgcgatgccaatgcccggcgataaatccgagggcaacgataaaccgctttacgatagcagcaaagacgctaacgaccccgaaaacttcaaggatttcacagatgatgaagaggttgtaagaaaatgaaacacgatgacggcacattaagttttggcacggcgatagatacctcggatttcgacgcaggtatcgagcgtatcgaggggaaagtatcggagctgacctcgaatgttgaagttgagacctcgaaaatctctcaactccttaccaacgttcctaccctgaatattgatgtcgtcagcaatgcgtctcaatctctttccaccatagaaaccgctttcgcggaaatcgaccgcgtgcgcgatctgaacgcacagggcatccgcgaactcgaagccgaatatcaacgactgggacagcagggagccgccgctttcaacaaggccacgaaagcaggggatgatgaatttcgcgcctgccaaagacagcagcaggcaatccagcaggtcatcaatgcccgcaagagggcgatctccgaggcaaacaagcagttcgattcgctggtcaagttagagcagcagatgaagaaagaggctgtcgccgctgaaaaggccgcgaacagccaagtttccatccgcacgcgattgaggcaactgcgcgaagagctggtgatgatggaagccgcaggacagcgcggcacagcccaatacaaggtattacaagacgaggccggaaagctcaccgatgcgtgggccgatgccacggcacaggcaaacatcctcgctcacgaccagcgcgggatgcagggccttatttcgggcatttcgggcgtggctggggcattctccgtcgcgcagggcactatgtccctattcgccggggaaaacgaggatttgcagaagataatggtcaaggtgcaatccctgatggctattactatcggactgcaacagatacagcagaccctcaacaaggattcggcattcaccctcgtaaccctgaacggcctcaaagagtggtggaataatctgctggcggtcggcatcggcgagcagaccgcagaaacggcagcaacggcggccaatacagccgcgcaaggagcgaataccgcagcgactatcgccgacacagcggcgcaggccgccaataatgccgcgaccaatgcaggcactgcggcaacgggggccaataccgccggacagatcatcaataccggggcggcaaaggccggaaccattgcgaatatcggcctcgccggagctttccgcatggtaggtgcagcgatcaaatcaatccccgtattcggctggattttggcggctatcggtgcgctcatcggcgtaatatcccacttcatcggcaagtcgaaagaggccgacaaggagttcgaggagcagcaggaaatcctcaaagcaggccgcgaagcctacaccaaggcgtcgatggagatttcgagctaccaaacgaagctcgaaaaattcaacggcacgaaagagcaggagaagcaactcgtcaaagagctgaactccaaatacggcgagcacatgggctactataagaccctcgccgaatggaaatccgttctcaaacagaaaggtcagaagtattgcgaaatgctgctgctcgaagcgcaggcgcaggccgttctcaataaatacaccgaatcctacatcaacctcttggaggtgcaggataaggccaaaaagggcgatttcgacaagtggtatcgcggtaagcgcggagatgcccgtgcccgtcagaaagctatcaaggaggcgcaggatgagaccgacaaatgggaggcccaatacaaagacctgcaaaatagggttcagcagatcaaggatgacaacgatctcaacttccatatcgacccctcggccaaaggcaagactttcgacccgaaaaaggcggccctcgatcagaagaaagccgtcgaagagtggaaaaacgccgtcaagaagtacctcaaagacgcgcaaaatgagattgcggattatacgctcgacgcgatggcggagggccaagccaaagaactcaatcagatcgaactcaacaccgtgcgcaagcgtaatgcgtggcgggatcagcttcgccagcttgccgaggttcgcaagaaagccgaaaaagagtattacctctcccacaagggcgcaacggaggtaggatgggccaattccgaacgagggaagatgtccaccgaagactacatgaaacaactcctctccgacccgaaaatcgccgaacagttcaatcgcgtgctcaccgagatcacggagcagggagagcgggacaaggccgccgttcggcagaaatacaccgacgccctgatcgacgaatatggcacggtggagcagagattggaaaagctcaaccgcgaatggacgaagaaactgtccctgataccgaccgagtatgtgaacaacgcgatcaagcagatgaatgccgagtttgcggcgttggaatctgccgacttcaaaaagtctatcaactgggaaagcgtattcggagacctcggaaagcagtcattatcgacgttgcagtataacctcgataagatcaaatcctacttcgcgtcgaacaaggattcgatgggcgcaaccgagatcaaggactatcaggaagcgattaccaagatggaagatgaaatcgcctcccgcaacccgtttgtcgccctgcacaagtctatcaaggacatcgaagccgcgaaaaacgaatatatcgccgcattgcaggagtggcgggacgcgcaggaagccattacgacggcacagcaggaatacaatgatgccctcaccatcgagcaggggcttcgggagcagatcaatctgggagaactcgcggctgacagcgaggaatacctcgaagccgaagagcgtttgaagcaggcgaaaaacggtgtagccacagcgacggatcggagcaatcaggccgaacagaaagccctgaacgcacgaaataacatcaccgtcgcctacaagagtttcgcaacccagctccgcagcgtcggaggcgtcgtttcggatattggcggcaaggcgaaaaaccttgcatccatattttcggatgatgtcgctatgggtatcgggaaagctatcgatactatcgacgcggtgctggatgctacggcgaccgttattgatgcaatcggggacacgggcaagagtgtcgccgaggccatgacgaccaccgcccaagcgtcgggaacggcgatgcaatcaacggcacaggccgccgcgacttcaatctcgacggtcgagaaagcatcggtaattcttgccgtcatatcggcagcattgcaggtcgctacggctattgccaacctcttcaacgatgatgaggagaagcagaaagagatcgagaacctgcaacgccgcatcgaccaactgcaatgggaactcgacaatgccgacgccgtccgattgcagaacaaagtcggggatgccgtacagagattgcgcgacatctacgccgagactacgcaggaggtactgcggctgcacctcacatcccagcaatacggcaacgcatggacgcggatgttcgcccgaatgcggtacgataacgaggtctatgagaagtccatcgagaagatcgccgatgcgtatgcaaaggtggcctataccgccgacaaagccctcggaggcaagaaatacgacgagggccgcaagcaactcgaaaaccttgccgagcagcaaatcctcattcagaagcagatcaacgccgagcaggacaagaaaaagaccgatcacggcaagattgaggagtggcggcgacagattcaggagatcgcagagcagatggcgaccatcatcaacgagatgctggaagacatcatcggctatactgccgccgacctcgcctcggaactcggaaatgcgttctttgaggccgccaagcaaggcgaggacgcgatggaggcatggcacaaaaaggtgaacgatattgtggccgatgtcctgcgcaggatgcttgtgcaaaagtatttggaggaacgcatcggcggcctcttcgacaaatacaaaaaggaatggttcgggaatgacggtcagttcaagggcatcgacgccgttatcgggtcgatgaatggatttgccaatgacctcaacaacgtaggcgaggaatttaatgcgatctatcaaggtctttccgaaagcctccgcgactatttctcggcggaaaccgagcgcgaggggacgagtaagggcatcgccaccgcgtcgcaggatagcgtcgatgagaacaatgcccgcctgacgaccattcaaggccacacctataccctcgtgcaaggcatggcagacctcaatcggacggggaatgcggtactcgacaaactggcaggaattgagaaaaacacctccgacaccaatatcaagctcgacaacatgggcaagaatgtcaaagacatcaaagatacggtcgatgacatcagcagtcgaggaatcaagattaaaccgtaatgatggaagaacttatcaaagagacgcagaaaaaatggaaagccgccaaattcgcggctcaatccatgtgcattcgtgatgcgcaattcgagatggctcaaaagctcggcgcttgcgatatgttcaagggcgacgaaactcttgaagaggtcgtcaagctgatgttcacgcctcgcggcgtagaatttctcacgacctacggcttccccgacatcgccaccctccgcaagttcaagaagcaccacccggagcgattcggcgtgtatatcgactgcggcaaaatctcgctttcagaggctcgaaaagtctttttgataggagacaccaccgccgagctgaaataccgtgaaaccgccgcaaatcggctgtttctgatgcacggggcacacgcctccgtagtggcatcgggatattcggtcgtcagggtcgaaaaggacaagagttccgaggtcagttacaccgttcaagacaacgcctcgatactatggtagggaagctgttcatagacgagcgggatgcgttctccgaatacggcatcttcgtagagcagtacgggtataaagcactcgtacagatgccgtcattcaagaaattagacagcaccgaatggctcgaatatgacggtgcggaaaccgacctcaccaatccgattctcgacagcaggacattctcgataccgttttgcatcaccgatattgcaggggcaggcgacctgtttgaattgctctccgacggggcgtatcatatcttcgacttcgtggaaatgggtaaatcctacaagctgcggctcgtaacgaatccgtccatctccgcgaatatccgcctcggacggatcacgctgaacttcgccgacgacttcccgccggtatatccgaccgccgagaccgatctcgacagtttgagcgaatataacgtgatcctgaaccaagcaccctatgcggcgtcccccgcaggattcaagcagaaaggctacgagctggatgatgtcgatttctcccgcttcggggtctatgtcctcgacggcacggatcgcaatattcagaaagccccgaatgtccgcgagaatctgaaagtgagcgtcgccgaccatgccggagtgatctatgacgatgaaaacgtcctctacaagaccaaggacgttgcgatgaagctcttcatatacgcggacaatgtcgctcaattttgggagcggtggtatgcgctttttacggtcctcttgaagcccgaattacgcaagctctacaatgacaatacattggaagagtataattgctattacaagagctgttcggtatctcgcctcgacatccgccgaaacggaaaggtttggtgcgagttctccgtgagcctgacattccccgattcacggcccgacggaaattactgcgcccttgcaaccgaggatagcgagatggtgatgaccgagccggaggagggccttattgttttccgaatttaacacacaagccaatgataaagaagaaaatatcggagcttcccgaatgcactacattcaaagggctatggactatcggcgtcaatgcgctcaacaagagcgtcaaggtatctctcgaatatatccaagcggttgtcgatgggatgaagtcggcgacgaaagatgcgaccgatgccaccagcgcggcaaacaccgcagcgcagacggctgacaatgccgcacaaaggacgcaggcggcaacaaccgccgccaataccgcgacagcgaatgcgaataatgccgccgccgaagccaatgccgccaaagaagattgcgaggaggtaatcgctgcggctgcggagttagagcctctgaacctcgtgcctacggcgatgacggtagaatacccctcgcgcctgctggtcggcaatatggcggagaatttcatccgcgcgacgctcgctccggccagcgtcaagccgaatgtattgttcctcggcgacgataaagctgtatcggtaactcccgacggacgcatcacgatcctcgccgccggaaccagcatcatccatgttatcccgacctgcaacgtagccctctacaagacgattcagatcaaagtctcgaagcctacggtcagattggtaacgctctcgtcgatccgcctcacggcaaacggtaatttcaggttcaactaaaaacaacatcaaactatgggaagacaaggctacatcagcgaatttatgaacggcgggcgcatcctctcgcatggcaagatcgagcgcctcgcagagggtttcagcctgccgaatgaaacgccgttctcgatctacatcaggcccaaatacagcagttccaccgtggacgccgtattgagcgtgaaatgctatcaggacgaggatttctccgacgccccggtagttctcaacgattggtcgccgatggcgatcacggcgattgcaccgaatgcggatattctcaacactcacgacctctattggggtgctggaacctacgtcgaaaaggtatgatcgcatcggtattcatatccctatcgcggcggctgcgccaatgggcggcatcccgcaagcagaagaaaatgcgactgaataccgcatcgtcagtgatgttcatcgcaacgaaaggcaaaacggttttcaaattcttaaacaacaaatagttatgacagcagaacaagaagctatcctcgaacagattatcgaggcttttcagaacggcaagcgattgagcgacttgcccgacgtatcggaaaccaacccgttcaacctcatctgcgaggtattggaggacggcgagagcaaaaaggccgccctcgcaacgctcctgccgtatatggaggacgagcgcagctacggcatcgagttcgataccgccgtatcatctccgacctgcacgcgcatcggcaacctctccctgcacaagagcctgccgatccacagccggatgaaaggctgcctactcgatgacaacggcgaggtcgtcgaatatctgaatcctgccaactggacgggtcagacacgcgacggatcgcggggacaggtcatggtcgagctgcctatgcactaccgcaaattcgagacggacggcacgaagcggcgagtgcggatcagcgagtaccccctccccggctatcatgtcgtcggcaagaggtatgtttcggcatacgaggcgacggtgaagcgcagcacaacgaccctctgctcggtcgtgaacatggatgccgactaccgaggcggcaataacaatacggcgtatgacgggacatatcgcacgttcctcggacgtcccgcaacgatgatctcccgcacgaatttccgcaactacgcccgcaagcgcaaggcaggttcgacggaatggaactgcatgacctacgacattcacaaggagctgttttggctcttcgtgatcgaatatgccacgctcaactcgcaggctacattcaatgcccaaaaggacagcaacggatatgcacagggcggcctcggagcgggcgtaacgaacatggtcgattggacgggatataacggcgtatatcctttcgtcccctgcggccataccgacgaactcggaaacggcacaggcgaggtcgcataccccgtcatcaatgaggacggatcgacccgttgcacggtcatggttccccgctatcgcggtgtcgagaatcctttcggccacatttggcaatggacggacggcatcaacgtccgcatcagccccaccgaggagaatggcggcgacgggttgagcaaggtgttcgtatgcaccgatccggccaaattctcggatagcggttacgacggctacgcccatgtaggcaacgaggcccgcgcagagggatatgtcaaagaagtgattttcggcgagggcggagagatcatgcccgaaacaatcggagcaggtactacgacctatttctgcgactaccactataccaacattccgacgacggaagctctgcggggtgtcctcttcggcggtcatgcgtctaacggctcgtatgccgggttttcgtctgcgaattcggatcacgcgccctcgtctacgtctgcgcttctcgggtctcgcctttgctttttacccgcctaacgtcatcacgacacgctcggccaaaaattaaacgatacgacaatggagaattatcaacatccgacagaagatgacggctcgctggatttcctgcaaattcccgccgatgagaccaacaagcatttcaactgcaaggaaacgacgcagcagaaattgattaacatttccttttggatttgcgactacatcgagggagtgaaaacgaaattcggctctgaccgaactcttgtcaagatcaagatgaatcgggatgatcccgaccgcgacgcgctgaaatttttcaccaattcacgggagatcaaatatgttctctccaagattcgggagatgaacaaatttccgcgcaaggtaacgatgcgggcatcggggccgcgatattatttggaataggaatgcaaaaaaggttggttgttcttgcgaggtgtcctcttcggcggtaatgcgaataacagctcgaatgccgggttttcgtatgcgaattcgaataacacgccctcgaatacgaatgcgaatatcgggtctcgccaatgattttcagaaaggtaaaatatagaacttttgggaacaacgaccctgcctcttggcaaaaaacatcacctcaaaaaggagctggtaaataattcggaatttccgaattactgaacgccccgattatgaaaagcaaagcgttgaaatgaaacgagtaggtaacttatacgagaagatcatatcgctggataacctccgtctcgccgatgaaaaggcaaggcgcggaaagctcaactcgtatggcgtcaagattcacgacaaggatcgggaagccaacatccttgcgctccatgaaacgctgcaaaacgaagcattccaaacttccgaatatagcacgttcatcatccatgagccaaaggaacggctcatattccgattgccgtactatcccgaccgtatcatgcaccatgcgataatgaatatcctcgaaccgatatgggtatctgtattcacgaaagatacatatagctgcatcaaggggcgcggaatacatggagcgatgcgagcggtcaaacgagccatcaaagaccgagaaaactcccgatattgcctcaaaatagacattcggaagttctacccgtcgataaaccatgatgtcttaaaatccgtcatccgacgcaaaatcaaatgcaaggccacccttcacctgttagattccatcatcgacagtaccgacggtgtgcctatcggcaactatttgagccaatacttcgccaacctcatgctggcctacttcgaccattggatcaaggaggtgaagcggataaagtattatttccgatatgccgatgatatggtattcttcgcatccacgaaaaagaaactccacgctctgcttgccgaaatcaaggagtatttgggcggcctgaaactcaccctgaaagggaacgagcaggtattccctatcgccgagaatcgcaaggataagcacgggcggggcctcgacttcgtagggttcgtattctaccacgctcaaacgctcatgcgcaagagcatcaagcagaatttctgccgtgccgccgcccgtctcaacaggaaactgcatatcagcgccaaagattacaaacaacgcttatgcagttggttcgggtgggcgaaagtcagcgattcgaaacatttactaaaaacaatcatcaaacctcaattctatgaaacgtgcattttacgacgcaaggccgcctaaatttcaggccgtaggaaacggcagctacatctaccgctgggacattcaggaggagacctccgaaaccgaagtcatggccgagggcggggatgaatcggttgccaaaatcgcaacgatccattactcctgcttcgaggtcatcgtatgggccaccatcacgagcaacaagatcacggaggccgccatcggcgcgatgtggaacgggaatgacgagcagaagctcatcaacgagtacaatgccgccaaactcggcctttatggaggctctacgacgagcgaagaggcaaaggcgaagatcgcggcgtacaaagaatttctcgccgcgagggccgcgttaaaggcccaaatcgacgccgattgcgcagaactgaacatcgagtaagaacagatcatgctgaccctgcatttcaacaatacgacgctggacgtacaggagagcgatagcagctaccgctatcgctccctgatgtccaaaccgcaactcgtcctgaaattctccctgaccgaatttgtggagatacccgtcggggcgtggtgcgagtttatgggtgtgagatataccctcggatcgcccgaaaacatcaagaagaacgggacgcgcaacatcgaatacacgctcaccctcggaactttggaggataatatggggctgtataagatgctcaaccccgttgataaacgcctcaaatggtcgatgtgcgccaagcctcacgaactgatcgaggcggtggtatggaacctcaatcatcgggacggagccggagtgtggaaagtcggctcgtgcattgatgctgtcgagcagacggtagagtttaatcatacctacgtcgatgcggctttgcaggacatcgcaaacaaattcgagaccgaatgggagatcaacgactataccgtttctctgcataaagtcgaatacttcaaagatgatcccctgcctctctcctatggcaaaggcaacggattcgttccgggtgtgggccgcacgacgcagggcggcgaattgccgattaagcgattgtatgtgcagggcggagatcggaatatcgaccgctcgaaatacggatcggcggaactgctcctgccgaagtcgcagaccctcgtctatgagggccgcacctaccaatccgacgcagaggggtattccatcgagcgcatcgacaagatttccgatgcggtcaaggaggatagcctcgattgctccgagatatacccctcccgcgagggcacggtatcggcggtcgagtgcatcgacgccggaaagaatttctacgacatcatcgacagctcgatccccgcagaacttaacttcaatgattacatcatcgagggcgaaacggcgacgatcatctttcagtcgggaatgctcgcgggcaatgacaagcagttcgagttcaaatataaccactcggagcggcggtttgagatcgtgccgcaggagattgacggggttacaatgccgaatgagacgttcaagcccgccgtcggggatcgctatgccgttttcgggatcatgttgcccgatgcctatttctgcaacaatgcggatcagacgggcgcatcatgggatatgttccgcgctgcggcccgcaagctctatgagaatgaagacccgaaattcacgttcacggggacgcttcaaggcttatgggcgaaaaagaactggctccgcgtcggcgggcatctgaaagtcggcggctacatccttttcagcgacgaacaattcgtgcccgacggcgtttcgatccgcatcacgggcatcaaggaatacctcacctcgccgtattccccgatcctcgaaatctctaactcggtttcgggcaagagcctgtcgtcgcagcttcgggagatcggcaacaatgagatcagcaccgacaatgacatccgaaatgccgtgagctataccaagcggcggttccgcgatgtcaaggagacgatggagatgctggaagattcgatgatggataacttctcgaactccatcaacccgctcacggtacagacgatgatgatgctcgtcggagatgaaagcctgcaatttcgattcgtagcgagccgcagcgatctcacggccgtaggcgacgggataagttatgacagcgcgacgaagcaactgcatatcccgcacggcttcatccagcacatgacgctcggcatcaatacgctctcctcgtcgcacgatgattcggagtacaaggtttgggaaatgggcgaatatctctcgccctaccttgccaacggcgaaacgaagtattatctctatgcaaaggtcaatcgcgccgccacagccataaaaggctctttcctcctttccgaccgtgcgatcaagatgaccgatgttgcggggtactaccacctccttgtcggcgtcctgaatagcgaatacgacggtgagcggagctttgcctcgctgtacggatttacggagatcatgcccggtcgcatgacgaccgataagatcgtatcggccgacggcaacaacttcatggacttcctgaataatgcctttcgcatcgggaatagtagaacatacattgattggaacgcagctatcgcgaatgttctgtcaatgagaaatgcgaccatacaagtctcgaatgccgccggacagactatgatttattttagcggcgtggatggttccggccaactcgccaaaggcaacatcacatgggattccgccggaaatatcaaagccaaaggaggcgcatttacagatgttgttatcaacgggtcgatgtgcacaccatttaaggacgggtattttattctcaataatacgggcgggatcagcgtctccatgcccggattacagaataacaactgcgttgtaatacccggagatgttgacggcggcatgtatactgcattcaaaataccgttcaccaaagagtacaatggattccgagcgaccatcctcaatacgaattggggaactgccaaagcggtaggccctatttcggctgtggctccatcaggatattattttcacgaagacggtgaaacaatcagcgatttaatcattgaagcaaacgagggagtagatattatcggcataggcgaaggtaacaatttcaaaggatggtgcgtgcttaacaggttccgctacggcataaccaattcaggcgagggcttccagttgaaagccatattcgctggcaaagtagaattttcgggcggtataccgcatctcaccaagcagaagcggtataaccaaaattggtacggagccgaaaataaaaagtgtcaattatcgtatatgacgaacgcgccacgctattgtaccatatcgtttccgtccggtactttttcatcggccgataaatatacggtgctattaagtggtgaactactccgtagcaataatggccccggcgtatatgcgtctgtaattaaccgtaccgcaaattcatttacagtgtatacaggtgacgacgcaagttggaatgatggaaatttcacttttatcgtaatatctacgcatttatgggaatagtgattttattttttaccccaaataaatacctattaggtatcatttaactacttttgtagaaacatttgcatatatggaatatctcccctcaatcatcagcgccctcggaaccatcctcgcggcatggttcgcctataatcagtattccaagaacaagatgaccgatttgaagatcgagaaatggaaagccgacgaagaaaagaaaggaatcaagcgaagcgagagcatcgccaagatatatggggtgctgtggcaacttctgcacgacatgaatgccgaccgcgtatatatcctccaaccgcacccgctcaccaataatctgttcttgtcgatcagcttggaggtgaagcgcaacggcatctcggcgatcaagcccgacatccaacagttgcctatggccgatgtagcggcatttgccgcagagttggcaagtcgtgatttcctcttctatcgcaacgtcgaagcagacgtaaaggataagcgggcgcgggctattatgacaacgaacggatgctgctcgaccgtcatcaagcggctggccgacgaggagcacgattggatcggttcgatattctgcgggttcacccacgaggccgaattacagcctacgaccctccgtcagcagttggccgacgccgcgaatctcatccagtacattctacctgaatacaaatagttatggagacaatcatcaaaatttacaaagccatgatttcatggctggggcatatcgcccccgacaagctcctgcatttcatcgcaggggcattgatcgcggcgttcttcgcgctcgtcatcccctgcacggcgggatggtgtctcgcgttcgccatcgccgccggaatcgcaaaggaagcgttcgaccaatacctatacaaaggctgggatttcatcgacctcgcctatacggtcgccggaggcttgattgttcaacttttcgcatggatttgatatgacacgggacgaaattttatccgagatcaagaagtatttcgacatcgacgagctggtatgcaaccacacgttcgagaaatggggcgacaaggcttggcagttcctcgataccgactttctgcattgcctgctcatcatacggcgggacatcctgcaacggccgatgttctgcaataaccacgcgcacggcactcatcagcgggggctacgctgcaatatgtgtcagttggtgaaaggcaagacggcggtttatctgtcatcccacctgctcggcaaggcgggcgatttcaccgtgcagggtatgacggccgagcaagcccgaagtcgtattaggatgatacctgcggcgttcccctgcaacatccgcatcgagggcggcgtctcatggctgcacttcgacgtgctcccgcagagtggcatcacacagaaagtgtacgaatttaaggcatagatcactatgaaacataccctccttatcatcattctcgcaatcatgaccgcctgctgtccctgcaagcatctaacgacctcgaccgggacgcgggacagcctccatatagagatcaagtaccgcacaatatggattcccgacacagtacgggtgcgactgccagccgagcgaaccgaacaaaccgtccggcaggattcaagccatctcgaaacctcggcggccgtatcggatgcaaggataaaccccgacggatcgctgacccactcgctcgaaaataagcaggaggatcaagagataccgacgcaacgaccgatagaatatcgggatagcatcgtttatagggatagagaggtcgaggtcgaaaagatcgtagaggtcgaacgtaaattaacttggtggcaacagacgcaaatacgcggtttttgggtcgcaatcatcgtcattgtagtattgctgcggaaaaagattttacccctgattcggcggtttatttaacatcggcaaaacgaattttaagcctattatgataatagccacgctatgtgaaaatatttttgtacctttgagaaaatattgataatatagcgtttgctattgttttgaggtttaggaaatcgccaatttcacaacggacttaaaaacgatggtaaatgcctgcgcatagcgtgggcatttccttgttagtccgtgggtgtttggcgatacctctaaaccaacaagaatgtccgcgctttttttgtggactatccgtaagcaacagcgaacatgttgatttcggataatatgaacctcaaatccgcaactacgcgcctaatatgatacagaagcgaaaagaatctgcatcgttagtaaaaagggggcacagtgcatcgaatgtcaccataaagacatataaatgccccttaccccaccatgcgacttgaggcaatacgcaaaatcacgactataagttgtcggtgttatccaaagtcattctggaacacattggcataagcattgttgcatgaatagatattcagcacatacttccttgatgtcctgacccatttggctggcacagagatgaacttaaagacaaacgtcttgatgcggcttgttgctttgagtccgaacctcttcacgtcaagcctcgccatgatgaatttatagaagttgcgtatgagtgccataagcagaagaaacaccgtgttttctcccataaaggattttggaagcctgttccagccgaatccgttattcatatcatcgaagatgcgttccttccctccacggaggttatagaattcgacaatctctttctcggaagactcgtagtcatttgtaaggatgcagcggtaggtgtattctccttcccacaggtcgagttcgccgtctatccgcttctgtctttgaatcacaagacggtatgccttccctttccatttctcgatgagaatggaggccagctcaaactcaatgccgcccaattccactttcttccaacctctgagggcaaagatgtcattgtagagcgaactgcatcggttagcacggatatagaaggtcttgcagtgtttagcaatctcttccactatctcttcagaacacgagccgcaatcagctctgaaacggttgataataagcttgttttgttcaaacctttcaaagaacctcttcagcgtgtccttctggtggaaacggacatttgtgttgccgtcgctgttctcaatgccgacaatcaagttgccaataaccgccacgccagggcgataaccaaggaacttcttgtatgtaggcttcgcatcaaacttctcagcctctatgaactggtggtcgaagtcaacgtcatacccctcgccctctttcagctgccctgtggacaataggcaattgaggagcagtgtattcagcttgtctgccgtgttgaagtcgtaggtcttgccagtgtcggatgtgtaggaaatgttatcctgggtcagttcctttatggctctaagaatcgtgtcggcactgcatgtgcgaagtgtcggatgaagcgaaaggtggtacatcagatgagtggtgacatcctcgatgcatgagccgccacaaaaataaacgctcataagcgaacggatgatttcgctgtattgataaccatacagcctgcatctcataccgagggttgagtcgattacagatgagagtctggagtcaaattgctccattattgaaaatattcctccaaaaggagtgagtttctcggatttaattgctacctttgccatgtctgtcgggtttgatacatattttgatttgcaacactaagataggtgaaaaatctgacatggcaaattcctgagcaactttttgttgctcaggtacttaaaaagttatatttgtaatagtgttgcggaattaaggatcatcaaaaagaacccctacgagtttcaggatttggttgcggctctcttgcgggcaatgggctactacacgccgtttatcgcccccaaaggcaaggacggaggcgttgatataatcgcctatcaagacccgctcggcacgacctccccgcagttgaaagtacaggtaaagcactatcccacctcggcgatctccgtcgatgtcgtccgtagcctgatgggggttctcgtcaaggagggcgaggtcggattgctggttacgtcaggaacattcacgagtgaatccaaaaaagaggcccgcaacgggcatcgctgcctgcgcctgatcgacatcgacgagttcattgacctgtggattcaatactacgaccgcatgagggaggaggacaaggccctgctcccgataatccccgtatattttctgaaatcataacatataccatcatgaaaaagattctatctatcctgctcctcgcgctctgcttcgtagcgtgctcaaaggaggaatcgagggagccgcaaatggacgagaccacaaaaaagatttggcaaaccttaaacgggacatacgtcgggttccatgaggataaactctccgcagcgggttcctatacggagaccatcgtcttccagccctacgccgccccgaaagagatcaagcctaccgtcgtccttttcccgaactttaccgcttacggcacggccaagatcaccgacacgagatttgaggagatcagcggctcgtcaaattgctattattcgattcatgtcgcatatgctggggcggaaccgaccatctcattctttgaatatgggaacgacggttcggtaataaacagcgaagacgaaagaaatatccgcatcatagacgcctcatcattcaaaatgtgggactacggcctgaccgaagctgaaaatgcaataatttacagcaaacaataagattctcaaataaattactacctttgcgatactgataacacccgtatcagttgcgttgaatacccctctcgacaaaccgacaaatcgggcgttgagagggtttttcatccgattttgttacctgtttgttactcggcctccaaagtggcgcacattggttgccgataaatctgaatagcatagcgcattacaaccgaaataggccgtaaataatagattttgcgtgggaaaataaaattttggcatcatgaaaataatgcccacagcagacatgccgggcaccgcggccgcacgacgctgcacgcgggtataaccccatgcggcgccccgcaccgacctcaggacacccatacccgaaacggcccggcacgcagaaattacgcaacagttccgcccgcgcacgggaggatataatcccggattatgccggccgggaacggtgcaccgcaactgcggcgatacctgcccccgggacttagaaattgatctggttgccttccgcgaacagggaatcgaggatcacgtacaactccgactccagttcttcgggttcgaggtcaccacccagcgagaagaatttccccgggggcgtgcaatactgcaccgtgctggccgcctcgcaggattcgataccgcagacgatcaccgcatcgacgtcgtcctcatggcgcagcatggcattgtagaaggcgagcaactgccgcggggtgcccatcggcggcaccagcaccacggttcccgaaggctggaacttatcgggtgtacttatcagtttgaggccgtatttcccggcgattttcccggcgatttccgccgatactccatacagtacgatattcataaccatcgttatttacaaaagacatggccgcatcccaaaattcattacagcatcgtgttccatattaccatgcctttccggtttgtcaattctcaaaatttccgccgcacggcttgcaggaatacgtccgggttccgcccggccgcgcgcctgaaccttgcatcgaaaaacaggacagtaatccctgcaaaacgccgattgcataaaatcccaaagcatcatacgaccgaaaccagacgcccagtccgcggggctttccgacaacgaatcgatctggcaggtcttctgactgacccctgtcccgaagccttcccgccccgcggggcagtggctgagatattcggaacgtcacggggcttcacagcagcgggactgtccgggatttgcacccgattcccttttcacaccctcccgcgacggggagcggagaaccaaatctgaagcaaatatagcggattattccgaaaaattgtccggaaatccggattattttcacaaaccggcaccacggcacggtaaaaccgctatttttacctcgtggatatttcgcttccatatacggcccgggatttttcggcggaacttcccgctgccgattacatcgcccgtttccgcgatgccgaacggatcgggggctactgccgcgcctgccccaattacgggcgcagctggggatgcccccctttcggattcagcgtcgggaggtacctttccggctacgccacggcacagctcaccgttacgaaaatcgttccgcaaaagcaggggctcccctcgtcggaagccggacggctgatcctgcccgaacgcagacgcctcgaacagcaattactcgggatggaacggcagtacggcggcctatcgttcgcctacgtcgggacatgcctccactgccctgaaggcacctgcacacgtcccgacgggaagccctgccgacaccccgaactggtgcgcccgtcgctcgaagcctgcggattcgacatcggcaaaactaccgccgagctcttcggcatcgacctgaagtggggcacggacggcaaattgcccgaatacctaaccctcgtctgcggattcttccacaacgccggacatgtgacatggaacggataaaggcggttttcaactggagcggcggcaaggactccgcccatgccctgctgcgggcgatgcagtcgggcaaatacgaaatcgtcgcattgctgacgaccgtaaaccgagacacgcaccgttcgaccatgcacggcatcccgaccgccctgctgcaggcacaggccgacagtatcggcatccccctgcacatcgtcgacctcaccccgaaaggcaatatggaggactacggcgccgccatgtcccgtgccgtggagcatttcaaggcgcagggcgtaacctgcttcatcttcggggacatcttcctgcacgacgtacgcaaataccgcgagaggcagctcgcaccccacggcatcggagtcgcggaaccgctctggggaaaatcctccggcgacgtgatgcacgactttctcgcctcggagctcaggacggtcatcgtcaccacgatagccgacagcctcggtgccggcgccatcgggcaggaaatagaccccgcattcatcgcctcgctgcctgcgggcgtcgatcccaacggcgagaacggcgaataccacacattctgttacgacgggccgatcttccgcacccccgtcccgttccggctcggcacgcctttgcgccgaagttaccgcatccgccttgacgacggatcggaaaagagctattcctattggttcgccgacctgcagcaggcataatacggcaccggagcgggaaattagcctcagggcgctcccccttaaaatattccgattatctttgcccccgtaaaaccgatgtagtgatgaaaacaaagacgaacggactgcgtgattacctcaaggccaaccgcagggcaagccgtgaggccgagatcgggaatcacgaccgcccggtcagtttcagccgggtacacaagtcgaaaaaggtctatgaccgcaaaaagctgagggcagatgataaaaggcatctgccttcatcgtttccatgcggcggccgacaggccggaagccggggacgaaacgggttcacggcacacctactatcctccccaccctcggcaagaaccggggctaacgcttcggcgcgcggatccgttgtgcaatgagcgtatcggcggcgtagcggccagggccggcagcgtacatcaggacgaagacaaccaggtaaaccagcgccagctcacgtgcggcaaagggatcgccgccgtgtaccgcaaagaaagccacacacatcgtaaagaccatcgggatcagcgccagccggtagaataacccggccacacacccggccgcgcagacgacctccccgaaaacggccagcacgagcgacacccggctcccgacacccaacggatcggggaatgtcgccgagagcgcctcgaagttctgcaacttggcgatgccgtgcgacatcagcagcaggccgaaaacgacacgcgcagcaagcaacagccacgagctgcgggaatcccggggttcccccgggaacaggaaattcaggatagcggacatgatagcggcatttagtactgcgaagatcaaaataaataccggattttccaatatttcgatgcataatctcccgctgccgtaccatgcccgaccccggcggcaacatatacccgttcccgggacacggcggcccgcaatttttcgtacctttgcacacgtacatcaatattccaccatggttcagcaagcagaattcacactcacgcctcgcagccgcgggttccacctggttacggacgaagtactgtcccacctcccgccgctgcccgacgccggactggtacacctctttgtcaagcacacctccgcagggctttcgatcaacaaaaacgccgaccccgacgtgcgtaacgacctcggggcgatcttcgaccggctggtaggcgaacgcgagacctactacacccatacgctcgaaggcgacgacgacatgcccgcacatgccaaatcgacactcacgggcgtcgaactcaccattcccgtcacccgcggcaggctcaacctcggcacctggcaggggatttatctctgcgagttccgtaaccgcgccccgggccgccgcatcgtcgccacaatcatcgcgtaaagcgccgtcaccgggcgaagcacattgggcaacgaagcagccgctgtgcgaaaaagcggtggctggccgggaatttgcgtatccccgcaacaacaccaatgctgcaacagccatgacgacacagaccaaaccgcacgaccgcctcaccgccgcagagcggcacgaacttcccgattcggcattcggcatccccgaaacgcgcgaattcccgctcgtcgacgccgagcacgtccgtgcggcggaagcctatttccgctatgctcccgatacggagaaagccgcactggcgcggcgcatactcgccaaagccgccgaattcggcgtgcacgtgcaaagcccgaccatccgcatttgggccgaaaagccctgacccgcacggccggaacagcagccgggccccgccaaccccaacaacaccccaaccccatagaaacgacatgaagcggcggcaggggtattcctgccgccgcttcatgcaacgatcatcccgggcacgggcacccggctgcaccttcccggctccggcaccttcaggcacgttccggccggcatccgaaactcccgcccgaggtaggcgaagggcgcggggttgcccccgcacccctgcgccattattctttggaggtcgaaatcaccagttcgcccttgttcagcgcatcgtgcgacacgaaccaaccgtcgacgggcttgccgccgcaggtgatgcccgtaatcttacgcccctgaccgtcgtggcggatcgtccagcggttgccgtcgcccagcgcgacctgcaccttgtcgaacagcggcacggtcacgatatattcggggtcggccggcgaataggtgtaaaggccgatggcattgaatacgtaccacgacgacatctcgcccgcatcgtccataccgcacagcgccagcccttccggccccataccgtagaagcggtcgagaatgtaatccaacaactcctgcgaacgctcctggcgaccgatgaaataatagaggtacgggaaactgtggtcgggctggttgccgtggcagtactggccgatgaagcacgagaggttgtccacttcgtatcctttccacggaatcgagaagagtttgtccagctgttcgccgaacgcctcgcggctcgggaagaggccgatcagcccctcggtgtcgtgcggtgcgaagaacgcctgctgccaggcattcgcctcgcggtacatatattcatagtagggatactggtcgtcgaaaggcgtgatccactcgccgttttcgaggcgcccgcgcatcagccccgtcgaggggtcgaagaggttcttatagttcgacgtgcgcttcatcagcatgtcgcggttctccttgtcgcccagcgcatcggccaagagggcgaccgcatagtcgtcgtagctgtactccagcgtcttggtgacggcggccttgcagaccgtccacgtcacggggttctcgacgtccatttccgaaatgtaccccttggcaatatactcgtcgagccacgggcggctcgggccctgtaccgtagcgttgcgcagcacgaggttgtaggcacggttgacgtcgaagccgcggttgccgcgcaggtatgtcccggccacgaacgccgaagcgtggtcgccgtggaagaacgtgggcatgaacccgccccgtttctcgcccttgtcgacatcggagctgatgacgtcggccgccacatcgggagccagcatccccagcaggatcagcttattgcggtagtcgtcccaatacgacgggcccgtatagtaacggaaaccgggattgatgacctttccgtcgacatcggtgaactcaccgttcacgtcgctgcgcagcgccggccagaggaacgaacggtagaggctcgaatagaacagccccttttcccgctccgtgccgccttcgacgcggatccgccccaacaggtcgttccacgtcgccgtagcctcggagcgcacctcggcgaaactcttgccgagcatctcggcctcgaggttctcgcgggcgttcttctcgctcacgaacgagaacccgatccggagctccagtgccccgtcaccctcgccgaaacgcacgatgcgcacctcgcggtcgccctcgacgacgggctctatcccggtcacggggcggttcgccacggcgtagaaatacatcttctcgccggtctgctgccagccggcgaacacgttatcaccctccttgcggatatcccacgcacgcacatgctcgttcgaacgctgcaggtctgccagcaaggaggccgcggcacccgcgggataggtatatttatggaatgcacagcgcagcgtcgagctgagctgtgcatcgacaccgtaacggtcgaggaatacctggtaatagcccggggcggccgattcgcgctcgtggctgaacggcgagcagtagtcgcccggcgtgggcgtccccgtcacgggcagcaggggaatatggcaaaggttccagtgccccttgttggtgtgcgtaaagccgtagatcacggaatcttcatactggtaccccgcaccgctgcggaacttggtgacggggctgacctgcaccatggcgttgggcagcgacgatccggggaagacctcggcgccccacgtccgtttggtgggtttgaatccaaggtcgacgctgtcccacagcgtcgccgtccccagcatggggttcacatagtcggtaagcggcttctgcgcaggggcgcaccccacggcaaaagcgaaaaaagcgatacaaagtctcgatttaagcataagcggtcagatttacgtttcagacaaaattagcgctttttgcagggctcctgcaagcctattcgggcaaaaaagctatctttgtcccgcaggcagactactcttgcacaaaatcggacaccaaggcatggaatcgctttcgcaaatactggccgactggggctattggggacttttcttctcggcattcatcgccgggagcatcctcccgttcagctccgaagccgtgatgatcgtgctcgtgcacatggggctcgacccggtattgtgcgtcgcaaccgcatcgctgggcaacacgctgggcggcatgagctgctactggatcggcacgctgggaaaaagcgagtggatcacccggctgggtgtgagcgaaaaacagctggcccgggcgcgcaggttcctcgcggggcgcggggcgctgatggcttttttcgcatttctgcccacgatcggcgaggccatcgccatcgtgctggggctgatgcgcagcaacgtctggctcacgggcggttcgatgctcgcgggcaaggccctgcgttacatcgtcgtactggcgaccttcgaaggcgccgcatcgcttttctgacatggatctcgaaattgtaaagacagacacaccgcggcgcgacctgctgctgctggccgacgaatcggaagagtccgtagccgactatgccggccgcggcacaacctatgtcgcacgtcgtgacggggaaatcctcggccagtatgtattcctgcacacgcggccgttcacggccgaagtggtcaatatcgccgtcgtccccgaacaccagcgcaagggcatcgccacggccatgctccgccacgccgtcgccacggcccgggcggccgggttccatcttctcgaaatcggcacaggagatttgggcgcgggccagattgcgctctacgaacgctgcgggttcgtccgctgcggcgtcgacgtggactatttccgcaaacactaccccgttccgtttttcgaaaatggcgtcgaatgccgccacatggtgcgcctgcgcatggaactcaaataacaggttatgtcggtcagttggaacccgtggcacggatgccgcaagctcagcgaaggctgccggcactgctacgtctaccggcaggatgcgcagcacgacaaggacagccgcgaggtacgcaggacagcggctttcaacctgcctgtgcgccgcacgcgcgacggacgttacaaagtcccgccgggcgagatggtctatacctgcttcacatctgatttcctcgtcgaggaggccgacgcctggcgcgccgaagcgtgggagatgatccgcatacgcagcgacctgcgttttttcttcatcaccaagcgtatcgaccgcctcatgcaggtattgccgcccgactggggcgggggctacgaaaacctcgccgtgggctgcacggtcgagaaccaggcgatggccgactaccggctgcctttgctgctggacgcccccctgcgccacaagctggtcatctgcgccccgctgctcgggccgctcgacatcgcacgatacctcatccccgggatcgaagaggtatccgtcgggggcgaatcgggcaacgaagcccgcccctgcaattacgactgggtactttcgatccgccgccaatgcgtcgcggcaaagatccccttcgttttccaccaaaccggtgcacggcttgtcaaggacgggcgcctttaccgcatccgccgcccgtaccagcattcgcaggcccgcaaggccgggatcgactacaaggcaaagcgatgaggtgagcccccccctatccgccctgcaggcgctccggcatccggcccttgttttcccacatcccgctcccggccctcttcacaaggccattcccgcgcctccttcccggccggtacggctccggcatgcggtaactcgctcccatatcagccccgcaatctccctcgggaatcgcccttgcccgacacctcgcccgatacctcggaatcgctttccccggtatcatgcctctcaatagccccccccggaatagcttctccccaatagctttccaggaactgttttcccagccattctgcccggacacacggacttccggacatccggcaaaagcaaccgccccgggaaaccggggcggcagactcagcaatcaggttcgctgcgaattattcggttgccgtggcaagcggcgaagcctgctggtaaacgcgagccgccagttccttgtcgagcgtataaagcccgaacttattaccctctacagcctcgcaggcggtaatcatgtcgcgtgccgactcctcctcctcgacctgctcgtcgacgaaccatacgagcatgttcgacgatgcgaaatccttatcttcggcagcgatggctgccaggttgttgatcatcgaagtcaccaccttctcatgctccagcgtgtccttgaacatatcaagcggcgacgtccactcggtacgcacctcctcgatcggcttcagcacgaccttggcatcgcgcgaattgatgtagttcatcaggatgcgggcatgatcctgctcctcgcggaactggacgaaaaaccagttggccacacctttcagccccttgttctcggcgtccatcgacatcgaaagataaagataggccgaccacaattcggcgttgatctgcgcattcagtgcgtcatgtaatcttttgcttaacatagtaatattgttttaagtttgtgtttgtattttctcttcctgatacaaatatacaatagtttctactaatttgtacgaaaaacacatcatattattttataacgatatagctctatgttataacaaaaaaaaacggagcccgcacctccgggatgcaggctccgcaaaagcatacgggacgatcagagcagggtgccgtcctcgaggatacgcaccgtcgcctcccgttcggactgcgggtcttccacctcgatggcgtaccacacgcggtcggggctttcgtagaggtcaacatcgtcgatcacccacgtaccgtactgcgatgactgcaaagtccgcctcaccacgtccggaacctccgaaaggcgcactccggttttcgtccacagccaggcgtcgcccgtaccgaagcacacctcgagcgctttcccggcgaagatgatatcgacctcggtatttcccttctcccgctccgcatcaacgatacgggcaccggggtatttccgggcgatgaagtcgctgatcgccttcgacagttcctgcggaagcatatcgccgtgatcgtcattgccgtccctgtcgggcacttcgcgcaacagcacgccgtcctcagaataatagaggtcgaattcctgctcggcacgttcgacttcgagcacatagaccgtctcctggccgttgcgcagcagcttatccacgtcgtccacatgccaagcggcataatcgccggcttcgtaggcagtacgcaccgcccggggcaactcggcataggagatatcctcctcggtcatgtaccatttgccggcggcatcgaaccatgctgcatgaccgtgcccgcgctgcggaaatcggcgaccatatacccgcccttgtcttcccattcgacatggcttgcagcggggaacatctccccgaaagcggcctgcacggcggccggtacctttaccgatttactgtcgtcgtcacaacccgccatcacacccagcgacacgagtcccattaccaataccatgaatttcttcatacgattccgaatttgaggttaatcccggggttaaattaattgtcgatgtctatcagacggaacttcaggtcgaatttcaggtcgaggccgttgtccagttcgacttcgtagtcgcggcggtcgcggtcgattgccgtgatcttgcggtcgggatagttcttggcgacatagtcgcggatctgctgcggtacgatggcggccggcacctcaccgtatttgcattcaacgtctttccattcgccgttcttcgtgaattcgaccttcgcgccgttgacgaacacgaccttgtaatccttgtcgaaaagttcctcgtccaccttggataaggagacttctacgccggcaaaatgcgccttgataaattgctgtgccgtagccggaagttcgccgactgcgatcggacggtcgttgcccgcgaatgcgggggcggaagttaccatcagggctgtgcctgcgagaatcatcatgagctttttcataatcgtttcaatattaggtttgacttgtgttcacagtgcaaagttgcgacctaaagctgaaatgaagttgaaataatcggccccgatccgtttttttcgttttttatatccggaaatgtaccgagaaacagtggcacctatttatataagagtatcccacgcgcagcccgtaaaggcggcacacggcgtcgacgatcgagaggccgagccccgtcgagccctccttcttcgtcccctggtaaaagcgctcgaagatatgctccgcgtcgagtgcgcccccgccgccgctgttgcagacgcgcagttcatgcggggcaacagtgaccgacaccgtcccgcccctgtcaccgtggacataggcgtttttcagcaggttcgacaccaggctggccgccagcgacggattcatccgcacaaacagatgtccctgctcatgcagttcgaaacgcatttcgcgcccggcgtagatctcctccatatcctcggccatacgtcgcacctgggcgttgaagtcgacctgttccgtctcggggaattgtccgttctcgatcttcgaaagcagcagcagcgagcggttgagccgcacgaggtagtccagcgtcccctgcaccttcagtatctcgccgagctgcgcctcggtcaacgccgaaccgtcgtccacgagcatctccagccggttgcggcaaatggccagcggggtctgcatctcatgcgaggcattgccgataaattgtttctggcgttcgaacagggactccgcccgctcggcataacggttcgccgcctcgttcagccgccggaattcgacgaccttcgtatcgttcaccagcggggcgttcttcccgcccacggtataactgtcgaaccatcgcaacagggcatagagtggccgcagggtacggtgaagcaccagcacgttgaccagcaggatcgccagcaacaggaacagatagaggtagacgatccaccagaggatcgcttcctgcaagtcgtccttttcgatggtcggggtcatcacggtcagttccttgtaacgtcctccgctgtcgcggaatatcgtccgcagcacccgcgccggttcctcttcgtctttctcaggaataaatatctcctcgtcgctgaaaaccatatgctgccgcccttcggcatactccgccgacacgtcgtgcaggtaatagccgttgttgctgcccgaataggcggcaggcagttccctccccgcgaggctccgcgtgaccagcatctcggcatagttctccagcgaatcgtccacctcgtcgttgatctcgtcgatcatcgtcaggtagaacaacacggcccaccccgccagcaacagcgaaagggcccaggacatgtgcaacacgatgcgatagaccaacctcatggggcaacgagtttatagccgaatccatagacggcccggatctcgatgtcggcctgcgcgtcgtggagccggcggcgcaggttcttcatctgggcgtatacgaaatcgaaattatccgcctggtcgatatggtcgccccacacggcttctgccagcgtggccttatcgaccatatggttcggacggctcatgaaatagtagaggatgtcgtactccttgcgcagtagttccacctcgcacccggccacctccacacggcggctgtcggggtagaggcggacattccccacgtcgaggctctgctgcccgtcgcgctggtgacggcgcacgacgctccggatacgggcgctcagttccgccagatggaacggcttgggcaggtaatcgtcggccccgagctcgagcccctcgaccttgtcatcgagcgaatcccgggccgaaatgatgatcacgccggcaggtttgcgctgccgcctgagctcttcgagtatccgcaggccgctgccgtcgggcagcatgatgtccagcaggatacagtcgtaatcgtatccggcgatcttttcgagcgccgatgcgtaatcggacgcctgctcgaccacatactgttcgcggcacagcgtctgcaccatgatctcccgcagggagggttcgtcttccacgatcaggattttcataagcagcaaatattcttcggaacaaagttacattgcgaatccgaaaagaatctgaaaccgcagcggcaatgcccaagtccaaatatacgaaaaaatcttgtacccgccgctccggcacggacagcccaggcacggaaaagggcggaaaccgtacaagtttccgccctatccgtgctttcggccgggctctcgcccgcaccggattatttctcggcaggatcgacctggcaggctttcgaaccgtcatatgcccacttcacatagatggcaccccacgtatacccgccgccgaatgccgacaggatcaggttgtcgcccggcttcagctccttctcgtagtcgtagaggcacgaggggatcgtcgccgccgtggtattgccgttgcggtcgatattgatcatgcacttgtcatggtcgagccccatgcggcgggccgtagcgtcgatgatgcgcaggttggcctgatggggaaccagataacggatgtcgtccgaggtaaggttgttgcgctccatgatctccaccgacacgtcggccatcttcgaaacggcggccttgaatacggcgtgtccgtcccacatgatcgtgtgccagttattctgcacggtctcgatcgaagccggatagcgcgatccgccggccttcatgtaaagctgcaactcgcccgagccgtccgaacgcaggatttcgtccagcacaccgtaaccctccgtattgggttccagcagcacggctgcggcgccgtcaccgaagatcggacaggtcgaacggtcggtatagtcgacgatggtcgacatcttgtcggcaccgaccacgaccaccttcttgcacgatcccgactcgatgaacttggcacctgtcgtcagtgcgaagagaaaaccgctgcaagccgccgaaacatcgtacgcgaaagcgtttttgcaacccgcctggtcggcgatcagattacccgtcgaagggaagaacatatcgggggtcaccgtggcgcagatcaccagatccacctccatcgggtctacgcccgccttgtccagcaggttgatgaccgcgcgggcacccatataggaagtgccgacgccttcgcccttgaggatatggcgcgtcttgacgccgatatgcgacatgatccactcgtcggacgtgtcgaccatggtgcttaattcttcgttggtgaggatataatcggggagatatagacccacaccggtaattgctgctgttatcttgcccattaacttttctttacctaatgattattaatttttgaaagcgcgctgcaacttagcggtcagatccgccgtaatgcaccgctcggccgaaaggatcatgctcctgatcgccttgggcgatgagataccatggccgatgaccacaggcgcattgacgccgagcacgggcgtaccgcccacgttctcgtaattcatcgcgtcccagaaagcgtttccgccgccgagtttcttgttgatgtggtagaggccctcggccatcttcagtaccgtattgcccacgaaaccgtcgcagacgaccacgtctgcgaccttgcccgtgaagaggtacgacgcctcgacgttacccacgaaatcgatgcggtcgtcggccttcagcaactcgtacgtggccttggactgcgtattgcccttggtctcctcctcgccgatgttgagcacggctacacggggtttccggatcccgagtacggcttcggcataaatcgagcctatcagcccgtactgcgccagcacctcgggtttgcagtctacgttcagtcccacgtccagcaacagcgcgggatgccccgtcaccgtaggaatgatggatgagatcgtgggacggataaccccctcgatcggtttcacggcgtacatcgacccgaccatcatggcgcccgtgctgccggcactggcaaaaccgtctatggcccctttggccaggtaaccgaagcccaccgtgatgctggaatcggccttggcctggaacgccttggcgggatggtcgcccatttcgatcacctcggtggtggcaacgatatcgaaccggtcggcaggacagccttcgcccgcgagcacggccctgaccctcgcctcgtcgccgaacaatacgatacggctgtcaggcccgatcgcatcgagtgccatgacagcccctttgaccgcagcctcgggcgcataatcacctcccatggcatctacaccaatctttaacataatcgtgcgatttggttaaacttcacgtcccgcccctccctgccggcatccggtcacaggccggacggccgcacacacaaagacaggtgcttgcataaattaaaaagagggcagcctcgcggatgcactctttaaccccgccgatttattcggcagcctttttctcgatcgccagctttccgcgatagaacccgcattcggggcatacgcggtgatacaacgtagctgcgccgcagttcgagcagatgaccaccgtcggaacgacagccttgtaatgagttcttctcttatcgcgtcgcgtcgacgagactttgtgtttaggatgtgccattttacaatataaattataagtttaacgtatttcctgtcctaaatatttcccggccccgggccaaaagcgcctcccggccggaaatagcttattccttttgttctgtttgcgtcccgtcggcctccatctgttccttgagcgcggccagcttggcccattcgccctcgttgcggccctcggcctcgatcctgtcttcgagacggccgaactcctcgtcggaaacgatgcggaaacgttccagcatgtcgggattgcactccccgtcgggatgcacccgctggtaaggcagcgccagcacgatactttcgtagatgtactgcgtcaggtcgacttcgtcctccatcggcagcagccacatgacttcgccgtcgtactcgtgcacctcgtccgagaatttcaccagcaactgcccctcgtaatggattggcacattgcagtcttccaggcagcggtcgcactccacgacgacactcccgtccacggtaacatcgagcgtaagcatcgactcgccgcgctccagggcgaccgagacatcgcagtccccgtccttgatttccgtactgccgaaagccctgaacaacccgccgtcgaccttgaaatggaagtcgtgcaggccgctcctgagccccctgtaagcaatcgtatatctttttgtttcctccataggagcgcatttagggcacaaagttacgaaaatataagacatttgcaaagaaaatgcagagttttagcatccccgcactcccggatatccggtcgcccgcccgcagaagaggcacggcacaggctccggaaattccggccgcggattccatcttcggcaaaaatcgttatatttgcaccgtatggcaacaaaagagggattcacaatcgagatttcgagccgctacgaaggctggtggcgctacaacgtcgcgctgatgtgcggctgcttcgacacggcgggcaaccgcaccggcttcgcatcgaccgaggcacatgtcgccgacgtcggctcgaacctgcgggaaaagcccgccgggaatcccggcggcggccgtgcaagcctcgaaaccgggccgtgcgaccaccttctgctctacatctatatcgtaccccatacgctgccggccggcaacgacatcggcgacacgacacccttcgaagtcgaaatccgcatcgcatacggcgaacggcggctccgcgcggagaaacgcctcatcaaccagtggtcgggcgcctcgatcgagatgcgcgtggattccgaagcccggtaacgagcatcccgggacaacacccgccgtcccggaacacgttgcctggcagggcaacctcagcccctcgcagccacaaaaaaagaaggaacccacacgggttccttcttccattatagcgacggcttacgattatttgttgttgtaagcggccatcttctgaatcagcatcacgaccttgttcgagtagccccactcgttgtcgtaccaagccacgagcttcacgaagttcgggttgagtgcgataccggccttggcgtcgaagatcgaggtgttggcgtcacccgtgaagtcggtcgaaaccacgtcgtcctcggtgtactcgatgatacccttgaactcgttctccgaagccttcttcatggcagccttgatctcgtcgtacgaagcacccttctccagacggcaggtcaggtctacgaccgaaacgtcgagcgtcggaacgcggaatgccataccggtcagtttgccgttcagggcggggatcaccttgcctacggcctttgcagcaccggtcgacgaggggatgatgttgccgccggcagcacggccgccgcgccagtccttcatcgaggggccgtctacggtcttctgcgttgcggtggtagcgtgtacggtggtcatgagaccctcgacgatgccgaagttgtcgttgatgaccttagccagcggagcgaggcagttcgtggtgcacgatgcgttcgaaacgatcttctggccggcgtagctgtcggtgttcacgccgcatacgaacatcggggtgtcgtccttcgagggggccgacataacgacgtacttggcaccggctgcgatgtgggcctcggccttctccttggtcaggaacagaccggtcgactctacgatatactcggcgccgacttcgttccacttcaggtttgcgggatccttctcggcggttacgcggatcacgttgccgttcacgatgagctggcccttctccacgttatagtcgatcgtaccgttgaaacggccgtgtaccgagtcgtacttgagcatgtaagccatgtagtctaccggaacgaggtcattgatacctacaacctcaatgtctgcattgttgcatgcagcgcggaataccagacggccgatacgaccgaaaccgttgataccaactttgatctttgacatagttttatgatttatttgttaataaaaaaatgcactattttttcactgcgcaaaagtacatactttatatatattacgcaaataaaaaattaaatttttttaggaacccggccgcctactttgcagtcagcttggcctttttggccatcgccgaggcgaagacgaaatcgttgagttccgggttgtcggcatgcaggatatcgtccttggtaccctcccaccacttgcggccttcgtggatgtatacaattttctcgccgatctccatgaccgagttcatatcgtgcgtattgatgatcgtcgtgatgttgtactcgcgcgtgatctcgtggatcaggttgtcgatgacgatcgaggtctgcgggtcgaggcccgagttgggctcgtcgcagaacaggtaacgcgggttgagcacgatggcgcgggcgatggccacgcgcttgatcattccgcccgacaactcggccggatagaggtggttggcgttttccagccgcacgcgctgcaggcagaaatccacacgttccatcttctccttctcgctttgcgaggtgaagaggtcgagcggcagctttacgttctcctcgacggtcgaagagtcgagcagcgccccgccctggaaaatcatgccgatgtccttgcggatggcgcgccgctcgcggaaatcgagccgtgtgaaattcgtatcgtcgtaccacacgtcgcccgaatcgggttcgtgcagccctaccagcgttttcagcagcacggttttgcccgaaccgctgcgcccgatgatgaggttggtcttcccggtctgaaactcgatcgagatgtcgtcgagcaccacgcgcccgtcgaacgatttggtaatgtgctcggcacgtatcatatcagcaggacttgcgtaaggatcaggttaaagatcatgattaccacggaactggccaccacggcgcgcgtcgaggcggcgcccacttcgagcgaattgcccttggcatagtacccgtagaacgccgaaatcgaggtgatgatataggcgaacacggcggtcttgataagcgagtagacgatcgaatagggcttgaagtccatcagcagtccgtcgacatagtcggccgggatcatgatgccggtcaggtaggcgatggcccagccgccgatgattccgatggcgatgctgaggatcgtcaggaacgggaagaagaccaccgcggcgacgatcttcggcaggatgaggtacgaagccgaattgacgcccatgatctccagcgcgtcgatctgttcggtaatgcgcatcgtgccgatctccgaggcgatgctcgaaccgaccttgccggccagaatcagcgccacgaccgtcgacgagaattcgaggatcatcgtctcgcgcgtggcgtaaccgaccagcgaacgggggatgaacggcgaatcgaggttgatgcacatctgcaaggtgatgaccgcaccgatgaagacagaaataatggccgtcaggccgatcgagtcgattcccagggactccatttcgtaaatgatgcgccggcggtagatggcagccttctccggacgggaaaagacctttcccatcagcatgaaataacggccgatcaactcaaatatcttccacatggcgctactcctctccgggctccttggtctcttcgaattcgacatagtcgcctacgtcgcgcgagacccgtttctcgggcgtttccgaggttttatataccttcacttcgccttcgcgacccttgcggggctcccctgcaaagggcgagccgaagccctgagcgccgaagtttccttcaccgaactgttcttccatccggcggcgcattttatagacgcgccagcggaacagcaggatcgccgctactaccaatacgatgactcccataatgaaatagagaaaaaaaagtgcgattcccctgagcagcgccggggcgccgacagccaggatgaggatgaccagggtcgtcagcggattgcgctgcacgaacctcaccagaccatctatgatcgctgtcagaaaattcattgcattttcggtttacaactctacaaaggtagggaaaattatgcgtatttcaattaaatgtcgtaaatttggtgccggaactttgccagcgggcggggcaaagccttcgggcagggcctgccgggcgcaggcgaagtcccgatgccagtggcgtattaaataaaaccatacataaatccatgaactccaatccgctcaacagccttaccgccatctctcccgtcgatggccgctaccgtaatacaacggagaaattagccgattatttttcggaacaggcgctcatccgctaccgcatccgcgtcgaagtggagtatttcatcgcgctgtgcgagttgccgctgccccagctggcggacatcgaccatacgaaattcgcagccctgcgcgccctgtacctcgatttcgcaccggccgacgccgagcgcgtgaaggagatcgaatcggtcaccaaccacgacgtcaaagccatagagtacatcatcaaggaaaaaatggacagcctcggactgggggcttacaaggaattcgtacatttcggcctcacctcgcaggacatcaacaacacggccatcccgctctcgctcaaggacgctatggcaggggtttactacccggccgtcgaagaggtgcgcgacaaactggccgccttcgccgacgaatggcgcgacgtgccgatgctggcccgcacccacggccagccggcctcccccacgacgctgggcaaggagttcatggtctttgtcgaacgcgtggagaaacagctcgccatgctgcacgacatcgcagtgcccgccaaattcggcggcgcaacaggcaacttcaacgcccaccgggcagcctacccgcagtacgactgggtagccttcgccaacaaattcgcgggcgaaacgctggggctctgccgctcgcaatataccacgcagatcgagcattacgacaacctcgcggcgatcttcgacaacatgaagcgcatcgacaccatcctgatcgacctctgccgcgacatgtggacgtacatctcgatggaatacttcaaacagcagatcaaggcgggcgaagtcggttcgagcgccatgccccacaaggtcaaccccatcgacttcgagaatgccgaggggaatttcggcatcgccaacgccgtcttcggacacctcgcttcgaagctccccgtttcgcgcctgcaacgcgacctgacggactcgaccgtgctgcgtaacatcggcgtccccattgcccatgcggccatcgcactacgctcgctgatgaagggcctgaacaaggtaatcctcaaccgcgaagccctggagcgcgacctagagaacaactgggccgtcgttgccgaaggcatccagaccatcctgcgccgcgaaggttatcccaagccctacgaggcgctcaaggccctgacccgcaccaacgcccatatcacgcacgagtcgatcgccgcattcatcgagacgctcgacgtggccgaggccgtgaaagaggagctgcgcgccctctcgccctcgacctacacgggcatcatccggtaacccctgcgaaaaatatcccgcagggacgcagtaataccccgcaacggcgcaaggcccggaatcatgttccgggcctttgtctttggcatacgttttgcgacgaggatagtcaactgcggacagcaaccgcagtgaggtttcttcatttatttaagtttgggttagtagttttaggagggcaatcctccaagggcagcaggcaatcgtgagattccctgctgtcttgttatatattgtcctccacccgttcactccggcaccctcacccccgatttatcgcactttcaggcaagacggataaaaaaaatttggattttattggcagaaaggttatttttatcccgtcacatattgcacggccgccccgtaaacccgattgaatatccaaagacgcccggccctgcgcccgaacaacagtattaacccactaatttccaaagtttaaccactatgatcaaatctttcctgtcatggggaacggcactgttggtgctgtgctctggtctgctaagctcatgcgacgacaaaaacgagggggggggaaatcctgacccaagcgtcacgctcgccatcggcgacgccgcattcaactccctgaaattcacgctcacactcaaggatgcggacaaatgcagctacatctgcaccaaggcgtccgaagccgtgcctgcggcagcgacgatcatcgccgaaggccagtccgtaagcgcatcgggcgtcgtcgagatcgccggcctcgaacccaacacggcctaccgcctctccgccgtcgccctgaaaggcaacatcaacggcaaggtcagctcgatcgagcacaccacctcggcacccggcgtacatcccgcggtcgtcctgacaccgggccagtccaccacaacgacccttacgttcaacgccgccctgaccgacccagaaaccgcagcctatgtctgcctcgaaaagaccgaggggctgacccttcccacggccgaggagatactgcgtgacggcaaagccatcgcacagacgggcgatatccttgtcgagaacctgaaaccctcgaccacctacgtcatcgcggcagctgtcgccaacaccgggatctactcggaagtcaatagcatcgtgatggcaaccggaacgccgacgcccgtggtgacgctgacagcgggagccacagccccgacgacactcacctttacggtaggcctcgccgacacggagaaggccgcctacgtatgcctcgaaaaagcggacggcacgcctgtcccgacggccgaaaaaatcctcaccgacggtacagccatcgcacaggccggggagatcaccgtagacaacctgaaagacggcaccacctatgtcatcgccgtcgcagcatccaacaaagaggtctattccgaagtcaagtcgattgaaatggccaccgacaaggatttgagcggcccggccgtcttcgaccgccaggtagccggcggctattatggtattcccgaaggtggccgatacggtgaatacctcgtcatattagccgacggcgaggccgtaggtgccgacggagtgtatgcgaccatcggagccgggcgtaccatgagcctgaacctctatcaatttactcccacgaatatgaataacatcgtcctaccggatcgcacctacaaatatgccaccgacaaatccatttcgacattccacccggccaagacctactgcatggtcaacgacggcaaggggaatatcacgaaagtggaattcaaggcaggaacgatcgctgtgacaaagtccggctcgacctttacggtcaaggccacgctgaccacgaccgacgacaaagagttcacggccagctacaccggcccgattacgatcgaggacaagacagccgtcaaaatcgagcccctgcccgacctcgaaaacgacgtcacgaacgcaactttcatccgcgcactggctaaatactataacaacgatgccggcacggcaaacgactgcgtcgtaaacctctacgatgtccagccgacggtcaacgacgattacgactacctcataggggccgggcatatggtatcgctctacctgacgaccgcactttccgaagaaatggtactccaggaaggaacctacacggtgtccgacacaggcacgccgggcacctacgcaccgggcgagcagatagagttcatggactccatgctggccatgggaacctattgcgaggaacgcaacgcctccaacgaatcggtttacggattcatcacgtccggcacggtgacagtcacgaaggtcggcaccaactaccgcttcgtactcgactttacgaccgacaaaggccgcaaggtcagcggcacttacgaaggcgccgtggagatgagggacaaacgcaagtagaaataatccccttgccacaacccgggattaccggaaacagcacacgcaggatgtccgtggggacatcctgcggttgtttataccctttcccgccggcatgtatcataggccgcacccccgccgcacacacaaacgcctttccgacacggcgccgcggcacgggatttgcaacataccgggtaactgcggaacagcaaccgcagtgaggtttcttcatttatttaagtttgggttagtagtttcaggagggcaatcctccggaaggcagcaggcaatcgtgagattccctgctgtttttttgcgccccgtccgcaggcggtcaacacgcaggcgcagaggagcccgcggggcgcggaaacgcccgcataaaccatgcacacgcccgaaaaaacatcagcccggccgcgttgcggcacagaaactgattgacggccagttgtaaaacacaattccacatcatggcaaaacgtaaaaatatcaccacgacacagctcgccctgatgaccgcggcggcggttatcagcctgcgcggactcccgatgatggcacaggaggagctgacgatgttcttctacatctttttcgccacgttcctgttcctgatcccggcggcgctggtaggtgccgaactgggaagcgccttcgcctcgaagggcggcggggtctacacctgggtcaaggaggcgttcaacaaacacctggggttcacggccatcttcctgcaatggatccagaacgtcgtatggtaccccaccgtactgggattcgcagcggcatccatcgcctacatgatcggaatgcccggcctggcgcagaacgggcttttcgtggggcttttctcgatcgccatgtactggtgcgccacgctggtcacgctgcgcggcacctcgaccatatcgagcattacgagcaaaggatttctgatcggcacggtgcttcccggcatcgtcgtaatcatcatggccgtcatctggatggccggaggcaattccgtcgcactggaacacatccccgacaccgtcagccaggtcgtcaatatcgacgcggcgcaccacgtgcatccgcgcctctttccgcacatcacgggcatgagcgacatcgcattcctggccgggatactgctgctcttcgccggcgtcgaggtacacgccgtgcatgccccggagctcgacaagccgcagacccagttcccgcgcgccatgttcctggcggcgctgatctcgttcgggctcttcacgctgggtgcgctggccgtggcgatcatcaccccctacgaccagatcaacctccagtcggggctgttcaccacgttccagatcgtcttcgaccactaccacatcggctggctctcgaacgtcatggggctgctcgtggcattcggcgcactggcaggcgtcatgtcgtggatttcgggcccgagccgcggcctgctgtggacggcccaggagggtgtactgccctgtttcctgcaaaagaccaacaaaaacggcgtgcaggtcaacatcctcgtcatacagggctgcatcgtcacgctactctcgtcgctctacatcgtcatggacgacgtgagcgtggcgttcttcctgctgagcgcactgaccgtagggctctacctggtgatgtatatgatgatgtacgccgcgggcatccgcctgcgctacacgcagcccggcctcacccgcagctaccgcgtcccgggcgggaacgccggcatgtgggccgtcgggggcatcgggttcctcgccgtgctcttctcgttcatcgtcaccttcttcccgccgtcgcagctgcccgtaggcagcccggccacctacacgtggctggtagccgtcggcacgctcgtcttcctctccatgccgttcatcatcagtttcgcgatggatcgcaggggcggtacgaataccccggacaccgggaaatgacagccggcacgtcccggatcgcaagaaaccgcaggggtcggagatgcctacccctgcggttccgtattttcctcccgacacattcctgcctcccgctgcggcatgccgggattcctgccccgccaccccggataccgcgcccttatcccgggatatcccccggacgcgacaccgtaccctctaaaactcgacggtgatccccagcgtagggataagcgacccgctctgctgcccgatatacttcatgcggtaacgctgttccgccgccggggcctgggggttctccaccacgcccgtcgacatcagcacgtcgggacggcggagtttgctgcccgtcacgttctgcaggtcgatgtaaaagccgagcatacagcggcggaaatagaaggtcttgtcgatacgcaggtctacctgcgcgaaggcgtcgagccgcccgtcgttgtaacgcccatagtcatagtacgggcgtccctgggcgtcccaggcctcgaccagcgacgatttttcaacatcgtagggcatatagggcgtcccgcccacggcgctcaggcgcgccccgacgctccagttgcgcggcaggtcgtacgtactgctgaggttcgccacgaaacggctgtcccaggccgatacgatatactccgatgcggcatcggcacggtactcgctgcggaacagggtcaccgaaccgacgaggttgaccctcccgggtatctgccagcgcgccatcgcctcgatgccgtacgaccgcccgacggccgtcgggcgcagcgcttcgttgccgaccacgccatagtcgtcgcctttgcacgagagcgggatgccgtccgagacggaaagcgggatattcccgtatttcttgtagaacccctcgaccgagacgaccaggcggtcgcgcaggcgccatccgcctccgacgctgaacattcccacacgcaggtagtccaacgcctcgttcaccagcaccccgtcctgtttgaatcccagggccgtatagggcggcaactggtaataaagcccggcgcttccgctcagcgaccaccctttgccgagctggtatgagaccgacgcccggggcgaaagctgacgccagaacctcgccatgcgcgcggaatagtcggccccgtcggcacgcacgccgaccgatgccgtgaagcgcttgtccgccgaggcataatccgcgccggcgaacaggccccagcccacgatccccagccgggtacgatagtccgagagcgccgcctcatcggtgaaaagccgttgctcggtacggttcgtatagcccgaatagctcagctcggcgccttcgcgcaccgtccagcgccccagatagctgcggttttcggcgcggagcgtggtcttctgctccacggagcgcagccgcagcgtcaggttgtcctccgacgagtcgtcgttaccgcggtatttgaggttgcggttattcaggtaggtgtgcccgagcgacacggtctgcacatggcggcccgcatagtggcgccatgcggccccgacggtgaaggtctcctggcggatgcggggcaggtaactcagcaggtactcggcgtcttcgccctcctcgtcgaggttgagtttcatgttgtcgaagcccgccagccccaataccgtcagctcgtcgtgctccgaaaggcgcgtcttgaccttcagctgcccgtcgatgtagttcggcaggaaaggcaggccgatcatcttgaacagcagttgcaggtaagactggcgcagcgagaagaggtaggaggttttctcgccgatatggccgctcccgctcagcgacacctccgaagccccgagcgtcgccttgaaagtctgtttctcgggattcccatcccgcagccggatgtccagcaccgagctcagcgccccggaacggtcggcggggaaagccccggtatagaaatcgatctcgcggatcagatcggcattgaggatgctcacggggccgcccgtggcgccctgcgtggcaaagtggttgatattggggatttcgatgccgtccagatagaacttgttttccgacgggccgccgccgcgtacgatcaggtcgttgcgatagcccacgggcgagaacgacacgccggggtacgaacgtacgatacgcgacacgtcacggttggcgccggggctcttctcgatctcccgcaccccgatgacctgcaacccgacggggctttcggccgtggcgcggaacggcgaaggcacgaccgtcacggcttcgagctgcgtggcatcctcctccatttcgatttcgatgaacggcgtggcggccgaaacgaggtattcgggcgtgacgacggtcttgtaccccacggacgaggccgagaggcggaaaatacccgcccgcacccgctcgaggcgaaagcgtcccagcgaatcggtcgatgcgccgcgttgttcctgtccgacgggcactacggcggcatagacgaccggccggcgcgtcaggcggtcgatcacccggccgctgacggcataggcgccgtcctgcgcccttaccgcagaggcgaggcacaacgccgcaagggcgaaaaaaagttttatccgcaatgcaggagacatgattttgcaaatgtataaaattaaggcggcttcccgccgatcgggcgaaaaaatttcgtatgtcccgaattctccgcaccgggcttccgctccaataataaagccatttccaccaggatgcaattcagaacattattaatccgataacggaacaagcgaaaagacatgaaaaatcgctccggattcttaccccttccggcaagggtattattatattaatataataataaaatccgatgcaagttttttttcgattttttgcatcaaaaaaaacatcacaaaaagcttggatttcaacatattgtccctacctttgccgacacgatcgcggcagtgaacacccctgtcggcaatacagccggattcgaaaacaggctgtaccgattattttcgacgcaacatataccgaccattttcccgccggacaagccggcaaaattgcagtgcatacacacgctgtcagggagccgattccgaatactttgggtcgtttagaattgatgaaacaaaacttcaattataaaaaagataaaagttatgaaaaagataaaagttatgaaaaagcaacattacacagccgaaatcccagtttccaacccgtacaattttgccgcgttcgaagacctgatcgccaacatccagtccggttacaacgaagaaaaaaggctgaagaacgcagctttcgaattcatgatcaataaaggcatatacgtcgacttccacgaatggctgcacaaccccgcccggcagccccaaagcgaaaatatccggggacggttccgcctgggtgctgccgcgaccacccggatcgcaaaatttttcgggcggtaaatgccccccgcgtccgcaatgacgcccggcccgcatttcagagggccgtttccatatagcgcatccccggctacggatcgcgtgactactgaaaagggatagagaataagcccgttccggaaacatccggagcgggcttatcacatatagactgtcttcccgttattcgatcacgggcagggcacgcggctcgcaagcccaccgcgtaccgtcgatccggttcccggagaccgtgatggcgaaaatattgatgtcggcatcctcgggcaatgtcagctttccggctccggaggcgatatcgaacccgagcctataaaggtacgtgaaggtataggcatcgttccggccgttcatcttgtgccggtggttcccgatatgggcgatcgttccgtccttgacgaacgacttggtcttgtcggcccaggcccactgggcgcggaagcccgagtaatagggcacgacagcctcgtacttgcggccgtcaacgtcgaatacggctttgcggtcgcccctggacgacgatgcgaggatgtagaccttgttgtaatcgccctgcggcaaatcgaccgtgacggcctccctgcagttcagcacgtttttcacgtcgggttcgccacggcggtattcgatgccgccatggacgatcacttcgggcatgagctcggcagcataggagttgcactccttatccaccttggcgacggacttgaacgcgtcgctcgaaatggagttctggtttacaggaaaatccacaaaggcattctcgatcgcgggggcggccacgggagcctccgccagcgtaaccttataggtcttgggtgcgaaacgcccggcatcgacgatcagccggttgccttcgaatcgtgcctccccgaccggttcctcgattccgttcacctcctcggccgaaacgatccgcacggggaaagccagctcggcgccgcgcacctccctgcccgtcgtctcgaatacacggacgatataaccgctgccgtcctcggccttcttaagcgccttgacggcgatctgcggggtcgaagccgcgacaaaagagaacctgcgtcccagcttcccgggatgcttcggcgtcgtgaagctgaggagcggctgattgagcagctcgcctttctccaccaccccggcgcggttatggtcgccatcgtgcccgacgagcgagtaagtcatcgtatggcgtccgaaatccagatcccgttggtcggcatagcgtttctcggtcgaaggcgtatgcagcagactcaggcgcagggtattgtcggcgggtttgtcccagccgtatttcgaatcgttcagaacggcgatgccatagtctccgtccgagaggtctgcccaatggtgggcgaatgtttcgtgcgcccgctggtggttggtgggacggcgctggttgccgatgccgatgtcgtagacagcctcctcggcggaaacggacatcgggaattcggccttgagcagggcgtcgggcgtcttccagtcaatgtcggccacgatatcgatacgctcgtcgtccccgccgtcggtcaggcggatatactgcaccagccgggaatcgccgtaccgccgttctactttcagggaggcccgtgcggcgccgcactccgccacgctgatccggacatccgtatccacgggttcgggtgtctggtcgagcgtcgccttgtggatctcccatgccggatagcggttcgacacattgggggtcagcaccgcaaggcggaaggccctgcctttttcgaccaaatcgcggccgttgcgtttgtcgatgaccgaggcgatgtcgccgttggcatcgagcgtcaccttatagacccggttctcgagcgtattgcccgaagccctgagcaccttgcccttgccggccttgccggccctcacgtcgtataccgcatagcttacgggttccatcgcggcggcaaacagcacggtcgccctggcaccgtcgcgggcaacgatctgcgcaggaacggtcttcccgtccggcgcataaacggccaccccttcggcctccgcaggcaggtcgaccgtcgcctcgacaaggctcctgcgcgaataagcggcggggttataaaccagtaccggacttcccttcgcgcgggtgtccattacggatgccgcagccccggccgaggcgaggatcacatcgcagaattgcccctgcgccaggaattcgtcgttccaggaataggtataagcctcccaaatgctggttcccgtaaggtcgtcgtggaactggtgccagaggaaacgcttccaggcatcgttaagcgcctctttcggataaggtacggctcccatccagtcggcgatcacggccgaacgctcggcggcatcggccaactgctcgttacggcggttgtaacgcttcatctcggcctgggaggtataacagcccggagcgtggacgtcgagaggcatctccccgacgaacaccgggagttccggatggttcccgtagggcatataatcctcgtagagctgcgaggacgtggcgctgacaagctgcacgggccccttgccgttcgtaatcccctcctcgagcagctggatgctgcggggcagggccgagccgccgtggtctccggctccgtttgccagtttgttgccatagtaccggtaagcgatgccgaaaggcgacttccgggcactttcggccaattcctcgttggcgctcagatccccttcgggaaactcgttccacgaatagcgtcccggctcgagcgccaccatgatgcgggcgccgtcgaccccttcccagagcccgatcggaaacggggttttggagtcgccgacaagcggctcggtgcgccacgacaatttctgcgtcgagaaaccgatcaggccgcagtggtgtcccagcgtcggcatgacctggctgaatccgaaacagtcgggcaggaacatatccttcgacttgatgccgaactcctttttataaaactcctgtgcaagcaggatgttgcggataaacgactccgacgacggcatgttcgggtcgttggcctcgaacgaagcccccgaaatgttccatcgcccgtcggctacgaatttccggatgcgctcgaagagatgcggataatactccttgatccattcgtacttgacggcgccttcgaaattgaacacgtaatgcggatatctctcgagcaacgccagattctgcacgaccgtattatataggtaatcgtcgatcgtggctttcacgtcccaccgccactgcgtgtcaagatgggagttggagaccatatagaccttgtatttctttccggaatcctgcgccgacgtatccgacgggcttcccgccaaaaacagcgcgaggacgattccgataaatcgcatgattttcatatttgattgttttaatattgaatgatggaaagaggatggaagttgaccggacttcgactacgttgcggacaaaagtaataaaaggcaagataaataacaacacaaacacaacaaacaatcaaaaataaacttccttttaatctctttttaacacttatattaaaataaaacttatatatttgtcataacccaaagcctaaaaacgatggaaaagaaattccggactctttcggcctacctccccagcaggagaccgtccataccgcccgccctgccgttcgccctgcaaaacgggtacggcacatccgcggccggtcagggtatcgtcgtctgcaccaccggccgtacttgtcctgcgacagcctccggccgggtgaccgacgcaaccgcacaccaggcatccggggatgccctaagcggcgactgcaattgcgccccgatggcccgggtcggctttaccgcagcaacaaggctgacggcggcatactgagacagcaccaaaaacgccgccgcccgggcacaacccgtacagtctcgattttataatgtatatttgtagtaccacaacctaaccctcgaccagacatgaaccgtcatttcgctctgcttaccggccttttgatctgctgctgcgtcccgaaaaacgacgttaccgcccgcacaatgcgtgggggggggatttccctcttttaatttcgggaaccggcaacatcctgccggagcaaatcgtccgctacgcctcaaacggcgaccaagccggcaaaagcaacgctgaccccgagccggcaacggcaggggacacccacctccgaagcccgcgaaaaagcaaggccgcactgccggccatcgcaacgggcgcacttcttctactagcggccgtctcgctcgccttcaggcaaaaacacctgatcaaacagttgcgtacgcaacacgcgcaaacctgcgcccggctgcacgaactcagcgaacagctcgccgccagcagcctccgccacgaaacagccacccgggcactctcccaggccaataccatcaaagacaaatacctgcgttactacatgcaacgcagcacgttctacatcaacaaattagaacgccaccgcacacacctctacaaaacagcgctctcgttcggacaggagcgccttttgcgtgagctgcgctcgcctacgcccatcgagcaggaatacaaatcgttcttccacgaattcgaccgggtattcctttcgctttatcccgatttcgtggaaaaggccaatgccctgctgcgggacggggagcaaatgaaaatgcccggcctcaacaccgaattccggctgctggccgtgatccggctgggcatcacgggcaacagcgaaatcgcccagttcctgcatatctccataaatacggtctacacctaccgcaaccggctgcggaactccgccaaatgcccgcccgccgaattcgaacgccggatcatggagatcgtctgacagccggaaatcgcgcatcggcgattcatacgggattcatataataacaccggggaatcggaaataacatgctttccaccaacccattgtcggaaatacgcattcatatttcattttgatgctgttgatacacattttccaaaagcatacttttacaaacaacaaagcggaatttcttctgaaataaacacaaaagaatacaataagaaatccattatagttctatttgattttcatttatttctcattcaatatctttttcccaacctttaaaatacaaagatgcctatgacaaagtaaaaactacgaccggacttttacgaaccattcattcatccaaatattcaaccctaaaactttcatttatgagaaaatctcttcattttcttatttacatgctttttgccgcaccgctattgctgttcagctcctgcggcatcgaggatgtagaggcagaagacggtgcgatcgtattcgaactctatgacacggagggcaacctgatcgagggcctccagagcatgcggttcggcacgacggccacctataccttaaagagtgcattcgtcacctacacggtggccaccccgcccacaggctggaaatgcaccgtgatccccagctcgcggagctgttcggtcaccgcacccccagcctccgacctgggagccaaggccagcggcgacgtggtcatcgaaatacagtcgcaggcaggccgcacggagacctatacgctcgccgtagccgccctggaaaacgacatcacactcacattcgacgaagagacaacctcgaagacccatgtattctcctacgggaagagcatggaattcgaattcaccagcgagaacaccgcgtcgctcgacgtaagcgtccccaagggatggacttacacggccgatgtcgatgcgggtctgctgaccgtcaccgcgcccacgcaggaggaggccgacccggccatggaaggcagcgtcaaggttacgccgctgagcgtccgcgggacggccggcgagggttcgtcgatccccgtcgaactctcgaccaagttgcccatcatctccttcgccgaggccgattacaaattcgccttcggcgagcagcgcgacatcccctgtaccgtcaccaacgtagccacgtgcgacatcacggcgctcaaaggctgggacatcgcactcgacaccgaaaattcggtgctcaaagtcacggctccggccgacggcgcggactgcaccggtgcgggcacggtcgaattcgcagccgtttcggcggaagagctcacggcatcgttcagcgtccgcctgagctggaagggcatctcgacccccgaagagttcatagccttcggcaacgcggtgaccgaaggggcgccgctcgatgcctacaccaacggcggcaggatcgtccttgtcagcgacatcgacctgagcgcccttacccaaaccagcttcgtaggctcggccgccaatccgttcaaagggactttcgacggcctgaacaatacgatcaccgtcaagctggcggatcaggactcgaaggaactcggcctgttccacacgctcgacgcaacggccgaaataaagaacctctcgctggcgggcagcatgtccgtatcgcaagccaccccggtagtagccggcacgctggccgtctataacaacggcgcggcactgacgaaagtcaccaacaaggccacactgtccttctccggggcgaaaaccgttgccacggcaggttatctcggcgggctggtcggcctggcgaacgtcggttcggtctacaccgattgccacaatacgggcgaattcatcatcacggggacagcccggacggagttcatcggcggcatcgtcgccggcaccgcggacaaaacggaagggtcgctcgtgaactgcacgaacaaaggcaatttcagcttcgacttcccgggcgccgtcgacaccggccaatacggaggattgttcggccatgccgagaaatcgaactggacgttcagcaactgcaccaacgaaggcaccttcaccgtcaccttcgccgatccggggcaccagttccactcgctgggcggtatcctggccaccggctacggcgtgttcgacaattgtgtcaacaagggcaagatcacgttcaacaactccaacggcacgaaatatcgccgcacgggcggtatcgtaggctgcgtcggatcggacgcaggcctgggttatacgctcaggatgaccaactgccgcaacgaggccgacatcgcggcttcgacggcatcggtcggcggtctgatcggcattgccgaaaaggtggcgtcgccggccctgatcgaaaactgtgtaaacacgggtaacatgaccagccccacgatggccgactacgacctcttctacatgggcggcatcgccggcaaggtcgccggagccttcacgttgaaaaactgcaccaaccgcggcaacctcacggcggccgtcgagcgcgacatcgcgggtatcgccgtatccggagacgacaatgccgttttcgacggttgcgagaactacggcgacattacggcagtggccaaccacaaaaccgacaaatggcgcccgatcgtggccggcatcgtcgccatagaaaacgacaaggtcaccacgatcacgaactgcacctgcaagtgcaccatcgatgcgacgctctaccaggcgaccagcgtcggagcggtctatgtcttccagaaaacctgggaaaagggtgtcgaagataagaagaccgtatgcgacgaggcttccaaaaccaattcggcggaaacgacaatcagaatcacgacaagagagtaaaacccaataagaatacaatacggttatgaataaatatcatattataacactgatattgtgtctgttttgtctgggaggggccgccacggcctctccagacaggacggcagccgccccggacacccaggcgcgttcttcgcagctgaaggtctcgggtatcatcaaggatgacgcgggaagcccgctgatcggcgtgaccatcgtcgtcaaaggcacctcctcgggcagcgtatcgaactccgacggcagctatacgatcacggttccctacgccgaagcgacgctgatggtctcctacatcggctatgccccgcaggagataaacgtaaacaaccgcacgaggatcgacatcacgatggtcgaggacagcaaggcgctcgaagaggtcgtggtggtaggttacaacgtacagaagaaggagaccatcaccggttcgatctcgacgatcaccaccaaagacctcaagcagtcccccacggccaacatcaacaatgcgctggccgggcgcatgccgggcctgctggtcaaccagttcaacggcggcgaaccgggtaacgacgccgcacagctcaacattcgcggtaaatcgacctacggcaagtcggacgtgatcatgatcgtcgacggtatcgagcgcgacatgagctacctctccccggacgagatcgagaccttcacgatcctcaaggatgcttcggcgacggcaccctacggtatccgcggcgccaacggcgtgatcatcgtcacgaccaagcgcggccgtaagggcgaaaaaccgaccgtcgatttcaaggcgtcggtcggtgtcagcgaacccatccgttaccccgactacctgggttcggcagactatgcgaccctctacaacgaggcgatgctcaacgacaacccctcgctggatcccggctcggcatcgctcttctcccaggagacgatcagcaacttccgccgcgccaagggcgacaactccgacggcctgggctacaactgggattacttcgactacgcattcaaaccgtcgatcctccaggattacagcctttcggtacgaggcggcaccgaccgcgcccgttatttcatcctcggcagctactacaaccagggcggcaactacaagcactcgaactccgacaacgtcaacaagttcctgcgctataacttccgcgccaacgtcgatgtcgacgccaccaagcggctgaagatctcggtcgacctgggcgcccgcgtcacggagttcaactacccgggcgccacggcggccaacatcatctcgctggccaacacgcagcccccctacctgccgatcatcctgcccaacaaccacaacgacgtcaaccaggccgatttcgaggagaacggcggctacctgctctatgccgacaacgactaccgttacaatatgctcgggcagctcaaccgcaccggcttcagcaaacgtacgcgccgctacctgcagggatcgttcaaactgagccacgacctggacttcatcaccaagggcctgagcgtcgccgcgcagttctcctacgacacctacaaccagcacaccatcaacaacagcgtgccgacccacagcacgggcaacctgacctacccgggctattcgacgtggatgctccccaccgaatacagtatcgacgagtggaagaacaacgccgactactggatcaagaacggcacctatgtaaccgccaaccagcgaaccacggacgatgcgcaaagcaacagcatcagccacggctcgcccgaagggacgtcgcgtttccaggcgcgcctggactacgcccgcaaattcggcgaccacaacgtgtcgggcatgctgctcttctacctgcagaacaaggtcatcagcaaccaggttccctatcgctacatgggattttcgggccgcgcgacctacgactaccggaacaagtacctcttcgagttcaacatcggttacaacggctcggagaacttcgcccgcggcaagcgctacggcgtattcccggcaggcgccgtcggctgggtcatcacgcaggagcgattcatgagggacgtaaagtggctcgaccacctcaagctgcgcgcatcgtacggtctggtgggtaacgaccagctctcgggcaaccgtttctcctacctgcaatactacaagtcgtcggacggcatgaccacctatttcggcgagaccgaggccggctataccagctacctggtcgagggcgtgttcgccaatccgaacctgacgtgggagaaggcccgcaagttcaacttcggtatcgacgcccagttcttcaaccagcggctgaccttcacgctcgatgtcttcaaggagcaccgctacgacatcctcacttcgctctcgggggatgacaaggtcgggttcccctacatcgtcgggcaggtcgccccgatcgtcaactcgggtatcgtcgacaaccacggcgtcgaattcgaaatcggctggaacggtcatatcgggcagcatttccgctactacatccgcccgaacttcacgttcgcacgcaacaagataaaatactgcaacgaaatctcctacatcgacaacaacggccgcgactgcccgtggcgttaccagaccggcaaacgcctcgatgagaatttctgctacatcttcgaccacttcgtggccgaccaaggcgaggccgaccgcctgaacgcgatgaacggcggcagcggattcgccatctggggccccgtacagccgggcgacgtggtctacaaagacctcaacggcgacggcgtggtcaacaactacgaccgcgccgccatcggcaacccccgtacgcccgagatccagttcggcattccgctgggactctcctacaagggcttcgacttcagcatgctgtggcagggctcggcactctgctccgtacagctgagcggcccggccgtatgggatttcccgctctacgaccagtcgcgtatcggcaaggtacgccggatgcacctcgaccgctggacgcccgaaacggcagctacggcgaaataccccgccctgcactacggcatccacaacaacaataaacagcagtattcgagcctcttcctctacgacgcttcgtacatccgcctgaagaacgtcgagatcggttacacgctgcccaaagcctggacttcgaaagccggcatccagaacgtccgcatctacgtgcagggacagaacctgctcacgttcgacaacctgggcgacgtcgacatggatcccgagatcaagaacggcgacggcagctggttccccgtacagcgtgtcatcaacatcggccttaacatgacattctaacccaacaaaaaccaatgacaatgaaaaaaatcttatatctgctctgtagctgctttgcagtcacgctgatggcttcctgcgaggatttcctcgacaagaccccgcagggcgacaaaacggatcaggacatattctcgcgtttcaacgagactgaaagcctgatcaaccggctctacttctacgcccgcgccgccgaccagccgctcgtgcacatccgtttcttcagcgactctgcgctcacggacgaatgcgaaggctcttcggccgagaacggatggtccaacaagttcaacgacggcgactgggaaccgggttcccagctctacacctcgtgcaacgccacgaccaatgcgggtgcctgccacaccttctggcccaaactctacgaagacatccgctgcgccaacgtcatcctcgaaggtatcgagaagtacaacaccccggattccgaagcacgccccggcacgctctcgcagcgtatcggcgaggtgctcttcatccgcgcctacctgcactactgcgtgctgaaaagctacggcgaatgtccctacgtcgactatacggtaaaccccaacgcactgccgccgttcgaacgcgagaacatccatacgatcgtcgagaagatctgtcgcgactgcgacgaggcctatgcccgcgtcccggcgcagaacctgatggatcagttcggccgcgtggagaaaggcgcctgcctggcgctgaaggccatggcgctctggatcgcagccacgccgctctacaacgggtcgacgctcaagggcgacacccgcaactatgcgtcggtctaccagtcgtatgaccccgcgcgttgggacgccgcagccgcagccgccaaggccgtgatggatttcgaggccgaggggcagaaacgctactcgctctaccagggttcgcccaaaagccagacgaccgactcgggcggcacggatcagagcaacggcgcggtttacagccgtctttgggagctgttccaccgcacgatgaacgacgccaagaaggccgaatggatcttcttccacctccactgcaagaccgtgggttaccacaacgacatgtacccgccttcggcgcagggacaggcacgcgaggtacccgtacaggatcaggtggacgaatacgaggtgatcggccccgacggctacggctatccgatctatgcgctcaagcagaatcacaaggcgctctacggcagcctgatctccgagcaggacatggccaaggcctatgacgacggcaacccctatgtcaaccgcgacccgcgtttctaccgcgacatcatctaccacggatccatgttcaagggcaagtggatcaacacggccaccggagccgacgccatcaacgccgccaactccacgtcgacgggctacttcacccgcaaatatttcgacggctattacaccaagggcatgtcgggcaactggaacttcgacgcgccgctgatccgcctggcgacgatctacctggtctatgccgaagcggtcacccgctcgaagggcgccacccccgaggtctacaacctgatgaacgagctgcgtgcccgttcgttcatggcccccatcccgccggccgcgcagaccaacaaggagttgctgctcgactacatcctgcgcgaacgccgcgtagagctctaccacgaaaagagccgcttcttctcgacgcggttctacctcgaaccgaccagccccgaagaactggccaaggatgcccagtggagttcgatccaggggacgaacgaccagaaggcacagttgtatttcgacaaatacggcgcctaccccaagacgcagcaccgcatctgcggcatgcgccccgtggaagaccccaacggcaagatatcggtgggcggcaaaacctaccgcatggaacgcttctggaaggaggaccgcgtattcctcgagaagcactacctcttcccgatcccgaccgaagagttgcagcgggccaacattccgcaaaaccccaactggtaattgacaatcaccggcctgaccgcccgaaccggcggtcgggctgacagtaaaacagactatgaaaaacgattcaatcttcacacggctccgcaggacgctcagcctcgcgctcacggccctgatagccgcaacgatgatggcgtgcgagggagacgacaaaatgctcaccgagctccccaagcccgacgacggcaacggaaacggcacgacggagatcacgcccgacaagggcatcaccctctacggactggtaagcgacaaggagggcaaccccctcgaaggggtcgtcgtgagcgacgggtacagcgtcgtggcgagcgacaagaaaggcgtctaccagatcgtgcgcaaccccagcgccaagcacgtattcatttcggtaccttcgggctacgaaatcccggcacaggcgaacttcggctcctaccagggtgcctaccaggcagccaactccgtcaccggaagcagttcgaaaccctaccgggcggatttcacgctcaccaaactcacccaaagcgacaaacggttcctgctcttcgggctgggagacccgcagcccgacaacagcgaccatatccagcggttccgcacggaagccgtacccgatgtgaaaaagatcagcgcgaaatactcgatctcgcaggtcggcatcgcccttggcgacatcttgggtaaaggcgacgcccagaccttcacctcgatgaaacgcgccttcggcgagacgggcgtcccgttcttcaccacgatcggcaaccacgacaagagttcggtggactatacgggcgacacctaccgcgacgtgctcgggccgcgctggtactcgttcaaccgcggcgacgtgcatttcatagcgatggacaacatcatcttcaccggcacggaatacacgggcggcttcaccgacgagcaggtggcatggctggagaaagacctcagcttcgtcccgacggataaaatgataatcctctactaccacatcccgttgcgcgacaacacgggctacctcaaccgcaaaaaggtactcgacatgatctccaagtataagaaccccaccctgatgtgcgcccacacgcactatttccagccctaccacatgcgttcgcacaatattttcgaacgcattcacggcggcacgtgcggttatttctggcgttcgacatgcggaggcgacggcacgcccaacgggttcatggtctacgagatcgacggcacgaaaatcatcgacacctatttcaaggcctcgcagcgcgccgacgactaccagatacggctctatcgcggcaacgccgagttcgcaggcccctatgcgacctacaaatacgatgtcggggcggacgtggtcgtagccaacgtcttcacttccggaatggacggcacgacctggaaagtcgaactgtccgaagacggcggcaagacgtggagcgccatgacggcgatggcgcagaactacggcgaccgctggatccgcggctaccacatcggagtcgagaaacatccggtggaaagcggcaccagcccctgctaccaccaataccagtgcaagctgaaaaatcccgaagcgaccggcatcgtggttcgtgcgaccgacagtttcaaccatgcctacacgcagacgcgcttcaacgagagcaacgatttcaccgaagccgagggttattgaccctcccggcctcatctatcgagcgggcagccacagggctgcccgctttttatttacacagggagggagggggggggcaccggataagaaacggagggaccgtatgaaaaaggaggaaggcgaagcacgcaaagagaacaaggaaccgcacacatgaaggaggggaagcggccgaattcccggaaaaagattgccggcacagcaaccgtttccaggctatttttcgtatctttgcctcacgtcacaaacggaggggcaaaaatggcagacgattatttaggcagaaaaatggaagagtacatggcccgcaaggcatcggggcagagcaaccgcaggccgctggcgacattgggacggttactgctgaaaaaccgcagccaccgcggttacgacaccgggttcgtcgtacgcgaggatcagctccggcgcatgatcgaggtgaataccaggatcccctcggcgcgcaaccagcaagtgctccggttccgccccgtgctggcggacgaagcccacaaagtcctgccgcacatccgccttggcggagccctgcccgcactccgcctgccctttccgggtaccgagccgaatgcctttatcatcatctgctcgacggtcgaagagaaccgctacgtcgacatggatttgggcatctcggcccagagcatgctgctccaggcagcggagatcggcctgaacggcatctgcatcggcgcattcgacaaggagcggatcaaacaggaattccacctggcctacgaaccgctgctgatcctcgccgtcggcaaaggcatcgaaaagatcgaattggtgccgataggccccggcgacagccacacctattaccgcgaaaacggcacgcattacgtcccaaaactccgcgccgaagagttgacaatcaaggaatgatccgcccgtcggttcattcgaccgccttccaccatcgtccgggacgtcgcaccccggtgaggggatcttcggaataggtaatgcggcaggccacaccgattttgcaggttgtagttctccagataacgcatctctccggtgtcgtaatcctgcaacaggcgcagcgaacggtcgaagctcagcacctcgccgctcaggttgagcgacggaagccggctcgcctggtaggagcggaacgaccagtacgaggagagaaacgtatatttggcgaccatcgcggcgatcgaatggttctgcgccgaatagatcgccttgtcgagcgtcaggcggagctggatctgagtccggctcgcaaccttctcccgaaccgaatcctgcggcaaaggccggtctgccccggattgcgccgaggaagagatcgtgatacctgcacaaacgataaatatcaatgtacttcgtaccgatatgaatttcataggctattacagtgagatcgtgacgcaatcggggatattacgcaatactattataaatcaggaaccatccactcaccataaaaacattccgggccgctgcaatcgcacgacaacgaatcgacggcaaacgaacccggatttattaagtactatgtattattccgcatataaatttaaatcaaaaaaatgagatttgcaactatgccggaataaaagttcgggaaggagatagatcgggtcgttttaggcgtctcgaatgacataagacaccggatcccgctcggtacaacgcctttgccatcttttctgtttcgtatttccattttccaagacggcttcgccatccacaaccaacgcattgaccaccaagtcatcgacggataagcttcgcttgcagcatttttggctggcagcacaaaatacgaacagttgccgccaagtggtttcccggtttgacttccggtttaacccgacagctgagaaacgctgaaatacacgagaatagcacaaaaaaagacagctgcatttctgcaactgtctgattttcattggtgggaacatgcggatttgaaccgcagacctcctgcttgtcgagcaggcgctctaaaccaactgagctatgctcccggaacaaaaaaaccacttgcattactgtaagtggctgattttcagttgtgggagctgagggattcgaacccccgaccctctgcttgtaaggcagacgctctgaaccagctgagctaagctcccgtagtgaatggcttgggactgcaaaggtaattcaaaatacatgaattccaaatttttcatcgaaatttttcattctttttatcacctaccctgcaggcgtttctgaaagaaccttacgcaaccctcgcgcatctgcgcctgaacaaggacttgaacctaggaccccatgattaacagtcatgtgctctaaccaactgagctattcaggcattcggaaatcggtttttcaaccgtttcggagtgcaaatatatagcaaaatttcattcccgcaaaattattgcacgattttttctcaaaaaatgtacctttgcatcatagacaccaatcagcaccatgacggcacgacgacatatcctcctcacactcttggctctttgcgctttcgcaacggcggcgcaggcacaacaggtctttacccccgacacctgggatttcggcacgatccgcgaaaccgacggccgtgtgagccataccttcacgggcgagaaccgcggcaatacgcccgtagtgatcctcgacgtggtcaccacctgcggctgcacggtaccccaattcaccaagcgtccgatccgccccggcgagaaaaccaccgtcaaggtgacattcgacccggccaaccgccccggcgccttcaccaaggaactgggcgtctactcctccgagcggaaaaagatcgccacgctcaccatccggggcaatgtcacgccgcgcatgaaatccaccgaggagctctacccggtcgatgcgggcggagggctgcggctctccacgaccctcaacgccttctcctacatccgccccgggcaacaggtacagtccgccatcggctatgcaaacacctcgggcaaaaccatccggctcgaactgcgcccgctggaatcgagcgggctgctgacggtgaccgccccgcgcgagatcgcaccgggcgaacagggatcgatcaacgttgcctacctcatccccgagaccgatccccgctacggcacgctgcgcgacgccctcgaggtgcgcgtcgacggccgcaccaacggcacggcgatcgtcacccacggcatcggcatcgaccggacgccaacaggcgccgaaggacaaaacgccccgaaagcacagataatcgaaaatattattaaatttggcccggtaaagcatggtgcccccaggcaggaacgtacctttacgctctcgaatacgggcagtgccgaactggtcgtgcgcgccgtcgaaaccaacggcaggatcgccacgacgctcgtccccggacaacgcatcccgacgggcagttccttcacggcgaaggtgtccgtcgacccgggcgaacaggatttcggcgtgctgaccgatttcgtgatgatcgtcaccaacgacccgctgcgcccgatgcggcggctgagggtgacggccatcatcgaagaataacgacaaaatgcggctcccgcccgatggcagcggccggaaaaaatatattgatgtacccgatacttgaaaaaagactcctcgccgagggcatctggctgatgcaagtcctcgcaccgcgcgtcgcacattcggcgcaacccgggcagttcgtcatcgtccgcgtcgacgagcacggcgaacgcatcccgctcacgatctcggacttcgaccccgcgcagggcagcgtcaccatcgtgacgcaggccatcggcgcctcgacacgcaaaatatgctcgctggatgcgggcgatgccttcgccgatttcgcaggcccgctgggacacccctcggaattcgtgaagatgcagcccgacgagctccgcaagcggcgctacctcttcgtggcgggcggcgtgggcaccgccccggtctacccccaggtcaaatggctccgcgagcacggcgtcacggccgatgtcatcatcggtgccaagacccgcgacatgctcatctacaccgacgccatgcgtgccgtggccgaaaacctctacatcgccaccgacgacggttcggaagggttcaaggggctcgtcacgcaagtcgtcgaggagctggtcgaaaaacagggccggcattacgacgaatgtgtcgccatcgggcccatggtcatgatgaagttcgtggcgctcaccacgaaaaaatacgggctcaaaaccaccgtgtcgctcaacgcgctgatggtcgacggcacgggcatgtgcggtgcctgccgcgtgacggtcggcggcaggacgcgcttcacctgcgtcgaaggccccgagttcgacggccacgaggtcgatttcgacgaagccatgcgccggcagggcatgtaccgcacgcaggaacagcgcgccgcggccatcgaggccgaacgcgccgccgggcaccaatgtaaaataggactggataaatagacattgtccgggacgcacaccccggaaatccccaaagtatacacgacaatggcaaacaagataccgcgcgtccccgtgcgcgaacaagacccgcaaatccgagcgaccaatttcgaagaggtctgttatggctacgacctcgacgaagcaaggctggaagcatcgcgctgcctgcactgcaagaacccccgctgcgtggcagcctgccccgtcagcatccgcatccccgacttcatcggagccttgcataccggggagttgcagcaggccgccgacatcatcgccggcgacagttcgctgccctcgatctgcggccgcgtctgcccgcaggaatcgcagtgcgaaggctcctgcatcctgggcatcaaaggcgaaccggtcgccatcggcaaactcgaacgcttcatcggcgactggaagctcgaacacggcgccgccgcggcacaggccgcaccccgcaacgggcacaaggtcgccgtcatcggcagcggcccggccgggttggcctgcgcaagcgaccttgcgaaactgggctacggagtgaaaatcttcgaggcgctgcacaaggcgggcggcgtactggtctacggcatccccgagttccggcttccgaaggagcgtatcgtggcacgcgaaatcgccgaggtcgaaaaactgggcgtagagatcgagaccgacgtcatcgtcggccgtaccgtgaccatcgactcgctgctggacgaagagggctacgccgccgtgttcatcggctcgggtgccgggctgccccgcttcatgggtatcccgggcgagaacctcaacggcgtggtctcggccaatgaattcctcacgcgcgccaacctgatgcacgcctacgaccaggcctacgacaccccgatctacgtcggcaaacgggtagtggtggtcggcggcggcaacgtggcgatggacgccgtacgcacggccaagcggctgggtgccgaggcgacgatcgtttaccgccgcagcgagaaggagctcccggcacgcgccgaagaggtacaccacgccaaggaagagggcatctgcttcaggatgctcaccaaccccaccgaggtgctcggcgacgagcgcggctgggtgaccggcatccggtgcgtggagatggagctgggcgaacccgacgatagcggccgccgctcgcccgtcgtgaaggccggctcggagttcgggatcgcctgcgacgtagtcgtcatggcactgggcacctcgcccaatccgctgctggccgccacaaccgcagggctcgaaaccaaccggcgcggctgcatcaccgccgacgaacgcggcgccacgtcacgcgaaggggttttcgcgggcggcgacgccgtgacgggagccgccacggtaatcctggcgatgggtgccggccgcacggcggcaaaggccatcgacgaatatatccgaaagcgttaaacctttaaaacaccatacgaacgatgaaacgcatgaaaatcatggtcgcggccatcaccctgtgcggcctggcagcctgcagcgacaacacccccaagagcttcaccggcaccatcaccgatgcatcgatgaacaccgtaaccgtcgaaaatgccgaggggacattcaccttctcgaccatggacgccgacaagagcgaggccaacggcctgctgctgggagcgcccgtcacggtcaattacagcggtaaactcgcagacggcaccaccgcctcgaaagtgtctaccgaccccacctatgccgaggccgtcggcaattggacgatgcccgacccgatcgaccccgacggtgtcatgggcatccggatcatggtcgaaggagaggcgcagtcgatcaacatggccacgctgcgctacacgtcgtgggaattgcagggcgaagccggcaaaatcctgctcaaaggccaaagtatcggcaacggtcagaccatcgacttcaccgaaacggccaccatcgccaaggacgccgacggcatctatacgctgacgatcgagagcaacggcgccgtctacaccaaagccaacgaatagccgcagccccctgcggtcacacgcgccttccgcaatcccggagggcgcgtttcatttaccggagggcggccccgcaaacagttccgggaaacggcttgtccaaataggttttattcgttaaatttgaatccgtcaaccacactgcaactatggccagaatactcttcgcagccctgctgctcctgttcaccctcccggccgcggcacaaacgcccggcgactccatcgccttcgtcaccgccgactggcataccaccgacctcggccggggtgccgcgtgccgctacgcccaggtcgagatgttcggttcgcggcagagcatctcggtcgtcagctaccccgcacggcacttcgccacgcagatcgtacagctcgacggcaagggtgaaaccacgggccgcatgggcgaagccgccgacgccacagcagccatcaacggcagctatttcaacatgaaaacctttacgcccatcacctttgtgatggtcgactgccgggtattgggccgcacgacgcccggcgaactcatgcgcaccaacggcatcatcgccatccgggacaaacagggtcacgacgtcgccattttcgcctgcgacaccacccaatacccccgcatagcccgccgctaccgcgcggcgctcgcagccgggcccctgctggtcagcggaggcaagatcatcgaatacgactccggcgacagcttctatacccaccgccacccgcgttcgctgatcggcaagcgcccgaacggcgaggtggtgatggccgtgatcgacggccgcgccaaaggccaggctgccggcgctacgatcgccgaaacggcttacatcgcccgcctgctggggctcacggacgccctcaacctcgacggcggcggctcttcggcactctggacggcacaggaaggggtggtcagccaccccagcgacaaccgccgcttcgaccatgccggcgaacgcgccgtaccaaacggcatcgtcgcccgtccgcggaaataaaggggcagttctgaaaaggtgcccggcacagtcccccccccgcaaacatcacaaaaaaaacagcccccctgatccggagggctgtttgcatatccacggcgaacctattcaccgaccatttcggccacccgctccgcaatcatggcgggcgtcacggcatacaggcagcggtaatccccgtaacggcacggcttgttcccgaagaccgaacagggacggcattccatatcggcctgcaggatgccgcgcgggtcgcaaccatagccgaagaaccccagcccgggatgggtagcaccccataccgacactacgggcgtcgccacaagcgaggccatgtgcatgacgagcgaatccatcgccaccacgcagtccaggttggcaatcaggtctaattcgccgtctatcccgacccgtccgaacagcgccgtcacattggggtacgcacgctccatttcccgcgcgaactccgcttcggctccgcctccgctgtgtatgaacacccggtcgtagcgttcggccaacagacgcaccgcctcccgcccgagcgccgtgggataggttttcccctgctgcgccgaaaacggcgagaagccgatccaggtacccgtcttctcccccatcgggttgggacggcagcgccgcagggccggcacggggtcgtcgaacacgaaccccagtttccggaacacgtcgcaatagcggacgacggtatgcttggcgggcttcacgtcacggccacctttgcggataaactcctttttctcctcgcgccccttctcgatggccgccacggggactccgcgcagccacagggcggtgcggaacatcaccgagcgcagcacgccgtgcacgtcggccacggcatccacccccaggcgccgcgcatcggcggccaggcgccacattccccgcagggagtggtgcacacccttgatatctacatccataaaaccgagatcgagccctgtaaaaaaggctcgaaacacgggtcttgtcgctaccgtcaccctcaggtcgggataggcctccttcaaagcccgcagcgcatgcgccagcatcgccacatcccccatcgccgaagtccggaaaacgaccagatgacgcggaagtctcttattttttctgcccataaagcaccgggttcaacgccgggtcgttatacatcttcatctgcttataggtcttcatatacttgcggccggcctcgatgtccccgatcagctcttcgatcgcccccgaaaggtcgacctgctgcgccagcaacacgtcgagcttcttccggcacgccgcacggtgggcgtcaccgacgtccgtacgctcggcttcgcatgccatgtggtaaatcttcagcgccaggatcgacagacggtcgatcgcccacgccggggtctcggtattgagcctggcatcgggccggggttccacgtccttgtatttgtcgagcaagtacgaatcgatatattccaccatatcggtacgatcctggttcgacttgtcgatacggcgcttgatggccagtgcggccacggggtcgatctgcgggtcgcggatgatatcctccaggtgccactgcacggtgtcgatccagtttttatggtataacaggtgttcgagcgaacccggctcatagggattttcgatcggatgatccacatcgtcccaccgatggtaatccccgatggcgcggttgaagatcttgtttgcggtttcggtaaacatagctcagcagtgcattttatattgtaattctcgtgggaaaatcatacctttgtccgtaaagattaaacaaagataatgaatttttccaaaaaagcaatatcgctcgcaggaatccttttgatagtcgtacaaagcctcccggcacaggtgcggcagacccgcgaggaatatatcgaccgctacaaatccatcgccgtggcccacatggagcggtacggcatccccgccagcatcaccatggcgcagggcatcctagagtccgactgcggcaacagctggctgtcgctgcaatcgaacaaccatttcggcatcaagtgcaagcgcaactggacgggcgacaaggtctattacgacgacgacgccaagggggagtgcttccgcagctacccctcggtcgaggcgtcgtacagggatcatgccgaatttctcgattcgcagccgcgctacgactcgctgttcgcctactcgtccgacgattacaagagctgggcgcgggggctcaaagccgccggctacgccacggcacccgactacgcgcagcggctcacgcgcatcatcgaggagaaccagctttacctgctcgaccggcccgacggcgagcggctctacgcctcgcgcatgggacgcaaggtaaccgaccccgaagggtggttcgccgaccagagcagcgtcgaaccggccgcaggagcttcgccggccatcgacccggacaactaccgggtgacgatcaacgcccacaacggctacaacgtctaccagaccaacggcgtacactacgtgctggccaaggagggcgacacgttcgagaatatcgggcagaagttccgcatttcggctcgcaacctgcgtaaattcaacgacctgaaagacaagaaggcacagccgctgaccggcgaggtggtctacatcgagcgcaagaagaagcgctgggagggcaatgcccacacccacatctgccgccagggcgaaacggcctatgccgtaggccagtcctacgccatccgcacccgttcgatcgaaaaactcaaccgcctcaagcccggcagcacgctcgaaaaggggcaacagatacgcataaaataaaaacagcatagcatggaaacgacaccgctcaggagcaagatcctggatacgatcatccgcaagtcgaccctcaagcaacgggtcttcgacaacaccttcgcagccttcaacgaactgaaggaaacgctgttcgaaatggcatcggagatggacgacgaactcgacggcaagctcgaccgccgcgtcaggctcgaataccgcgaccgcggaaaattcgaggcgcagctgcaggtggccaacgacattctcattttccagatgcacaccgacgtcttcgaattcgacgccaaccacctgatctggcagaacccctacgtacagtccgaccgcgaaaattcctactgcggcctgatcaacatctacaatttcctctccgactcgttcaagttcaaccgcaacgctgacgaaggttacctcatcgggcgtatcttcatcaaccgcgagcgccgctatttcgtcgagggcaaacagcagacctcgatgcgggcgatgaacttcggcaaggccgagatcgaccgcgaagccctgatcggcatcctcgaaccggcgatctggttcgccctgaacttcgacctgctgatgccgccctacgaggacaacaaacgcgtgacggtcgaccagttcaacaccaagatggacaactcgaaattcgtcacgggcaaacgcctcggctacgatttcgaagtagaggacatttaaacccgattcccacgtgaaggcacaacttttcacactcctcgcagccgcagcggtcggcacaggtacggtacaggcgcggggcgaatatgccgagatcgcacgcctgcgctcgatgaacgaaaccgtccgcggcatccgttcgatggccgacggcgaacactataccatcctcgaaggcaacaacatcgtccgttacggctacgccacggcggggcagggcgagcagatgctccccaagccgacggccaacctcgtcgtcacggactacgccttctcgcccgacgaacggcagatactcatcgcctcgggcgccaggccgatttaccgccactcctacacgaccgattatttcctggcctcgggcaacagcctgatgcccgtactccgcgaggccgaagccccgcgcgacgcctcgttctcgcccgacggcaagctgatcgcctattccgaccgcaacgacctctatgtctacgataccgcgggcaagcgcacgcgccgcatcaccgacgacggggcgtggaactcggtcatcaacggcaccacggactgggtctacgaggaggagttcggcttcaccagagcctatgccttctcgcccgacagccgccgcatcgcctacctgcgtttcgacgaatcggaagtgcccctgatggaaatgatgcgcttcgacggcaagctctacaaccaggcctactccttcaaataccccaaggccggcgagcgaaattcgacggtcgaagtgtgggtctgcgaccttgcaaccgggacacgggagcgcatcgacacgggcggcgagaccgaccagtacattccccgcatcggctggacacccgacggccggctctactatttccgcctcaaccgcaggcagaacaccttcgaggtgatcctctgcgagcccaacggtgcccagcgcacgatctatgacgaacgctcgcagcaatacgtcgagcgcgtgaatgacaagaccgtcaccttcatcgacggcgaccgcttcctcgtgcggcaggagggacacacgggctacatgcacctctacctttatagcatccgcaaggggttgctcgcccaggtaaccaaaggcgactgggaggtgaccgacgtggtcggcaccgacggcaaacgggtctggtacctctcgaccgaaacctctccgctgcgccgcaacctgtacagcgtacggctcgacggcaaggacaagcgccgtctgacgaccggcgagggctactacgccatcgccccgagtgccgggatgaaatactacatctcgaccttctccaacgccacgacccccaaccgggtcgaagtctgcgacaacgaaggcaaccccatccgcacgctggccaacagccgcaaactccgcgaagagctggcggtcgtacagcgccccgtccgggagttcttcaccttcacgaccgagcgcggcgacacgctcaatgcctacatcgtcaagccccgcggcttcgatccctcgcagcgctaccccgtgctgctgacccagtattcggggcccggctcgcagtcggtaagcgaccgctggtcgctcgactgggaggatgcgctcacggacaaaggctacatcgtagtctgcgccgacggccggggcaccgggttccggggcgagaagttcaagaaatcgacctacgggcgcctcggagcgcaggaggtcgaagaccagctctcgttcgcccgctacatggccgcgcagccctacgtcgaccctgcgcgcatcggcatctacggctggtcgtacggcgggttcatggcactgggctgcgcgatgaaaggccacggactattccgcatggcgatcgccgtggctcccgtcacttcgtggcgctactacgactcgatctacaccgaaatctacaacaacctgccgcagtacaacgccgcaggctacgacgacaactccccgattaacttcgcccggatgctcgacgacaccaagacccgactgctcatcatccacggcacggccgacgacaatgtccacttccagaacagcgtggagatggcgcgcgccctgaaccgctgcggcaagcagtacgacatgatggtctaccccgaccagaaccattcgatgcagcccgacgacacggccaatgtccggcagaagatgatcgaatacacgctcgaacacctttaaaccgccataccctgaatcgccatcgtcgttccctgccaccgcgtggtcggcagcggctgcgctttggtcggctatgcgggcggactggaggccaaggcctacctgctcggcctcgaacgggaaaccgagggctgaaaaaccgccgccctgcaaacgggaagacgggcggcaaacttcccgacttcggaatgcacattcccaaaagcaccgcggaagaccgcacgaataaaggagggggcacttgctaaagcaagtgccccctccttacccgtcgtccgtctaaagcccgaacgagaatacgttgatactgtcgtaaaccacgctgaagacacccagcagcaaaatccccgccatgcagagcgcaaggctgagacgcgtatagcggtcgctgcgcagcggtgcgatcggctcttcgttgggcgtaatatacatcgccttcacgaccagcaggtagtaatagagcgaaaccaccgtattgacaagcgcgatgaacaccagcaggtggaaaccacccttgaatgctgcagcgaagacgaagaacttcgagaagaacccggcaaaaggcgggatgcctgccagcgagaagagcgccagggtcatcatcaaggccaatttggggttggtacggtaaagcccgttgtaatcggccagcccgaccttgccgccgctatgctgttcgatggtcgaaatgatgccgaaaacggcgaggttggccgccatgtataccagcacgtagaacacgagcgaagtcattccgatggcgctgccgccgatcacggccagcatgatatagccggcctgcgagatggacgagaaggccatgaaacgcttcaggtcggtctgccggatggcgaagaggttggcaaccgtgatcgaaagcaccgtcacggcatagagcaatgtctgccactgcccgaccatcgggccgaagaccttcatcagcacggtcatcagcacgaacgccgccgaggccttcgacacgaccgagaggtaggaagtcacggccgtcggcgccccctggtaggtatcggccgtccagagatggaacggcacgagcgaaatcttgaaccccagcccggcgaagaagaagaccatcgccatgacctgcaacggcgaccccgtaatgcgcgccgccatatcgccgaagtagagcgtccccgtagtcccgtagaagaacgagatgccgtagagcatcagaccgctcgcgaacaaggcgcagaggatgtatttcgcacccgcttcggccgaatggtgcttgtacttgtcgaacgccaccaggcaggccatcggcaccgaagccagttccatgcccaggaagaagagcaggaaattgcccgccccgaccatgaaatacatgcccagcagcgtcgaaagcagcaggatgtagaattcgccctgtttgtgggccgtgtcgtcgcgccgcagccacgtaccggcctgcaggcagacgatgagcgccccgatggccagcacgctcttgacgacggtgtgcatcggcacatagcagaacatgccgccgaatacctcgcccgccgtccccggaacgacattggccagcacctgcaccgcgagcagcccgcaggccaccgccgaaaaccagcgccttccgcgctccccggcgatcaggtcatagaggaacagcaggacgatcaccgcgatgagcgtcacttcggcctgcatgtacgagaatatattgctgtaatccatagtcgcttaattcattaagtgtgtaatgatctccgaaacgctgccccggatcatgtcgctcacccacagcggcgcgagccccatgccggcgatggcgacgacgaggcagacgaccgacaggcgttcgtcccacgtggcgtcggagagccggagatgcgcttcgttggtacaggtgccgtagagtatcttcccgaccacccgcaggatgtagaccgccgtgatgacgatcgacgtgcaggcgatgatcgtcaccacacggtggaacgtgtcgttgtccatgaacgcgccgttgaagatcgtcatctcggcgacgaacccgctcaggccgggcaggcccaggttcgccaggcccgcgatgacgtagcccaccgccaggaagggcatcaccttcatcagcccgctcagttcgcgcacgtcgcgcgtatgcgtgcggccgtagatcatgccgatcagcgcgaagaagagcgccgtcatcaggccgtggctcagcatctgcagcacggcgcccgtgccggccgtggtgttcatcatcaggatggcgaacagcaccagtccgcagtgcgacaccgacgagtaggcgttgatgtatttgaggtcggtctgcacgcacgccgcaaaagcgccgtacacgaccgagatcgtcgtcagggcgatgaatatccagctcagctcgtgcgccgcttcgggcatgaggtacatcgccacgcggaaacagccgtagccgcccagcttcatcagcacgccggcatggagcatcgacacggccgtcggggccgaagcatggccgtcggggctccacgtatggaaggggaacagggcgcccagcacgccgaacccgacgaagaccagcgggaaccagatatattgctgcgccaggggaatgttatgcagctgcgcgatctccaggatattcatcgtcgtggccccggcaccgaagtagatgcccaggatgccgatcagcagcagcgccgaaccgcccatgagcatcagtgtcagtttcatggcggcatactccttgcgaccgctgccccacacgccgatcaagagatacatcggaatcagcgccacctcgtagaacatgaacatcgtgaagaggtcgaccgaaacgaagaacccgaagacgcccacgctcagcaggcagaaccagaggaaatactccttgacctgctccttcatccgccacgaggcgaacgtccccgtaaacacgatgatggccgacagcagcagcatggcaaccgaaatgccgtctacccccacggcatagtggatattgagcggcgcataccacacatggctttcggtaaagagcatggcggcctgctcgcccgcctcgcgcaggccgaggtagcggaacaccagcaccaccgccagcgccagcagcagcgaggaacccgccaccatcacggcacgcacctgccgcgcggacttcgagagccagagccccagcatcatcagcaccgggatggcgggaaacagtgataacatattcataacagctacagtttagcagattaaaagcaagaagatcgtaagtcccagcgcaccgccgaggaaccagatgcagtaacgctgcacgctgccgctctgcatgtcgcggatcacgtatgccgcgccgttggtcgcccgcgccagcatgttcatcaggccgtccaccacatggcggtcgaaccatgcgaccggggccgagatgcaggcgaagatcacccggtgggtaacgaactggtaaacctcgtcgatgtagaaacggtggtaggccgccttatgcagtcccctgaagcgcgctgccagggcatcggccaccgtctggcgctcgcgcaggtacatccacgtcgccaacgcgatagccgcggcagccacacagaggctcacgcccgccacactgcggtcgatatggatcgtgtagggcatcccgtcgctgctgaccagcttcccgaaaggaatgaaccccgccacgcaggtcactgcggccaggaacaccaacggcagggtcatcgtcagcggcgcctcgtgcggcctgtgcgccgcatgcagttcgcggttttcgcgtccccagaagatgttgtaatagaggcggaacatgtagaacgccgtcaggccggcgatcccggtcatcacccaccccatcacggggctgaaggcgaagcacgccgtcaggatctcgtccttcgagaagaaaccgctcaggggccagatgcccgcgatggccaggcaggccacgaggaacgtcgcatgcgtcacgggcatgtatcggcgcaggccgcccatggccgacatttcgttggagtgcacggcatggatgatgcacccggcgccgaggaacagcagtgccttgaacatggcgtgcgtgaagaggtggaacatcgaggccatgtaccccagcccgcccgtatggggatcagccgaggtgcagacgcccagcgccacgatcatgaagccgatctgcgaaatggtactgaacgccagcacacgcttgatgtcgctctgcacgcaggccacgacggcggcgtacagcgccgtaaaggccccgatataggccgtccagtgcagcacctcgggcgcatagccgacaaagagcgggaacatgcgcgccacgaggtagacgcccgccacgaccatcgtcgcggcatgaatcagcgccgacacgggcgtcgggccctccatggcgtcgggcagccagatatgcagcgggaacatcgcgctcttgcccgcgccgccgatgaacatcagccccagcgccagcgggatcatcgcaccggcggcagccagcagctgcacgtcgggcgtgaaggagaacgtcccggcatagtacccgtagaagaggatgccgacgaggaaccccaggtcggcgaagcgcgtcacgataaacgccttcttcgaggccgcgacggcctccttcttcgtgtaatagaaaccgatgagcaggtaggagcttacgcccaccaattcccagaagaggtacatctggaagatgttggtagccaccaccagccccatcatgctcatcgtgaacaacgacaggaaggcatagtaacgctgaaacccccgctcgcccttcatgtagcccagcgagtagacgtgcaccatcagcgagacggtcgagatcaccacgagcatcatcaccgaaatcgggtcgagcaggatgcccaggtcgatatgcagcgtccggctgatcggcagccataccgtgttccacggcacgagcgtggggaacacccccgaggcgtcgcgccctgcggaaaaatactcgaacgccgtacaatagctcagcaacgccactacagccagcaccgccgtgcctatggcgcccgcgacgacgggcttgagcttcatgccggccagccccaggaagaggaagctcagcagcggcagcagcaggataaggatcgtatattccataacaatcgttttttcagaatcgttaccacttcatctcccgcaggctcttcaccccgatgttgcgcaggttccggtagatgttgatgatgatggcgattgcgacggccgtttcggcggcgctgatgccgatggcgaatagcgtgaagaagaatccctccagctgttcggggaacaggaagcggttgaatacgacgaaattgatgtcgaccgaattgaggatcagctcgacggagatcagcatcgcgagcaggttgcggcgcgtcacgaacccgtagattcccacgaacatcatgatcgtggagaggacgaggtaatattccatgtgtatcatagtcgtactctttttagcgtttgcgtgcgatgaggattccgccgacgatgcaggccagcaacaggatgctgatgacctcgaacggcagcacgtagccatatttgccgctgctcatcagcgcgtggccgatcgtctgcacgtccagttcgccgtggacgaaatgcgacggcatgaaatcgtgccggagcgtcacgtagaggcataccccgaggctcagcagcgtcgccgccagccccacgaacagcttgtagccctttatgtcctccgacttgtcgccctggctcgaggtcagcagaatcgagaatacgtacagcaccgtaatgccgccggcatagatcagcagctgcacggcacccaggaacgaatagttcagctggaaatagatgcccgccgtaccgaacagcacgaacaacaggtaggtcgccgcgcgcaggatacgcttggtcgtcacggccagcacggcactcacggccgtaaagaccgccaacaccgtaaagacgattaattcgagtgttatctccatggcttattgtttgttcagggttttgaccagcttcccgcgcgtgtataccgcgtgttcgaaatcggtcgagaaacggatggcccccgtcgggcaggcgttgacgcacagatggcagaacatgcacgaccccaggtcgtactggtaaagcaccaggcggcgtttcgacttgcccgtctcgggatcggtgaccatctcggtggtgatacggatggtttcgttgggacatgccgactggcagaggccgcaggcgatgcacttgttcttccccccggcatcgtggggcatggtcagctcgccgcagaaacggtcgaacatctcgagcgtggcccggttctcggggtattgctcggtgaccttcttggtgaagaactcctgcccggtcaccttcatacccgtcagcagggttcccaacccgtggaaaagtcctttaatatagctactcatgactaaaaatgcagtttaaatacgacgacgatgaccatcagcagcaggtttgccagcccgatcggcaccaggtatttccattccagcgtcagtatctggtcgatacgcaggcgcgggaacgtccacttgatccacatcagcagccacaccacgaagaacgccttgccgaagaaccagacgaagccggggatatagtccatggcggcattgaagccctcccagccggggatgtgcagcggcatccatcccccgaggaagatggtggccgcaacgcccgaaacgacgaacaggttgacgaactcggcgacgtagaacaggccgaagtgcatacccgaatactcggtgtggtaccctgccgtcagctccgactcggcctccgggaggtcgaacggcccgcggttgacctcggcgttgcccgcgatcaggtagatcacgaaggcgaccagcgccgggacatgccccttgaagatgaaccaaccgtcggcctggcgggcgacgatctccgagaactgcatcgtatcggtcagcacgacgatcgtcaggatcgacagcccgatcgacagctcgtacgagatcatctgcgcaccgcttcgcatggcgccgatgagcgaatacttgttgttggagctccaccccgccagcaggatgccgaccacgccgatcgacgaggccgccatcaggaagaagacgcccacgttgaagtccagcacctctagccccttgttcaccggcaggcaggcgaaagccagcaccgacgccaggatgacgatgtagggcgcgaggttgtagaggaacctgtccgagcggcggatggtgatgatctccttggtgagcatcttgaacacgtcgcagatcacctgcaacgtaccccacggccccacgcgcacgggccccaggcggcactggaacgccgcgcagaccttacgctccatgaagatcatcaggatggcgatcaccgcgtacatcagcagcaggcagacaccgacgatcacgcactccaggaagaccgccagccccacgggcatcagcgacgtgagcagcccgtgaacccagctcgttactatactaaaatcaaacatatctgtaagtttttccttttttatcccgctcccgcctcaaggggaggggcttataaacccggaagcgacatccggctacctgtctatatcgggcacgacgtagtccagcgtaccgccgatggcgatcaggtcggcgatcttcgtcccccgcgcaatggtttctaggcacgacacgagcgggagtcccgtcgagcggaacttcatgcggtagggcgacttctccccgcggctctcgatgaagaccccgaactccccgcggctgccctcgacggcggcgtagtaactgccttcgggtatgcggatcacgggcttcatcttcaactggtattcgccttccggaatgttgtctatcaactgttcgatgatattcatgctctgttcgatctcacgcatacgcaccatgtaacgagcgaaacagtcgccctcgtcgtagagtacttcctcgaaatccaccttgccgtacatggcgtaggggtggcgcttgcgcacgtcgcacgcccagcccgaggcacgccccgtaccgcccgtggcaccgaacgagatggcgtcttcgcgggtcagcacgccggtgcctttcaggcgttcccgggcgatgacgttccccgtgaacacctcgtggtactcgcgcagcgtcgggcgcatgtaggcgataaactccttcacgcgccgtacgaaatcgggatggatgtctgcctgcacgccgccgatcgtattataagtctggatcaggcgcccgccggtggtctgctccagaatgtcgagcaccttctcacggtcgcggaacccatagaaaaaggccgtcagggcccccatatccatgcagaggcaggcaaagaacagcaggtgcgagtcgatacgctgcaactcgtccatgatcgtgcggatgtactgcacgcgctcggacacctccacccccaaccccttctcgatacacctgcagagcgcatggcggttctgcgacgccccgaggtagtcgaggcggtcggtaagcgccagcgtctgggggtaggtcaggctttcgcacatcttctcgatgccgcggtggatgtaaccgcaatgcacgtcgagcttgcggatgatctcgccttcgagcgacacgcggaaacgcagcacgccgtgcgtggcggggtgctgcgggccgatgttgatgacatattcgtcctcctcgaacaagacgttgcggtggcggatgaagctgccgtccgccgtcagttcaaagctcggggcgctgtccttcgacacttcgttggtcatgcgcaacgggttgagccccgggtcgtaatccttacgcagggggtaccccacccagtcgtcgcgcaggaacaggcgccgcatgtcgggatggttcaggaaaccgatgccgaaatagtcgaagacttcgcgctcgttgagttccgcagccttccacaggtcgcagaccgaaggcagcccgcacttctcgcggctgggggtcagcgtccgcaacacgacgttctcgcccgtcgcggtggcttcgaggtggtagaccgccccgaacccctcttcgccccagtccatgcccgtcaggctgcgcaggaaatcgaatccctcggccctcaggcgtgcagccagggcgtggaatttctccaccgggacggtgaacatcccgtccccgacctccgaccacacggctccgggttcccaagccgttattttctctctgatattcattgtttttctcctccttccacgttcaaatcgttcttttcggccgtcagatcccggcgaagcagctcttcgtactcctgcttaccgatctgcttgttcaccccgccgaaaaaccgctgtaatttcactttgcgctgcaactgcatcagcccgtagagcatcgcctcggggcgcggcgggcacccggggatatagacatcgaccggcagtatcttgtccacgccgttcagcacatggtacgacttcttgaacgggccgccgctgatggcgcatcccccgacggcgatcacatacttcgggtcggccatctggtcgtagaggcgcttcaggacaggggccatcttgtgggtgatcgtcccggccaccatgatgaaatcggcctggcgcggggaagcgcgggccacttcgaacccgaaccgggcaaagtcgtagcgggccgcccccacggccatgaactcgatcccgcagcagctcgtggcgaaagtcagcggccagaggctgttgctgcgcccccactcgatcaattcgtcgaggcaccctacgatcacgttcgtaccctcgcggcgcagctcggccgccatcttttcgaggtattcgttgtcattgaaatcctcgtatttcattgcctttatctccggcttccttatttccattccaaagctcctttccgccatgcgtatgcaaggcctaaaaccagtacgaccaaaaagaagaggatgctcaccagcccgtaaatccccagatcctggacgaccaccgcccacgaaaagagaaagacggtctccacgtcgaacatcaggaacaggatcgcgaacaggtagtaccccaccttgaactgcatccacgaccgtccgcgcgtcgggataccgcactcgtacgcctcgcctttctgcgggttgtacgagcgcggcgatatggcgcgggcgatacccagcgcgactgcgaccagcgcaatagccgtcaggatgacgaccaccaatagcgtaaaatacataacctatcgtttttacgaatttactcggaacacgaaaacacgaacgcatctccgggagaaaaaatcctcatccgggaacatgcggcaaaacgggaacgggaacagcggctaaatcaggatacgccccagcgaaaagacataataatcgaccggcttgggatgcaggtcgaagcagtccgaataagccggacggcaggacagcccgcgggccgacgccatggcccgggcatcatggcgcagacggacgatcgccttctgggcggacagttggacgggattttcgatcggagcgtcgcaggtgaagactgccgccgtgaaacaattgtgtgccggaaccggcgtccggagagtggactggcaaatccggtcgggctgcaaaactaccctaccggactgaacctgagcgccatccaggcttcctgccaagacaaaaagcaagatgaacaaagcatattgaatcctctccagcatttcgaccttactattttcgtgctgcgaagatacactctttcgcgcagaaaacggaatccatggacgaaaaaacgtacataatgatgaattttgagtacaaaaacacccatagccggattcaggtaatactccggaaacaagcccggcggatggcaacgagccccgcccggtatattccgccccggcaactgcgaaaggccgtgcccggaaggtttgcctgcagcacaaaagaaaatgccgccccgaaaaccggaggcggcatttccaacagaaacaaacccttatttcttttcgtaacggtctgcaacgaccttccagtcgatgcgatcccagagggcggcgacggcgtcggcgcgacggttgcggtagtcgatgtagtaggcgtgctcccatacgtcgaagcacatcagcggcttcatgccgtgacacatcgggttgccggcgttctgctccgtgacgatggccagcttgcccgatttgtcctcggcgagccaggcccatcccgaaccgaaaaggccgacggcagccttctccatctgggccttgaactgctcgaacgaaccgaaatccgcgtcgatagccttcagcaacgcccctgtcggacgcgcctcgccatcgggcgaaagctggtcgaagaagaactcgtggttccacatctgcgcagcgttgttgaaaatcgcgccgtcggccgaaacgacgatgtcctccagcggctgctgggcgtaaggcgtatcgagaatcagctcgttgagtttattcacataccccacgtaatgtttgtcgtggtggaagcgcagcgtctcttcggagacctgcggtgcgagagcgtcgtaagcataaggcagctccttgggggtaaaccgtgcctgtgctgcaatgtctgttgccataataggtaaaattaaaagtgaaacaatgaggttgaacttaatcatagccatcccgttttagtttgcttcgagcggttcgaatgcccatttgccctcgttacagaccgggcatacccaatcgtcgggcaggtcttcgaaagccgtaccggggtcgatgccgttctccgggtcacccgactccgggtcgtaaatgtattcacagacggtgcaacgatacttttccatgcggtaaaaaagtttaagaaaatccacaccggccaacacaaatataataccgatatcaaatatctcaaaatatttttataattttgagggaaagaacaacaatttataacctaaaacgctcttttctatgacacttccgtatgcagaaccttacaagatcaagatgaccgaggccatccgcacctccacccgtgcggagcgcgaagcatggatccgcgaagcccgctacaaccttttcaagctgcgcagcgaccaggtcacgatcgacctgctgaccgactcgggcacaggttcgatgagcgaccgccagtgggcggccatgatgaccggcgacgaaagctatgccggggcctcatcctatttccggctcaaggagacgatcgaaagcatcttcgggatgccctatttcctgcccacgcaccaggggcgtgctgcggagaacgtgatcttttcggcactgctcaaggcgggcgacatcgtcccgggcaactcccatttcgacaccaccaaagggcacatcgaattccgccgctgccacgccgtggactgcacgatcgacgatgcggccgacacccagaaagagttgccgttcaagggtgagatggacatcgccaagctcgaaaagctcctgcgcgagaacccgcgcgagaaagtcccgtgcgtcgtgctgaccatcaccaacaacacggccggcggccagcccgtgtcgatgcgcaacatccgcgaaacggccgaagtctgccgccgctatggcgtacccctgctgctcgactcggcccgcttcgccgagaatgcctatttcatcaagacccgcgaggagggctatgccgacaagaccatcaaggagatcgtccgcgaaatctacacctatgccgacatcatgaccatctcggccaagaaggacggtgtggtgaacatgggcgggttcgtggccatgcgcagcgaagagctctacaggcaggccatgaccttcagcatcatgttcgaaggctacgtgacctacggcggcatgtcgggccgcgacatggatgcgctggccgtgggactggacgaaaataccgaatacgaacaactcgacgcccgcatccgccaggtgaaactgctgggcgacctgctcgacgaatacggcgtaccctaccagcggccggccggcggacacgccatcttcgtcgatgcgaaaaaagtgctccccaacctgccgaaggaacagtttatcgcccagacgctcgccgtggagctctatttggaggcgggtatccgcggcgtggagatcggctcgatcctcgccgaccgcgaccccgatacgcacgagaaccgctacccgcggctggaactgctgcgcctggcgatcccgcggcgggtctactcggacaaccacatccgcgtgatcgccgcggcctgccgcaacatctacgagcgccgcgcagagatcaccaccggctaccgcatcaccttcgaagccccgatcctgcggcatttcaccgtggaactggacaaaatctgaacccgaagatgcgtccgccgctccaccggacagcatccgcggaatagaatataacgaaccgggcagggaaaaaccctgcccggtttattttcgtcggccgcaacggcccgcccccgaagtccgccacccgagtccatcgcccgggaacagaaacccccgacgggcccgcagccgcagcccagccactattgcagcgattcaggagccggaatcaggaacagcagcccgattagtgcgatcaggcataccaccacgatcaggatcgtctttccccagttccgcttcttcgtccccggcacgaccgtctcgtagcccgcaaaggctttcgaatccgcctgttgcgtcgccgcgggtttcgcaccgcccaggcgcgccatctcctgctccatgcgtttggagcggtcggccgacatctcggcctgcttccggcggagggcctgctcggcggcctggcgttcgcgctccagcttcgcctcggcctcgcgtgcctcctgttcgcgcctcgcctcggcctcacgggcttcctgctccttgcgcgcctgctcggcacaaaggtattcgatatacttcccggcacggaaaacatccacgaagacaaaagtctccatcggggtgtatttctcctccagccggatattttcgcggacaagccgctgcaaggtatcgtagacgggcaccaacggcttggaaaggtactcccgccgcaccgacgaggcaagctctccggcacgtcccagcatcgaggtctcgaacgcatcgaatccccgggcaaggtaatagatcgcctcggccagccggatgtcgtcctcgcgctggccgaacaccgacctcaggcggtcgaccgcagccccgcctttgggcgacccggtgttgcagtagcccaggaacccccagaaccgctgccagtaatcgtcggtgagctcctcttcgtaagccttcaccgactcctccgggcagacgaccgcccgcgcgaggaaataccagtagccggcctcgtagttcgacgaattttcgtgcagcacggtgagggcatcaaggcttttctgcgccgcttcagactccgtcgccgtgatcaggcgtgacacggccgcttccagttcggcacgctgcacggaggtgagctcggcagatttcccggcgggcttttgctgccgcgccctgaggatcgaagcctgcgtagcggcgtctatccgcaaccgctgcgcctcggcatccaactgctgcttgcacgccgcatcgagcggcccagcccccgtcacctgcacgacgaacgcgcggtactcctcgtgcgcctgccgctcgcagttttcgcagcgcttcgacgcctcgacataatattccaacgccacctgcttgccgcatttcggacatacgacactgtggtcgacgtaaatacacttaccggaaaccgcacacacgatggtcttgcgcgagtcgtcttcggtaatgttgttgtggatcgtgatgttcgacgcctcgtatttctcctgcttgccgatgatcgtactttcattgatcaggttcttatcgccgacgagcggcgcggcttccggctcctcggccgccggcgtgcgtttcacctgcaccgcagcgcagtcgcaaccgcacttgtggcagaagcgggcagtatcggcgagtttatcgtaaccgcacttgggacatgttttcatgcttgttcgttgttttcttcggtttcactatcagcctcatccccggcaacggcctgctcgaccgccgaggcgaccagccacccgtggctcatggttcccgtgacgacgac

SEQ ID NO: 315 - DNA, 82820 bp, Alistipes onderdonkii
  source 1..82820: mol_type = genomic DNA
cgcacgggcttgacccgcggctgctcaccctgggcatcgcagcgctgctcatcgtcgggttcttcttcatccgcagccagctgcgcgagccctatccgatcctgccgttcgacctgctgcgcatcccgatcttttcggtttcggtcgtcacgtcgatctgctcgttcctagggcaaatgctggccatggtagcgctgccgttctacctgcaacacgaattcggctacgacgaagtggcgacagggctgctgatgaccgcatggccggccgtgatcatggtcgtggctcccgtggccggaatgctcgtcgagcgcatccacgccggactgctcggcgggacagggctgacggccatggccgcgggactgttcctgctggtattcctgcccgaacaccccgcaccgggcgacatcgtatggcggctggtgctctgcggtgccggcttcgggcttttccagtcgcccaacaacagcatcctgatcgcctcggctccgcccgagaggagcggaagcgccagcggcatgctcgccacggcgcgtctcataggccagaccacgggtgcggccctgatggcgctgctgttccacatcgtccccgacgacagcacccacacggcactcctgctcgccggcgggttcgcactcacaggagccgtcgtcagccttacccgtatccggctacccctgcccgaagggttggcccggcacaagagataattccccgggcaggcggaacgacggacactccggcaggtatcggcaccgcccatgcaacccggcacagcacgcacggcaaacacacaagacaaccacacaaacaacagcatacaacaacactaatcccggcatgaaataccccttgctcctcgccgtcctgttctcctgcatcgggatggcgcccgcacgacaaaccccgccttcaccctccgatacggtacaacgtgcaacggccgctctgcaaaccgacaatgcatcgatctgcaccccgcacgcaaccggcgcggagacaccccctacactgcaccccgacaccgcacaaccatccgcccggacgcaattcatccgcccgccctacctgcggcccggcgacacggtgggcatcgtcaccccggcgcggaaactgtcggagaaggccgacacggcaaaagtgcgcgaacgcttcgaatcgtggggactgaaggttaagttcgggccgcataccgccgaccgcgagcaaccctatttcgcaggtaccgatgcccagcgcgccgccgacctgcaggcgatgatcgacgaccccggcgtaaaagccgtcgtcagcttccagggcggttacggctcggtacggctgctgccgctcatcgacctcagccgcctgcgcgagcatcctaaatgggtcgtcgggttcagcgatgtgacaatgctccacctggcactgggacggctgggcgttgagagcctccatgccaccatgccgggcaagttccgcttcgggagcgaggagaccgccgacgcgatcgtctccgacgaagcgctgcgcagtgctctgctgggactgcggcagcgtatcgacaccggcccacacccgctcaactgcccgggcacggcccgcggacgcctcacgggcggcaaccttgcgatcgtctgctcgtcgctcggcacacccgaggaacccgacttcgacgcccccacggtgctcttcatcgaggaggtcggcgaacacatgtaccgcctcgaccgcatgatgcagcaactcgcccggagcggaaagctcgccaaatgcaaagccatcctcgtcgggcatttttccgacatggccggacaaaaacatttcggcatcaccgacccctatgacatcgttgcgcaatacgtgcggccgctgggaatcccggtcgtcttcggcctgcccgcggggcacgaagaccccaatgtggcgctctacatggggcgcgaagtcaccgtcacggtaggcgaaacgggtgccgccatcgaattctgacgaaggaagcggggcgcagcggaacggcccgactccgcccggacagcagggcggcgggcggcggggcaaccgccccgggcaaagccgccgggctgcggcggagcggcggcggagcggcgaaagccttccgccccggcaccgccgcaaaccagtcccgttcctccgccgcacggtcgtaaaaccagcctttctgccgcttgccggcggatacaccgcccgccccgaacgacggcagacgtcccgctacgcaaaagccgtacgctccgggccatcgccctccgcaaaaaataaacccgtcggggaacgggcttgccatatttttactatttttgtaaaaggtgggatatgtaaccctgcaaaaggcgcgggaaaccgtccccggaaacgaaatacggattatcggaaatcaaatacactacgcatatgttctcagcaaaaacctacgccgcgcgccgcaacatgctgcgcaccaaaatcgggtcgggcatcgtcctgttcccgggcaaccccctgtcacccaacaactacccgaacaacgcctactatttccggcaggattcgtcgttcctttactatttcgggctgaacatcccctcgctggcgggcctgatcgacgccgacacgggcgaagaggcactctacggcgacgatttcacggtcgaggacatcatctggacaggcccgcagcccacgttgcgcgagctgggcgcaaaggtcggcatcgcggcgacacaccccctctccgaactcgagaaacggctccgcaaagccatttcgctggggcgcaaaatccatttcctgcctccctaccgcggagagactaagctttggctgtcgtcgctgctgggtatcaaacccacactgctgcacgactacaagtcagtagacctgatgttcgccgtggccgaaatgcgcgagaaaaagagcgccgaggaggtcgaggagatggagcgcgcattccaaatcggctacaagatgcacacgctggccatgaagatgtgccgcccgggcgtcgtcgagcgcgaaatcgcgggtgccatcgaaggcgtcgccaaatcctacggttcgggcgtgtcgttcccgtcgatcgtctcgcaacacggcgaaacgctgcataacctcaacgccgacggcgtattggaggaggggcgtctgctgctgtgcgacgcgggcggcgaaacggtcgacaactactgctccgaccacacccgcacctaccccgtaagcgggaaattcacgcagaaacagaaggatgtctacaacatcgtgctggcggcacacgaccatgtggccgacatcgtcaaaccgcacatgatgtactccgagatacacaacgccgcctacacgacgctggccgaagggcttgccggaatagggctgatcaagggatcggcagccgacgccgtggccgcgggtgccatgacgatgttcatgccccacgggctggggcacgggctgggcatggacgtgcacgactgcgaggcgatgggcgagcggagcttcgacttctcctcgatcgcccaacgcgccgccaagtccgcgacttgcatttaccgtgcggcgtggcgcctcgaaccggggacggtgatgaccgacgaaccggggctctacttcatcccggcgctgatcgacaaatgccgggccgagggcctttacaaggggatcgtcgattacgacgccctggagggctaccgcgacttcggcggcatccgcatcgaggacgacatccttgtgacggaaagcgggagccgtatgctgggcgacaagaagatacccgtcacggtcgaggagctcgaagcagtcgtaggccggtaaggtgaaacggattttcattttcccgaccatcgaggaggccaaggccttcatcctcaccgagccccgcgacccggtattcgtcggtggggtgggcatggccgaaatcgcggcggcgacgctgcgcgccgtgaaagccaaaaagccgcagttggtggtgctggccggcattgccggtgcctgtgaccggacattgcggcgcggcgaggtggtcgaagtggtcaccgaacgcatagcgggcatccccgagcgttacgcccgcgaatacgagacctcgggccccgacctggggctgccccttgcagccggggtcaccgtctgccgttcgggcgacggagccgcggcaaaggacgggccgaaaagcgcggcggaaggcaccgggcacgcggcaggggacgccggattcgcggagccgcaccccggatttacggcagacgacagggcgggacacgcagcggaaggcacccatcaccagacgccggaaggaaacccggaggacacaccgggcgggtacctgccggaagtggagaacatggaaggcgcagcctttttcgccgtatgcgacgcgctgggtgtcgcgtgctgccagatacgtgccgtgtcgaactacgtcggcgaacccttcggccagtgggccgtggaggaggccgtcgggaacctgacggaaaagttaaaccaaatattcgaaagcaatgaataaaaattggatgctctgggcgggactgatcctgatactggtcgtcttcatcctggtctggcaattcgcccccgccatccagcggtggctggccaacgtatttatcgacatcatcgtcctcgtgctgacttttgccgccggatggctgctgggccgtttcgggggtaaacgcaaccgcagcgacaacgagaaaaacgcccgcaacatcaccgagacgcagaaacggtgaggctgaagctgcatatctcgccgtgcccgaacgacactttcatgttcgacgcgctcgttaacggccgcatcgacacgggcagcctgcgcttcgaggtcgaataccacgacatcgaggagctgaaccgcggtgccgagctgggacgtgccgacatcagcaagataagttgcgccgtgctgcccgccatcgcggaacattacgcgctgctcgacagcggtgcggcactcggacgcggcaacggtccgttgctggtacgccgcgcaggcgatacgcggccgatacgccgtgtggccgtcccggggctgcacaccacggccaatgccctgatgggcaaactcttccccgaaatcgaagagcgtacaccgctgctcttctcccgaatcgcggctgccgtcgagcggggcgatttcgacgccggggtacttatccatgagggccgcttcgtctaccgtgaacgggaactggaactggtcgccgacctcgggcagttgtgggagcagcggacggcgctgccgctgccgctgggcgggatcgcagcccggcgcagcctgccggacgaggtgcggcacgaggccgaacgcctgctgcgcacgagcatcgaatacgccttcacccatcccgaaacttcgcgcacctatataaaacagcacgcacaggagctggatgacaaggtgatcgacgcacatatcgcgctcttcgtgaacgggtactcgctctcgctgggcgacgaaggccgccgtgccgtcgaggcgctgacgggagtgatcccctgagcaaccgccggccatttccaatacgttccgtcttgaagtccgttttattattgtttccgctcctgatcgccgcaattcgtgcaacgggcgaggcgcccctgtggcaggccgccaacgggagccgggtacgcttcctctggctgcggacattcgacaatcccgtcgtcgtgaggatggagaaaaacggtaacggaatcaccctccgcaggaaaacagccggcggggcaagcggttacgagtccggaaaaatcgcggcagacgagagcaaaaccctcggcaggcatggctggagtacatggcccggttgcaaaaggccggctactggctaatgggtacgacagacaaagacctaatggatttcgacggttcacaatggatcccgggagtaaatccgaacggacaatgccacgtcgtcgaccgatggtgcggacacggtatccgggaactgtgcctgccgctcttccggctgaccggaatggaaatacccggcaacgacatatattaggaaacgccccggcaacccggaacatacagcctacggcgacaacgaaccactgccaagcaaccccaaaccgcgcaatatcccatgtaccgcacgacaaaccgccccaacacccgtatcgaagtggccgacgcactgcgcggcatcgccgtggcagggatcatcctgttccacgcccgcgagcatttcaacctctactggagcgccctcgacctgccccgcgccggattcggcagctgggaacagcccgtggccgatatgctgggattcctgctttcgggcaagatgtacgccatcttcgcattgctgttcgggctgagcttcttcatccagagcgacaaccaggcacagcggggcaacgacttttcgctgcgcttcgcatggcgcatggtgctgttgttcggcatcgggctggtcaacgcggcgatctacaacggcgacgtactgacctactacgcccttttcgggctgctgatgattcccatcggcaagcttcccaaccgctgggtatgggtcatcgcggccctgcttttcatccagccgctcgaactctggcagtatttcagcggacatacactctcgatccgcggcatcgaaggcatggagaccctctatcccaccctcgccacgggcaccttcgccgagagcgcccgcgtgagcctgctctacggcccgctcagttcgttcggctggggactggaacacggacgcggcacgcagacgctgctgatgttcgtattgggcatgctggccggccgctaccggctcttctacgacgaagggcagcacagacgcatctggggcgggttgctggccgtgggcatcgcgggcacgtggctcgtaccgttcgaggcgatgcgcaacctgatgacggccacagcgatcgtctcgacggtcgtcctgctgtggtacggctggccggggttccgccgggtactgcacggcatgaccttcttcgggcgcatgagcctgaccaactacctgctgcaatcgctgctcgggacggcgctcttctacaactgggggctggggctttaccgccacgtggacgtgatatacggcacgctggcaggcgtggggatcatcctggttcagtatctcttctgccgcctctggctgcggcgccatacgcacggccccgtcgaatgggtgtggaaaaagctcacctgggtcgacctcccgcttttcgaccgtaaaatcgcctcctgagggcgattttttcgtgtcgccgtttggttatcccgatttttttgtatatttatagtcggctaatcggaaaatgctccgcagcacgactttccgttccggaaacccggctccgcgaagtactcccgacgatgccccgcaccaccgcaaaaccttaaaaccatacgggaatatgaaaaactattcagcaaaagaaatcaaaaacatcgtactcatcggggcgcccggcacgggaaaaactacccttgccgaagcgatggcctttgagggtaaggtcatcgaccgcaggggtagtatcgaggcgaacaacacgctctcggacaacacggatatcgagcacgaatacaaacgctcgatctattccacgatcctctttaccgaattcatggatcgcaagctgaacatcatcgactgcccgggctcggacgacttctgcggaagcctcttctcggcattcaaggtaggcgacgtgggcgtattcctgttcaacgcacagaacggctgggaagtcggcagcgagatccaggcccgctatgcacgcctgctgaaaaagcccgtcatcggcgtggtgaaccagctcgatgccgagaaagccaatttcgaagccacgatcgagtcgatcagggccgcatcgcgcgtgaagcccgtcatcgtacagtaccccgtcaaccaggggcctgagttcaacgccttcatcgacgtgctgctgatgaagatgtaccgtttcaaggacaacgacggccaccgcgaggagctggagattcccgccgaggagatagacaaggcgcaggaactgaacaaggagctggtcgaaatggccgccgaacacgacgaggcgctcatggagctctacttcgacaaaggtacactcacgcaggacgacattcgtgcgggtctgaaaatcggcgtttcgaaacgcgaggtgatgccgatcttctgcaccagcggcaagcgcgacatcggcaccaagcgcctgatggaattcatcatcaacgtggcacccggtccgctgaaggctccgtgtttcctctcgaccgagggcgaggagatcgccgccgacgagacggcacccgccgtggcgttcgtattcaagagccaggtcgaacagcatatcggcgagatcacctatttccgcgtcattcgcggcaggatcgccgagggcaccgagctggtaaatacccgcacgggcaacaaggagaagatttcgcagttgttcgccgtggcgggcaagaaccgcatcaaggtcacggagctgtcggccggcgatatcggctgcacggtgaagctcaagggcacccgcaccaacgacacgctctcggctccttcggcaccggtcagcatcgaacccatcgtcttccccgaaccgcgctaccgcgccgccgtgaaggccaaggagcagagcgacgaagagaaactgggcaaagtcttgaacgacgccaagttcgaagacccgacgattctggtcgaatactccaaagaactgaaacagaccatcatccagggtcagggagaacaccacctgaatattctgcgcacacgcatcgagaaggagaacaagctctcctacgactatatcgcaccgaaaatcccctaccgcgagaccatcaccaaggttgcgcaggccgattaccgccacaagaaacaatcgggcggtgccgggcagttcggcgaggtgcatatgatcatcgaaccctactacgacggcatgcccgagcccaagaactacaaggttcccggcaagggcgacatgatcgtgaaccccaagaccaaggaagaatacgacctggcatggggcggcaaattgcaattctactcggcgatcgtgggcggcgccatcgacgcacgcttcatgcccgccatcctgaagggtatcatggagaagatggacgaaggcccgctgacagggtcctacgcccgcgacatccgcgtggtggtatacgacggaaagatgcacccggtggattcgaacgaaatctccttcaaactggcggcgcgcaacgccttcaaggaggctttccgcaacgcggggcccaagatcatggagccgatctacaatgtcgagatactcgtcccgagcgactacatgggcgccgtgatgtccgacttgcagaaccgccgtgcgatgatcgccggaatggagtccgacaagggcttcgaccgtctgaacgccatggttccgctggctgaactataccgctactcgacgacactctcgtcgctgacgtcgggctcggccacctataccatgaaattctcgtcctacgagcaggtgccggccgacgtgcaggacaagctgctgaaggcctacaccgataccgacgacgaataatccccggcagcggagaaatacagcgggagggcaatcccccttccggacaggggcgggcacgattgcccgccctttttcgccgtccgggaaccggcagtccccgcctccgcccaccggcgctccgcacgccctgcggtatggcgtatgccccaatccgcccggcatcccggcatatccagcgcggccgcaacgaacagagccgcctcatgttaagttaatgttaacaatcggtgccaaaaccgtttcatcggaaaaaatggcgtaaatttgttcacaatttgcactaaaccctaacatgagcgaaatctacaccgtaatcgtagttattctgggaatcctcgccatttcaggtcttttcgtcggcgtcacgaacgacgcagtcaatttcctcaactctgccatcggctccaaggccgcttcgatgcgggtcatcctcaccgtcgcctctgtcggcattatcgtcggcgtagtcacctcgagcggcatgatggaagtggcccgaagcggcatgttcaatcccggactgttcacattccacgaggtcatgatgttatacctgggcgtgatgttcgccaacattatcctgctggatctctacaactcgtggggactgcccacctcgaccaccgtctcgctgatcttctgcctgctgggctcggccatcgccgtgtcgatctacaagatctcgaacgaccccgcgctgggcgtcggttcgctcgggcatttcatcaacacctcgcgcgccatgggtatcgtctcggcgattctgctgtcggtagtcatcgccttcacctgcggtacgatcgtcatgtatatttcgcgtacgatcttctcgtttcgctatacggtgatctttcgccgcttcgggtcgttgtggtgcggcgcatcgcttacggcgatcatctatttcgcagtcttcaaaggactcaaatcgctgcttgcggacaatgccttcgtcggaatggtcgaccggcacctgctgctgtcgctcttcatctgctgggtggcatgctccgtgctgctgttcttcatccaacggttcaagatcaacatcctgcgcatcacgatcctgtcgggtacgttcgccctggcactggctttcgcgggcaacgacctggtgaatttcatcggcgtacccgtcgccggattcgacgccttctcgatcgctaagcattcgggtgacccgcagatgatgatgggggcactctcggaaaacgtcccggccaatttcctgattctgcttgccgcaggggcgatgatgatcctcacgctttggacttcgaaaaaggccatgcacgtctccgaaaccgagttgtcgctctccgcagcgcaggaagacgaaggccccgaacagtacggctcgtcggtcatgtcccgtacgattgtccgcgcagcgctcaatatcaacgccggcatcgaacggatcatccccgcacgcgtacgggcagccgtctcacaccgtttcgaatacgaggacatcgaacatagcggcgccccctacgacatgatacgcgctacggtcaacctcacgacctcggccatgctgatcgccatagccacctcgctcaaactccccctgtcgaccacttacgtctgcttcatggtggccatgggttcgtcgctcgcagaccgcgcttggggccgcgaaagcgccgtataccgcatctcgggcgtcatgaccgtcatcgccgggtggttcatcacggcgctgggcggattcctgatcgccttcgtcgtcggacttaccctgatctatggcggcacgatggccttcgttatcgtcacggtactctgcggctacatgctcatccacagcaatttcctcaagaaaggcaagacatccgccgccccagccgcagccggggtgaaatcccagagcacggaagacatcatcatcaacctgcgcgacgaagtatgccgtacgatggagtcggcgacaaagatctatgaccgtacgctgatcgccgtattcaaggagaaccgcaaggtgctgcgcgacatggtcaaagagtcgaacgacctcttctaccagtcgcgcgagcgcaaatacacgctgctccccaccctcaagaaactccagagcagcgatgtcaacacggcccactactacgtacaggtggtcgactacctcaacgaaatgaccaaggcgctgatgcacatcacgcgtccggcgttcgagcacatcgacaacaaccacgaagggctttcgaaggagcaggccaaagacctcatgtcgatcaacgacgacgtggagtcgatctaccgccatatcaaccagatgctgcgcgacggcgatttctccgaaatcgagatggtgctcacgctgcgcgaccagttgttcgagtcgatcgccgaagccattaaatcggagctctcgcgcatcaacgaagcccgctcgaataccaaggccagcatgttgtacctgacgatcctcaccgaaaccaagaacatggtgctgcaatcgcgcaacctgctcaaatcacagcaatactttctcaagcaccgcacggggccgcagaagtggattaaataacgactacgtataaatccctgcattccgtttgcagcgggataaaagcagacgcggcaacgggcgcccggagcaggcgggcggaaagcgcagccgttcgggaaaaaccgcgaacgctccccccaaaacagcttgcagatggttttagctaccttttgtcacccaaaggtactcgagattgcttttttgcagagaaaacacataagcgcatcctgcacgaaagcacacgacaggttacacaaaaaaaacgcatacgacatggatatagcacaggccaagcggcgggagaacatcgccgaatacattctttacctctggcagttggaagacctgctgcgggcgctgcaattcagtcccgaggcgatcttctcgacactgatcgccccccgcaaggacatcgccgaggagcagaagcacgtctacctgctgtggtacatggacatcgccaacctcctgcaccaggaaggcaaggacgagaaagggcacctggagcatacgctccacctgatcggcgacctgcacgacctgcacctgcaattgatgaagctgcccgtcggcgaacattaccgccagacctacgcgaaactggagcccgagttgcctcgtctgcgcgccgtcgtgggcaatcccggcatgaacgacacggaactctgtttccgggcactctacgcggcgatgctttaccgcatcaagggcgagggtgacaagcaggccgtcaccgacacgctcgaatacatctcgcccgtcatcgccaacctggcagacatgtacggcaaagtcgaacgcggagaaatcgacctgttcaagaccgacacggcgaaataggccgttccggaggcaacgcagccagatagcgcgccccggcatcaggggagcctgatgccggcatcgggcaacagccccgccaccgaagactccggcagcccgggaggggccaagagccgcgccaaatcacctgcgaccggcctccaagcgaaaaaacggacacccacaaaggcatccgtttttatcttgcgaaccgcagcagcgacgcgccggccctactttatatccaaccccatgatatagtcgttcatataatatccgtcaccgatcgggaaatcgccttcgcgcagtttgcgcatccccatccgctcgtaaaagtgcagcgcccggttgttgcggttgacgttcagctccatgcggcaaggcgcaggatgcaccgaacggatatattccacggcatggcggaacaggaattccccggcgccgattccctggaagcggggaaggacatagattttctgcaaatggaaaaggtcttcggcctcgtgctgcaccgaaaggtaaccgcacggttcgccgtcggccaaggcgatgaaccaggcgaactccccgcacatctcgcgcgcaagcacctccgccccgtacatccactccatcatatactccatctgcgacggggtgatgatcccgcggtaggtcgcagggaacacctcgtcggcaaggcggcgtatcagggcgcaatcggcctcacaggcccgtcgtatcgtcagcatcatctggaacaataaaaaaaggccggcacgaaagccgacctcttagtcattttcccgcaggaattaagcgtacttgaacgtcgactcgtccgatacggtcagcttcttgcgaccttttgcgcgacgtgcagccagcaccttgcggccgttcgccgtagccatacggctgcggaaaccgtgcttgttgattctcttccggcgcgagggctggtaagttctcttcattgccatagctatataatttttgttgtttcagacatttttacggattgcaaaagtacaacaaaaaagttatccgcaaaaatttttcaagaaaatatttcaaaaagccgggtaaaaagcatgaaatctttttatctttgtcaacgagagagtggccgccggcaaagcagcatgcccgcacggggcatgtccgcacgacaaggggcggcttacggcgggaaacggttcctgccgttaattttcacggattatggcgattttcaaagtcgaaggaggccatcggctccatggcagcatcacgccccagggcgccaagaacgaagcgttgcagatactctgcgccacgctgctgacccccgaacgggtcacggtgcacaacattccccagatcctcgacgtcatgcagctcatcgaactgctgcggcgcatgggcgtcgaggtcgaacaactcgcggaggatacatacagtttttgcgcccgcgaaatagatttcgactacctccgcacggaggactaccggcaacgctgcacgcgcctgcgcggctcggtgatgctcatcggccccatgctggcgcgcttcggcgtgggttacatacccaaacccggcggcgacaaaatcggccggaggaggctggacacccatttcctcgggttccagaagctgggtgcgaagttcaatttcgacatcgccgacgaatttttcatggtcgagggccccgagttgaaaggaacctacatgctgctggacgaagcatcggtgaccggtacggccaacatcgtgatggccgccgtgatggccaagggcttcacgacgatctataacgccgcttgcgaaccctacctgcaacagttgtgcaagatgctcaaccgtatgggcgcacgcatctcgggcatcgcctcgaacctgctgaccatcgagggcgtcgagtcgctcggcggcacggagcacacgctgctgcccgacatgatcgaggtgggcagcttcatcggcatggccgccatgaaccagtcggaactgacgatccgcaacgtatcgttcgagaacctgggcatcatcccggcgcagttcgcccgcatgggcatccgtttcgagcagcacgacgacgacatctatatcccgcagcaggaacattacagcatcgacaccttcctcgacgggtcgatcatgacgatcgccgacgccccgtggccggggcttacacccgacctgctgtcgatcttcctcgtggtggcgacgcaggccaaaggcgccgtgctgatccaccagaagatgttcgaaagccgcctgttcttcgtcgacaagctgatcgacatgggggcgcagatcatcctctgcgacccgcaccgtgccacggtcatcggtcacgaccaccgcatccgcctgcgggccacgcgcatgacctcgcccgacatacgtgcgggtgtggcgctgctgatcgccgccatgtctgccgaaggggtttcgacgatccagaacatcgaccagatcgaccgcggctacaaggacatcgacgggcgtctgaacgccctcggcgcacggattacccgcatcgacgactgcgaataagagggaagggcaaacggcagcgccgcagcggggaacaagactgaaacaagattaagaaacacgattgggagcttatgtttttggaaaatgccagccgcaagggctggatcgaagtaatctgcggctcgatgttctcgggtaagaccgaggagttgatacgccgcctcaaacgcgccaggtacgcaaaccagaaagtcgagatattcaaaccccgcatcgacgtgcgctactcggaggaggaggtcgtttcacacgacgccaacgccatccgctccacgccggtcgactcgccgcgcaacatcctgctgatgacctcggaggtcgacgtcgtgggcatcgacgaagcgcaattcttcgacgacagcatcgtcgaggtctgccgcgaactggccgacagcggcgtgcgggtcatcgtcgcagggctggacatggactacaccggcaaacccttcgggccgatgccggcgctgatggccacggccgaatatgtcaccaaggtgcacgccatctgcgtccgctgcggcaacctcgcccatcactcgcaccgcctcacacaggacgaaaagctggtcgtactgggcgaaacagactcctacgaagccatctgccgacactgcttcaaagagctggttcgtaacaaaaaagagaaataagcgcaacgggctcgcacggggaaccgggcacctgccagcctacaccaagaaaagcacaccgagggctacaaacgcgccaccgaggagtatgtcaacgctgcatggtatccggatcatcaccgccccccgccctgccgaagccagcaaagaatagcggacacacctgcggcctactgtgcagcccgcagcgcagcgataaacccgggccacaatacccacaggttctcggtctgcaaccaaagttcgcgcgcctgcgcctgcacggagggacgttcgccctcgatatcccgcaggtaagcatcgtcggcagggtgctcggcggccgtaaattcccggaagaaaggcgcaaaccgcgtcttgaaatgcagcaactccccttcgggaagcgtcccttcacgacggaatgccgaccagagcagcaatatcccgcggctggcacatttgtccgaaacgtcgtttatcacttcgtcgaacagttcctgctcgtccatcgccaggtaatcgaacgccaagagttcgctcccctcgaggtggtcttcgggatccagctccaggagcatctccagcagcgccgcagacatctcgaaatcgttgatcagaaagtggtcgatggccgaggcacggatcagttcgagcgcagactgcgaattgcggtggctccattcgaggttgatctcttcgtcttcgggcagcaaccccgcaagccgctggaatgcctggtaacgttcattgcaggcatcttcgacattccccgcggcctccagctcacgggtgtgtgccaaaaccctggtgaaattatacggcccgtcgccgacgatttcgaaagtctggtcgggcgtggggttaagatatgctttttgcatcgcggcgcattttaaaaatcatggttatcagtatagcgagtgtcagcgcgccgcccagcaggtaggccgctgcccggtcgcgcatgccgcacataagcggtgatataaagacataggacatgcagacgtaggtcatgaccagcgccggcaggagccccacccagcggttacggccccgtttgtttaggtaggccgtaatcatccacagcgtgaccatcgccagtgtctggttcatccatgcgaaatagctccacatggcctcgaacggcaggcagaaaataatgaccagccccgcagcgaagagcgggatgctgatatagattcgcttgcgcaggctgcgctgttcgagccccatgaaatcggccacgatcagccgtgccgaacggaacgccgtatcacccgaggtgatggtgcaggccacaaccccgaagatcaccagtccggccagcacttcgcccagcgtagtgcgggcgatgacatcgaccatcacggccgccagcccaccatattccgcaatcgcggcattcagcccggaggcaccgttccagaaggccatggcgatggccgcccatatcagcgcgatgatgctctcggagatcatggcgccgtaaaacacggggcgggcctgccgttcggaacgcaggcagcgtgccatcagcggcgactgggtcgcatggaagcccgaaatagcgccgcaggcgatggtcgtaaagagcatcggcaggatcgggaaccgctccgggtcggcaatgcaattttccagggaggtaaactcggggatcgtatatttgccgctgaaaagcaatacggcgaggattcccagcgccatgaaaagcagtgcgcagccgaaaaccggatagatacggccgatgatcttgtccacgggcagcaacgtcgccacgatataatagatcaggataacgcccagaatgacgagcagcaaccaggagaacccgccgaaggcgatacccgacagcgccggggcgtcgatacggttggcgatcagctgggcgggctgcgacaggaagacggcgccgacgagcaccatcagtcccacggaaaagacccgcataagctgctttacccccggcccgaggtaggtgccgacggtctcgggcaaactcgcaccgttgctgcgcagcgagacgatcccggcgatgaagtcgtgcgccgcccccatgaagataccgccgaaggtgatccacaagaatgccacggggccgtatgccgcgcccagtacggcaccgaaaatcggccccagccccgcgatattgagcagttgtatgaggaaagtcctccacatcggcatcgggatataatccaccccgtcgaacgacgtggccgaaggcacaggccgcgcagcatccacgccgcacaggcgttcgagatagcgtccgtaggtgaaatatgctgccatgaggagccccaggcaccccaggaaagtaatcataacccggtctgttttcggttagttttgacgcgaatatagcaagaaatgcgagaattttccgaaaattgttgcgagaaaaatatttttttcagatatttgcaatcccaaagagagcttaatgttctcggcaagccgaaatagctcagttggtagagcgtttcactcgtaatgaagaggtcccgggttcaagtcccggtttcggctcggaaaggtcgccatacggcgaccttttttcgttataaggccttgcgaacccgaattttttatacttttgttgcgcaatggttcgcaaaggggttccgcaaccccctgaccgattaaaagggaatgccgtgaaaatcggcaacagttccctctgctgtgagttcctgccacccgaaatggcacaacaagtcctgacaatcttttgccactggccccagtccggccgggaaggcgtctcgacgggaacgagtcagaagacctgccgttgcaatgattttacaatccaggggaatggatcgtgatcggcatgaagagcctgccggcaaggcatattcccggatgtaaaatcagtttgacaaatacgaaggccgcaccggacatccgatgcagccggccgcagccccgcaccagggaagaggaggggacggccgtttctttaattttcgacgcatgaaacggattttacgacatatcctgcccgtgatcctgtgcctgccggcgctgggaggctgcatgaagtgggactacggggacacggaagagttcgccgcgtcggggccggggttgttcatcaccaacgagggaaatttccagtacggcaacgccacgctctcctattacgacccggcaacgaaaaaggtcgagaacgaggttttctaccgtgccaacgccatgaagctgggcgacgtggcacagtcgatgaccatccacaacgatctgggatggatcgtcgtgaacaattcgcatgtcgtcttcgcaatcgacctccgtacattcaaggaggtgggccgcatcacgaacctcacctcaccgcggtacatccacttcgtctccgacgaaaaggcctatgtgacccagctttgggacaaccgcattttcatcgtcaaccccaggcggtacgagatcacgggctacatcgagtgtcccggcatgacgcccggatcgggatcgaccgagcaaatggtacagtacggtcaatacgtttacgtgaactgctggtcgtaccagaaccggctgctgaagatcgacacccgaaccgacagggtggtggacgaactggttgtcggcgtacaacccacatcgctggtactggatgccaacgacaagctgtggacgatcaccgacggcggttacgaaggcagcccctacggatatgatgttccggcactgtaccgcatcgacgccgccacgttccgcctggaaaagcagttccgtttcagagagggggatgcaccctcggaagtgcagctcaacggcacgcgcgacacgctgtactggatcaacaaggatgtctggcgcatgcccgtagctgccgaacagctcccggcgcgcccgttcctcgaataccgggagacgaaatattacgggttgacggtcgacccggacaacggcgacgtctacgtggccgatgccatcgactaccagcagcaggggatcgtctaccgctatacggccgacggcgacgcggtagacgaattttacgcgggcgtcaccccgggcgccttctgctggaaacgataacccgacaaacacgcgaagcaatgaagagactcctaatcccgctgttcagcatcgccctctggtggagcgccgccgcccaggacaaggcgccgtcggacggagggtggtggaacgagaatccgtcgctggtgttgcccatccgcgcagtcggggtgacgggcgtgaaacccatgaaagaaataggcgttcagaaaacgcagctcgacacgctcgtcctgcacgagaacattgccctgtcgatggccgacgtgctgacattcaattcgtcgatcttcatcaagcaatacggacgggcgacgctttcgacggtcgcattccgcggcacgggcccttcgcatacgcaggtggtgtggaacggcatgcgcatcaactcgccgatgctgggcatgaccgatttctcgatgattccctcctacttcgtcgacgacgcacaactgctgcacggcacctcgtcggtcaacgtcacgggcggcggcctgggcggtgcggtcatgctggcgaccaaacccgccggtacgcagggcttcgggctgcaatacacccagggcatcgggtcattctggacgacggacgaattcctgcgtctcacctacggcaacgaccgctggcagacctccacgcgcgtggtatattcgtcgtcccccaacgaatattcctaccggaaccacgacaagaaggaaaacatctacgacgacgagcacaacatcatcggttcgtactatccccgcgaaaagcacgacgacggagctttccgcgacttccacctgttgcaggaggcctattacaacacgggcaacggagaccggttcggcctgaacgcctggctgatcgcctcgaagcgcgggctggggcgcatgacgaccgattacggcgatccgaagaaattcatcaacgaacagcgcgaacgcacgctgcgcagcgtgctgtcgtgggatcacctgcgccggaactggaaagtcgcggccaaggccggatacatctacagctggttcgcctacgactacgccaacgacgtgggcaacgggaaactggagtacatgaccacctcccggaactggtaccacacgctcttcgtctcgggcgaaggggagtactacataggccgcaaatggctcttcacggcacaggccgacctgcaccagcatttcgtcacgaacaacgaccgcaggatcatctcgcaggacatgaaccgaaagaccatcggatacaaccacgcgcgcacggagctttcggccagcatcacggccaaatggatgcccaccgaacggctggggctgtccgtcacgctgcgcgaagagatgtacggcgcgcagtggacgccgctcatcccggcgttctatgcggactacctgatctcgaaacgcgggacgatccgggcaaaagcctccgtatcgcgcaactaccgttatcccacgctcaacgacctctacttccagccgggcgggaacaccgacctcgtgccggaatcggggttctcgtacgacggcgggatatcgtttgccatagggaaggaaggagtatattcgctgcacggcgaggcgacatggttcgattcctacattgatgactggattctctggctgccgctgggcggcaacaccaactactggacgccgctcaacatgaaggacgtacacgcttacggcgtggaactgaaagccgggtacgaccgtatgctctccaaggagtggcagctggggctggacggcaacttctcgtggacgccctcggtcaaccggggcgaagcgttcagcaagggcgaccggtcattgggcaggcaactcccctatgtgcccgtatattcggccgcgatgacggggcgtctggcctacaaaagctggcgcctgctatacaagtggtgctattacagcgagcggttcaccatgacgagcaacgccttcacctacacgggcaacgtcccctactacctgatgaacgacgtgacactcgaaaagctgttttccgcgcgctgggccgatctttcggtcaaggccgccgtcaaaaacctcttcgacgaagagtatgtttccgtgctgggacgccccatgccggggataaatttcgaaatattcctcgacatccgccccaaatgggggaagaaaaaagccagggattgatctgacccacacaagggcgtcggcaggccggcactattccgattccctgactccgaatcacggcccggcggtaagaactttcccgggaaaggacgtttcgtaggagcatggcaaaaagagttttcgtgacatcttccccgaaacggcgtcccggaaatacaaagcccggatccgcgcggatccgggcatagcgataaaccaaagaaaccggcagggttattccgcccagccgccacccagggctttatacaggtcgaccagtgccaggtgctcgtcgcgcacggcattgctgaccccgatctgggcgtcgaaatagcggcgctgggcatccagcacgtcgatataattgatgcttccgccccggtattgcagttgggcgagttcgacatatttccgggccgcgtcgcgcaggttaaccttcagcgcggccgtccggcggacgctgcgataactgaccacggcgtcgttggcctccttgaaaaccgtcagcaccttctgttcataccccagccgggcctcgtcgtaggcggccagcgcggccttgtaccgggcctgtttacggccgaacccgaagatcggcgaggcgagcgtacccgcgacatacgagaacggcgagcggaaaaacccgctcacatcgtcgttttcccagccgcccgtcaggttgaacacgatgcgcgggaagcggtcggcgtaggccatgcccgcggcggccatcgccgcacgaagctgctgctcagaagcccgcacgtcgggacgccgcaggagcaattccgacggcaaccccacgggaagcgactcggcgaactccgcctcggtattcatcttgctgcgcacgacccgccagtcgggattttcgcccatgagcagcgaaatgctgttttccatgacctcgatcttgcgttcgaggtcggggatcagcgccgccgtcgaggcgtactccactttcgcctgctggaagaccgtttcagaggtgaggccgccctcgaaacgcaactgcgcctggtaagcgccctcgctgcgcgtgatgagcgtacgccgcacgatggaaagctcgttgtcgagcgccatcaaccggaaataggcggcggcgacctccgcgacgagcgtcatctgcatcgcacgcctgtcctcgaccgatgcgaggtattcggcaccgcctttgcgtttggcccagcgcaggtttccccacaggtcgagctcccagctcacggtagccttggcgccgaattcggggtcacggctcggctcctcgcccgcatagtcgttggtttcgtgatcggcgtaggccgttcccgacaccgacggcaggcgttcggccttgccgatacggtaaagctggcgcatacgctcgacacgcgccgcggcggcaagcatgtccttgttgttggccaacgtatgacggatgatgttgcacagggtcgaatcgccgtagaaccgccaccactccatgtcggcgatggcgagcgaatcggccacagcacccccggcgatagccgccgggaagtcgacctcgggcgccttgcagtgacggacggccgagcaggagcccaatccagcggcagcggccaatatcataagtaatatcgcaagtcgtttcatcgtttcagtttttctttaatccggtaaatccacacgaagaagaagggcacgaagacaatgcctaccgtaatggcgaccagcatgccgaagaagacgcccgtcccgatcccctggcggctcgccgagcccggccccgaagcgaagaccagcggcagcaggccgaggatgaaggccagcgaggtcatgacgatcgggcggaaacgcaggtgcgccgccgtgagcgccgcggagaccacgtcgcggcctttctcaacctcttccttggcaaattccacgatcaggatggcgttcttggccaccaggcccacgagcatcaccagtccgatctggaaatagatattgttttccagcccgcatatccagatacccaggtaggcgccgataccggccacgggcagcgacaggatgacggccacaggcaccgaccagctttcgtactgcgccgcgaggaacaggaagacgaacaggaaggccagcgccagtaccaggccggtctgcccgccgacatgcttttcctggtaggaaaggccgctccactcgacgccgaccgacgcgggcaagtgctttcggacgagctcttccagtacgcccatcgcctgccctgaactgtaaccgtgtgcggcctcaccggaaatggtagccgaattgaacatgttgaaacgcttgatattcccggcacccgtcgtgtagtgcgtcgttccgagcgaagtgatcggaatcatcacaccgcccgctccgcggacgaaaaagaggttcaggttgtcgcgctgcgcacggtagggagcctcggcctggatgtaaacgcggtagatgcggttgaacatattgaagtcattgacgtagatcgaccccgtaaaggccttcatcgtcgagaagatgtcggacatcgatacacccagcagctgcgccttgtcgcggtcgacgtcgaaatagagctgcggaatgtcgccctgcatggacgatgccagccccgtgaattcgggacgctgcgaagcatagtacatcaacgtgtcgacggcatgctgcaaatcctgataggtcgtattgccccgcgcttcgagcaccatctcgaaaccgcccgagttgcccaggccgggaatcacagcaggcgtcgagagatataccttgctttcggggtaacgcgagaattcggtgcgcacacgctgcatcacggagctcagcccctcggagtcgcggtcgccccacggtttgaggatcacggtcagctggctgcgcgcctggttggtacccacgcggggactggaacccgtgacgttgagcacgtactctacgtcggggtcggccatcaggaacttcatcgcgcggtcggtcacctcgcgggtacgttcgatcgtcgccccctcgggcaactccagttcgacggtgaagtagccctggtcttcctgcggcatgaaactttgcggcacgagcctgttcatcagccagatgccgatcagcacgatgccgaaggcggcgaacatgcggcgcgaatgtttcagcgccccctggatcatgcggccgtaaaacttgttgcccgtcgccagggagaggttgatgcggcggaaaaagcggtttttcttcccctcgccttcgggacgcagaaaaagcgcacacatcacagggctgagcgtcagcgccacgacggtcgagatgaccaccgacacggcgatggtgatggtgaactggcggtagagctgacccgtaatgcccgaaaggaaactcaccgggacaaacacggcgcacaataccagcgacatggcgatcagcgccccgctcaggttggacatcgcctttttagtagcctcatagggcgagaggtgctcctcgttcatgatgcggtcgacattctccacgacgacgatggcgtcgtcgaccacgatgccgatggcgaggatgagccccaacagcgtcagcatgttgagcgaaaacccgaaaacgagcatcacgccgaaggtaccgatcagcgagatgggcacggcgacgatcgggatgatcgtggcgcgccagctctgcaacgagaggaagaccacgaggatcaccagcagcaacgcttcgaacaatgtttggtagacatggtggatcgactccgagatgtaggtcgtcatgtcgaacggaatctcgtagctgatgccctcggggaagttgtggctgatctcctccatggccgccttgaccagcgccgccacctccatggcattggctccgggcagcatgttgatattcagcacggcggcattcccgccgttgatgccgctctcggtattataggacgaagcttcgagcgagatacgcgccacgtctttcaggcggatgatcgacccgtcggggttggcccgcacgacgatgtcctcgaattcgctgacagacgatagacgcccctgcgccgtgatggggatcgttacgtcgatgccgttcatgggggcctgccccagcacgccggcggcagactcgcggttctggtctttgagcgccgtctgcaaatccttgaccgtcagccccaggtcggccagcttgtcgggcatgacccatatctgcatggcgtaataacggctgccgacgttcgaaacgctgcccacgccgggcacgcggcgcaacatgtccagcacgttgagcgtcgcatagttcgaaaggtagatttcatcgaacttggggtcggacgaaagcagggttatggtcatcagtttgctggccgcctgcttctcgaccgagatgccgttctgcaccacttcggcaggaaggcgcgcctcggcctttttcaggcggttctggatatccacggctgccaggtcgggatccgtcgaaatgtcgaaggtcaccgtggcggagaaaccgcccgagttggagctcgacgactccatgtagatcatgccgggggtaccgttcagctcctgctcgatgggcgtagccacggcctgcgtcacggtctgcgcatcggcacctgggtacgacgccgagatacgcactacgggaggtacgatctggggatactggtcgacgggcagcagtgccaggccgatgaaacccacgatcacgatgatgatggacagcaccgtcgagaagacgggcctgtcgataaagaagtccgctttcataggctactgttgtttttcggcctcttcatcgcggcgcggagcgaccggttcgactttcatgccgtgctggagtttatggtagccctcgacgacgatatcctcgccccgcaccaggccgcgttcgacgacgatgttgttgccccattcggggcccgtctcgacaaaacgcttctcgacgatgctgtcggggcgcaccacgtagatgtaggcgccgcccttctcgatctcgatagccttcgacggcacgacgacggcatcctcacgcacgtcgagcagcaaccgcaccttggtgaactgccccggcagcaggatgtggtcagggttggccatctcggctcgcacggagaaggtacccgtctgcggatcgacctgcgggtcggcgaaatcgaccaggccgcggtaggggtattccgagccgtcggccagggtcacggtgatgtagggatcccacttgcgggtcgaatcgcggtgcccgaggttgacgttgcgcgccttgctgcgcaggtagtcgagggccgtcatgctgaaatctacacgcacggtatcgctcttcacgaccgtggcgagcagcgatttgccgctcggccccacgagcgtaccgatgtcagcgttgcgttcggagatataacccgaaataggcgactgcacggaggtatagcccagggtcatctgcgcctgcgtgaggtcggcctcaccgacggccacgtcggccacggcactctcgtaagccgccgtggcattgtcgagttcgagctggctggccgcactctgttcaaagagcggacggatacggtcgaggtcgcgcttggctttcagcgcctgcgcccgggccttgttcagctgcgccttggccttgtccacgcgcgcacggtagacccgggggtcgatcacgaagagggtttgtcccttcctgatgtaggtaccttcggcgaagagcatcttttcgaggtagccctcgacgcgggcgcggatttcgacgaactgctgggcgcggatgcggccaacgtaatcgccatagatattgacgtcttcggtcgttacgggttccaccgccacgacaggcaggacgactgcggcgggacgcggccggagcaggatgacgagcaacaccgtcacgaccacaaggccggcaatgactccgatccactggcctcggctcagtcttatccggacatgggcgacacgggaggccgcttttttcacaccgttcaggttcagctcctgcaaattcggtttcaatttatcaaatttcataaagcactaatataattgggggcagcaaaacggggttcaaaccttgcgccagaattgcaggcagccctttaaaacatttattgacagcaaaatatctaccaaataccaaatcaaatatatacaaaaatctgtggaataattctacatccgtgtggaattattccacaagaccccggcaactccgcctgccccggggtcttgcgacggccggagccgtaatcggcgcatccgaacgtattggaggcaactgccccggcttcgcggcgcaaaggtaacaaaacaagtccgggcaggcgaaaaaatgcaccaggaaggttacagcaaatccggccggaatattatccgaaacgggcacatttccggccgggaagccataacttcgggagaagcatctccgacgggaaggcacaaaaaaagacccatatgggtctttttgccatatcgcggcaacgcggttcagcgcttacgccccgcctcccgggatgtttcgcatgcctgtgcctgcgaagcagactgcgaccatgctgaaattctattccggagggcttattcccgcccccggatgaggctgccgtccccggtcaccttgaggatccgggcgtttccagagggctcaaatccccccccccctcacggttctctccatcctcggggaaacgaatgtcgatcggatgggcaaagacaaaacgcgcaccggcggtataggtcggatcgacccagatgcggccaccgaagatcatggctatctggcggcagatggcaaggccgaggcccgtgcctttcttcttgttgccatcgagtttctcgaaacggttgaagaccatctcctgtttgtcgagcggaatgccggggcccgtatcggctaccgaaaagaacacttcgcggtgtgcctcgtctatctccacgccgagtgtgatactcccctgggaagtgaacttgccggcgttggtgagcaggttgatcagaatctgcgacaagcggtggacatcggttacaagcatgtaggaacccacggcacattcgagacgcccctcgacaccttcctgccgcgtatgggcggtcgtcatgagcacatgctggcagacctgcacgatctcctcggacgagcagttgaacttgatcttgccgcattcgagcgacgaaatgtcgaggatgtcgttcagcagcgtgagcagcatctcggaattgttgaccacgatggcgcagtactcggcacgttcctcctgtgaaagttcttcgccctgcatcagcgacgagaagcccacgatggcgttgagcggcgtgcggatctcatggctcatattggccaggaacgccgatttgagcatgtcggactcttcggccttctcgcgggcgaccaccagctgtccctcgcgctcttcgagcgtgcgcttgagacgccgcgtgcgcaggaaaagcgccgcaacgaaaaccagcagcagcaccagcagtacgatacccgccacgagcaactcgatgtaatgggaatatttcgagagtttggccgctacggtatcctcgaccacactccccttgggcagggcgtattcggcaatcttcaactccttgagcttgcgcgaatcgaagaggtactggccgtccgtaaggcggaaatgcgtcccgtctatcttccccgaggcgtaatactccttgatctgcgatgcgatgaccgaggcggcgttctcgtatttggggacatagccacccacagccacgtcgccgatgccgatctgggatatcgaaaagaccggtatgcgcggattgagctgcaccaggtcgttgagcgaacgctgcatgaggtactccccgtcgcggcccacacgccaggttccgagtatcgccgcggaacggtgcgacagcgaggcataggtctcatgcatcgcatcatccccctcgcggctgtccaccagcacaaggttcatgtcgggatagtttttcatctcctcgcgtacgagcgcctggagggaaatacccccgtaggtgttatccgagatgaaggcgatgttctcggcttcgggaaaaagcgaacgaaccagctcgatattgcggcggacgtcatacttgttgagcataccgcccacattgttcaggctgtccgtcatgttcatgtaattgatcgaagggggcagccacatgccgagactgtcctccggcggcgggagcacgatgccgttggaactgacatagcagcagaagcacatcacatccttggggatatgccccagcgagacgaacgatgcccatgcctcctgccccagcaggacgatggcgcgaagccccttgttctcataccgggaaatcatgttctcggtctgcgacatccagatgggtgcgtcgttgatgctcttgcattcgagcgtttcgacatagatatcgcacgggatgcccgaagccatgatgttgcgttcgaactcggcgatgaagcccgacatgcggcgcgtatccggattatacgaggaaataatcaggatactctccctctcctgcggcgcttgagcccgaagcaatgcgggcaacagggcgcaacacagaagaagaaatatccgattttttttcattgggttcctggtcatagtttccctttctatcgcgaaagcagcgccgcaatccgcgtacggagttcatccgcccgcagaggtttggcaagacattcgttgaaaccggcctggaacatgcggtggcggtcggtctcgaacgcataggccgtgagtgcgataacggggacgtcgggcgaaatctcccgcacgccccggagcgcctcatagccgtccatgacgggcatgttgatatccatcagcaccaagtcggggcggcagtcggcgaacaaggcgacggcctcctctccgttccaggcgtgcaacaggtcgtaatcacggcgcagcaacacctcgacgagcttataattactcggattatcctcggcaaccagcaagcggggacggttgccgaccggatttacactattgtcacactccatcgcttcatcggtttaacaaaatcgcccgacagaggcaaagaccggacaattgcacaaaaataccatttttttgattaataataaaatatttccctttaaaaattaacagcaccccgaaaacaggacgggaaatccgggcgtttttgacatataaattaccttaaaagtttataatgccaatttttttaccgatatttgcacggggtatccggatcaggagcgggaaacgacacgggttgcaacgcccgctccggaattccaggtaaatttaaataaacaaccgcccggaaccggacaacgagcatgcgacgcttcccgttccggaaaaacccaatgacaacgaaccgccgaacatgaaccgcaagaaagtactgatcgtagacgacaaggagcagatcgccaaaatacttttcgcataccttcacaaggattacgaatgcttttacatgcagaacccgccgcaggccatcgagtggctctcgcgggggaacatgcccgacctgattatttcggacatccgcatgcccgaaatgcgcggcgacgaattcctggcatacctcaagctcaacgaactcttcaagcagatcccggtcgtgatgctttcgagcgaggacagcacctcggaacgcatccgcctgctggaagagggtgcggaagactatatcgtcaaaccgttcaacccgcaggaactcaaaataaggattaaaaagattttggattgaagtaccccgtcatctacatcaaaggcagaggcaaccacacggcccgtttcacggagctgaccgagggacagatgcgtatcgcaggggatatcggcgcagccatgggcaagctcatgccgctcaaggacgaccacgccttcatcctctacgaacagcagggcgaggaggacatccgcagcatccgcttcctgcgctcctggttcccgggtgccggcatcatcctcatcatctcggggcaactgaccggggaggagcggcgcgcatacctcggagccggtgtgaacagcgccgtgccggacgacatatcgcgcgcagatttcctccgcatactgcaattcatgaccgactatacgttcgtccacaaacccgtcgcaggtagcgggaacgacgtagagttgttccgcatgccgctctggaaacgggcgttcgacatcgcggcatcgctctcggcgatcctcctgctctcgcccctgcttatagccgtggccgtggccgtcagactcgacagcccggggccggtcatctataagtcgaaacgcgtgggaagcaactaccggatcttcgatttcctgaagttccgctcgatgcactccgacgcagatcagcggctcaaggagctggaggatctgaaccagtatgcctctgaacccgtcgccgaagacgatgcgaagatggcgctcaacgacgacgagatccgcaaactgctggcggacaccgaaaacggcatgctctatgcagacgatttcgtgatccccgaggaggcccatcagcaccagctggaaaccgaacaggaaaacgcgttcgtgaagatcgagaacgacccccgcatcacgcgcctggggcgtttcctgcgcaaatacagcatcgacgaactcccgcagctcttcaacatcctgcggggcgacatgtcggtcgtgggcaaccgcccgttgcccctctacgaggccgaacgcctcacgagcgacgaatatatcgaacggttcatgtgcccctcgggcctcacgggactgtggcaggtcgaaaaacgcgggcaggcgggaaagctctcgcccgagcagcgaaagcagctcgacatcgaatacgcccgcaggatgtcgccgtggttcgacctgaaaataatcctgcgcacgttcaccgcattcatacagaaagaaaatgtttaaaacccagcaacatatgaaaagggccgtcttcacactctggctgctgctggctgctgtcgccgcaacggcgcaaagcgagcctacgccacccgaattcgaatacagcgacctgcaacggcttactccggaagattacatcgacatgcagctgcccccgctccacgtactgatggagaatgcgcgccatgcaccgcaggtcggctattacgagtcgaaccgcgagatcgaggagcgcgaactgaaaaccgtgcgccgcaactggatgcgcaatttcaagctcaacgccaactacaactacggatcgtcggacatctacaaccagaattatcaggacagcaacatcccgatatggacgacgaccacgaccgggcgcgagcaaagctggtggaacgtcggggcttcgttctcgatcccgctcgacgagattttcaaccgccgcaacaagatcaagcagcagaagaagcgtatcgagaatacccagtacgacctcgaccgctggtacgacgagttgcgcatgaagatcatcgacgcctacaccacggccgtcgagcagctctcgatcctgcggagcgccgccgaagccaagatcacgtccgaggcacaataccgcatgaccgaagtggacttcgtcaaaggcaagctcgacgcgcagactctgagccgccagaagagcctcgaaaactcggcgacccgcgaatacgagcaggtgcggcgcaacctcaacgacgccctgctgcggctcgagatactcacgcacacgccgatcatcaacaaacccatatcaatgcccgggacatcgaaagaagcgactaaaaccgaatagcctatgaactacatcgcatataccgcgcggtttctctaccgcatcaagtggtggctgatactctgtccgctgctggtcgcgctgctcgtctacctgaagatgggtaccaaaccgcgcaactacaagtccacgacgacgatctacacgggcatcgtctcgggatacgacatcacgaccaccgaaggctcgcgccaggactggaacgtcatcaacaatgcgatggacaacctgatcaacatcatcctgtcgcagtccacgctcaagaacgtctcgctgcgcctctacgcacaggggcttacgcatctcgacccggacaacgacaaccagtacctctcggcacgtacttcacggtacctgctgagcaaaaccccgccggacgtcatggagctcgtcgaccacacttcggaaaagaacacctacgagaacctgcgcaaatacgaagagatagaccataacaaccacgtctacggcatgttccactggagccctccgtattacagctaccaggcgctgagccagatcaaggtcaagaggctggccaacagcgacatgctggaaatcagctacgagaacgacgacccgtatatcgtctacaacacgctgattatcctcaacgacgaattcgtcaagcagtaccgcgacctgcggttcggcgagacgaacaacgtcatcgcctatttcgaatccgagctggagcgggtgggcaacaacctgcgcaacctggaggattcgctgcgcgactacaacgtccagcaccgtgtcatcaactacgacgagcagaccaagcacatcgccgccctctcgcgcgactacgaattgcgctacgaggagatcctgctgaacttcgagagcgccgagaaactgcgtgcctcgatcgaagggcagctcgaagggttgcaggagactttccgcaacaacgccgagttcatcgagaaactccataagatcgggagcatctattcgcgcctgtcggccgccgaggccttccagcccgaaaccgacggcacggaaggtatttccgaccggacggccatgcccgccagccgcaacgacacggggcagttacgcaggaaactgagcgaggagacccgcagtctgcaggagctcacgacgaacatcgccaaccagcagtatacgaaggagggactctcggcaaattcgatcgtgacggagtggctcgccaccgtgctgctggccgagaaatcccgcgccgaactggcggtgatgaagctccgcaagcaggaactcgaccagaaatatacgcagttctcgcccgtgggctcgaccctgaaacgcaagggacgcgaaatcaacttctcggaacagtcttacctctcgatcctcacggcgctcaatacggcccgcctgcgccagaagaacctgcagatgacctcggcaacgctgaagatcatcaacgccccggtgcttcccctggaggctgaaccgagcaaacgcaagatgatggttgccgcggcaggcctcgccacgctcctgttcgtactgggattcttcatcctgctcgaactgctcgaccgcacgctgcgcgacaaagtccgcgccgagcgcatcaccaaggggcgggtcatcggggcctttcccggcaaagcctatctcgggcagcggcggtttaccaagcaataccgcaagatcgcatcccgctacatcggcaatgcggcagtcaactatttcgacccggcaaaacagcccaacgtactcaatatcctgagcaccgagcgcggggacggaaagagcctgatcgccgaacacttggcggcattcttccgcgaagcgaatatgaaagtccgcatcgtatcgtggaacaaggatttcgacatcgaacgcaaagagtacctgctggccgagaaactcggggatttcgtgcacgacaccccgggcgaagttcccctcgccgaggccgacgtagtgctggtggaatacccgcccttcgccacgagctccgtcccgaaggagttgctgcgccatgcggcgctgagcatcgtcatcgccccggcgaaccgcacgtggaaagacaccgaccagctacttttcgagaaggccgaaaaactctcgggacgcacccccgtcgtcctctgcctcaactgtgcggggcgcgacgtggtgcaaaccttcacgggcctgatgcccccttacagccgtcttcgcaggctggggtatcagatcagccagttcggattcacggccgtcaaataaactgcggcacgtcatggaacactacggcagcataaccaccccggtcagcgtgccccggctcatcgtcggggcaatgcttgccgccggcgtggccgtgctcatcatggcgttcaccaaatacgggttgctcgccggcctggccgtctcggtgatcccggctgcactgtgcatcctgtgggtcacgctgcgcaaccccgccatatcgatgctcgggctgttcgtggccaactatttcatcatgacgctcacgcgttatgcctacgacctgccgttcgggatgatcctcgacgcactgatcttctacaacatcctgattataacgctgcaagccctgatgcgtcccatcgaatggaagcgagccagctcgggactgaccgttgtggcggcgatctggatggcctattgcatcctcgaaatagtgaacccggagtcggtctcggtcgcgggatggttctcgtcggtgcggtcgatcgcgttttatttcttctttatcgtcgtgctcacgcagctcacgatgaccgagtacaaatacctgaaatacatgctcgccgtatggtcggtgctgacgctgatcgccgtcggaaaggcctgcatacaaaaattcttcggcttcaacgctgcggagaactactggctgttcgtgctgggcggccgttcgacacacatcatccacagcggcgtgcgctacttctcgttcttcagcgacgcggccaatttcggcggctcgatggggctgtcgatggtcgtgttctcgatttcggcgctctattaccgcaactcgtggatgaagctctacctgctgctcgtggcggccgcggcatgctacggcatgctgatctcgggaacccgcagcgcactggccgtaccgttcgtgggctactcggccttcatcatgatgtcccgcaatatcaaaatgatcggcgcgggtattttcctggtcatcgcagccttcgtcttcctgaaattcaccactatcgggcaggggaacagcattatccggcgtgcccgcagcgccttcaatacaaacgacccctcgttccaggtgcgcctggcaaaccaggccaaactgcgcgagctgatggcagacaagcctttcggcgccggactggggcacggtggcggcaaagccaaaacctttgccccggacgccccgctgtcgcagatcccgaccgactcgtggttcgtgatggtctgggtcgaaacgggcgtcgtcggcatcctgctgcacatcggcatcctgctctacatactggcgcgtggcgcctacctggtgatcttcaaactgcggaacacccagttgaggggattcacggcggcgcttacagcgggaatctcgggtatcgtggtcatggcctatgccaatgaaattctgggacagatccccacgggcgccatcctctacatgagcatgggtttcatcttcctcgcgccgcgtttcgaccgcgaactggcgcgcaaggagatactggacagggcgatgtccgcacaacggccacacgcaagggaaaattacgaatagcatgaaaccgctgatttcggtcatatcggtcaactacaacggctacgcgcttacctgtgccatggtcgaatcgctgcggcggcacgtcacctcgccgctggagatcatcgtggtggacaacggctccgcccgcgacgaggcggccatgctgcgcgaacgctacccggaaatcaaagcgctgcgcagcgagcggaacctgggattcgccggaggcaacaacctggggttcgcagccgcgacaggcgattacctgctgttgctcaacaacgacaccgaggtcgaagacgacacgctgcactacctctgcgaaaccctggcgggcaaccccgcgatcggcgccgtatgcccgaagatccggtttttcgctcccccgcggcatatccagttcgccggatatacgcccctgacacacgtcacgttgcgcaacgcgctcatcggcttcgggatgcccgacgacgggtcgttcgacacgccgcgcgacacgccctacgcccacggcgcggcgatgatggtacggcgcgaagtaccccgaaaagccgggccgatgcccgacatctatttcctctactacgaagaactcgactggtcggtgcgtatccgtgaacaaggctggaaaataacctacgacccccgttgcacggtattccacaaggagagcgcgacgagcggacagcaaagtcccctgagaagttactacctgacccgcaaccggttgctgttcgcatggcggaacctgcacggcaccgcccggatgctttccgtcgcctaccagctctgcatcgccgtacccaaaagcatcgccgcggcgctggcacacgggcgccgcgacctggcaaaggccatacggcacggtgccggaggcttcttcaccctgaaaaacaaaacggcatgacgctactgctcgacatcctcgactggatattcatcttcgtactgggactcccggtactctacctcttcgtctttgcggccgcctcgacgcgcgcacgcaaggacacctatcccccggcacggctgcaacgccggttcgtgacgctgatcccggcctacaaaagcgacgcggtgatcgtccacgcagcgcagtccgcgctgcaacaagactatccgcaggaactgcacgaggtggtcgtcatcgctgaccggctgcaaccggccacgctcgcccaattgcgccggatgccgatccgcgtactggaagcctccttcgagaacagctccaaggccagggcgctcaactttgccgtaggggaaatcggcccggacggcgcggaggccgtggcgatactcgacgccgacaacctggcgggcagggagttcatcgcccgcatgaacgacgccctcgacagcggcatccaggccgtgcaggcacaccgcacggccaaaaaccgcgacacggacactgccatactcgatgcggcgagcgaggagatcaacaactcgattttccgtcgcgggcatgtggcgctaggattctcttcggcgctgatcggctcgggcatggccttcgattacaactggttccgcgacaatatcgcccgctgcaccacttcgggcgaggacaaggagctcgaagcgctgctgctgaggcaaggcatctacatcgactacctggacgacgtgcgcgtgctggacgagaaggtacagggcgaaggtgcctactacaaccagcggcggcgctggatagcggcacagttctacgccctttcatcggccgtaaggcagcttccgggcgcaatcctctcggggaatacggattactgcgacaagctgctgcaatggtgcctgccgccgcgcatcctgctgctggggctggtgcccctgtgggccgtcgtgatgacggtatgcgcacccatgggttcgataaaatggtgggtggccgtcctgctgctgctcctggccatggcgatggcgctgcccgacgagcaggccgacgcccggctgggacacgcccttaggcgaatgcccgtcctgttcctgctgacgctggccaacctcttccggctgcggggcaccaaagacaaattcatccacaccgaacataccggggccggaagcgaagtccccggaaacaataccggaaaccgaccatgaaaattgcgatcgaggcacagcgcatcttccgccccaacaaacacggcatggacttcgtggcgctcgaaaccatccgctgcctgcaacggctcgacacgaagaacgaatacttcatcttcacgggcgaaggcgaagaccgttgcctggaggagagccccaacatgcacatcacgacgctccgctgcccgagctacccgctgtgggaacagtgggcgctgccgcgcgccgtggcccgcgtgaaacccgacctgctgcactgcacaagcaacacggcgcccgtatggggaaatgccccgctgatcctaacgctccacgacatcatcttcctcgagcaacaggccgcgcgcaacaaatcgctctaccagtcgctggggcgcgtctaccgccgcctggtagtgccgcgcatcctgcccagatgccggatggtcatcaccgtctcgcaattcgagtgcgaccgcatccgcaccgcactgaacttcgaccccggacgcatcatggccattcacaacggctacaacgaccggttccgcccgatggaaggcacggcggaaaccgtccgcaaatacctgcgagaccccgaatacctctttttcctgggcaataccgacccaaagaagaacacgcccggtacgctgaaggcctatgccgaatacgtacggcgctccgaaaacccgctgccgctgctggtcgccgacctcggggaacaacccgcggaggcgatcctgcgggagatcggcgaaccccggctgcgcgggatgctccgcctggcgggatatatccccaacagcgacctgccggccatctacaacagggcttcggcgttcctctacacctcgctgcgcgagagtttcggcatcccccagctcgaagcgatggcctgcggcacgcccgtggtgacatccgctacctcggcgatccccgaagtggcgggcgaaggcgccatcctcgtcgacccgaccgacccgaaggcaatcgccgacgccctgctgcggctcgaaaccgacgcagcgttccgcgcaaggcaagtcgcctacggcctcgaacgggtgaaacgtttctcgtgggaaaagaccgcccggcatttgctgacactctacgaatcgctcgggaagtaacccggacacagcacaaacgattgaaaaaacccgtcgtccggaagcggacaacggatacatcgcgagttcttccgacaatccgggaacccgcacatcggcggacaggactccggcgacgaaaagagggtgcccgcacttgcggacacccttctattcaggaagttccttgctacctgtttatttcttcctcaccaggtattgctcgaccccgtgcaaataccaatcctgcgattttgcaccgcccgactgcgcccaatcggccatctcgggataagccttcaggaaatccaccttctcataggcatgccggatatcatggggaatgttgagcgcccataccagcctgtcgttcgaataataataatcgccggccttgtcggtagcagcactcccggctttcaggaaagcgtaatcaagttcggcatcgggagtcggctcgaatccgcccatatgaatctcgatgttgttgccgtcacgttcgcggctgaggaagaaatcgaacgtgtcgaaagccacatccccgatagcgatcgaattacggaactcgacaaagaacgaggcattgaccaactgagcttccgtcatttcgaacccttcctcggtatttacataagcggcgccggactgccggttaggattggtgcggatattctcgaagcgcaggacggcagggtctttcacgtagttcgccgaattgagcgccacgagccgggcattgccggtattatacatttcgacgggctcgatcccgtcgatctcaccgcctttcacacctttcatcgcaaggcaaaggtcatagggcaaagacccgccgaccgctttcacacgaacgccgatatgcatgccccaaaccttgttcttgttgttcatatggagctgcaccttataattaatgacgaaatcgttgaaatcgaaatcaccgtacgacggccacaaatcctcgaaaagaagcgttccccaaccgcttgcaggcatataaatcacatcgccgatcgtggtgttcttgtccccgtcctcgatgcccgtataatccttcccgttcgaagcgagcgcatacgatacggccgaaccagccacaggaacggcctcttgcggcgacaagccgttttcggtttcataacttacgtaaagcgtcttggccgtgacaggcagatccagcttcacggcatcggcaccgtcgcctaccatgaacgaagcgaaaggctcagcgccgcgttgcgcagccacatacacacgcgaaaggtgcggtgcggtgaactcgcaggctacaggagccgtcgttttccaatcgaacgatgcgggaacggacatatccacgacccgctcgacatcttcgggaatgccattcggattcgaaggaaccttttccacacatccgcccagcaacaaggcgaacatagccgtaaagagggatagttttttcataatcaacgtaattttcaaacgtaattaacacccggatccggatgtaatttaaaactacacaaatgtaaacattttaattctattttatatcaaaaaagcccgaaatattttcagccccgcattcttccgctgcaaaacgccctttttgcaccgaaaaaacacccggaatggcaaatcccgcaaagtttgcttatatttgcatactgaggcatatggatacaacaagatgatcgaccgaatcaaaaataatccccggctcaaacaattcgtcatcgggctgatttcgccgcacaggcacccccggccccgtctttgggtgcgctggttcgtgaacccttttgttcacaaaaaaggccgcggggcgcttatccgccgccatgcgcggctcgacgttttcccctggcggcgtttcgaagtgggacgcgacgccttgatcgaggattatgcggtcgtcaataacggtgcgggagacgtggtgatcggcgaccaggcgcgcatcggcatcggatcggtggtcatcggccccgtgcggctgggcgaccgggccggactgggccagcatgtcttcatctcggggttcaaccacggttatgccgacgggacacgagactcgaatgcacaggaactcgtgcgtaaagaggtgacgatcggacgtgaatcgcatatcggcgccaattcggtggtcgtggcgggcgtcacgatcggcgaacgctgccagatcggcgccgggagcgtcgtcaccaaggacatcccttcgtacagcgtcgccgtaggcaacccggcgcgcgtaatcaagcgttatgacgccgcacgcgcaaaatggatacgtgtcgatgaataatccgaaagtcagcgtcatcattcccgtatacaatacggaggcctatgtcgaacagaccctgcgttcgatcatgggacagaccctgcgcgacatcgaactcatcgtcatcaacgacggctcgacggacggcagcctgtccgcactcgaactcatagccaccggagaccgccgcatccggctctacacccagcccaacaaagggctttcgcagacccgcaacgcagggatcgcccgtgcccggggcgaattcatctacttcatggacagcgacgacctgctggaacccgacgccctcgaacgctgctacgaacgctgccagtcagaccggctcgatttcgtgttcttcgacgccgaaagcttcggggcgacggcctccgacgccgcatggttcgactaccggcgtgcaaaatatttcggaacggaggtttgcgacggcactgatctgctgcgccggatgctcgcactgcactgctaccgggcttcggcctgcctgagtttcatccgcactacctacctgcgcggactgggactgcgtttctacccggggatactccacgaagacgaactcttcaccccgcaactctacctcggggcgtcgcgcgcaggcggaatcgagcgctcgttcttcaagcggcgcgtacacggcgattcgatcatgggacgcgggttctcgcgccgcaacctcgaaggctacactaccgtcctgcgcgaactcaaccgctttgccgcgcagcgcgacgcctgccagcggcaactcatacgcacactgacggcccagatactgcgccccgtgatgtgcaacgcctgggcactcccggccggggcacgctggaaactggcctgggatgccctgcgccactacccgggcagcatcgacggccgcgccctggcgacgctgctgttcaagaaaccgctaaaaaaagaaaacgggaaatgagtgtcaggcgggaattggcttcgggcgtattctacacctcgatcgcaaagtacgcgggcatcgtcgtaacgctcgtggtgacgggtatcctttcgcgcctgttcacccccgagcagttcggcgtggtgaacatcgccacggtagtgatcgccttctttgccatcttcagcgatctgggcatcggcccggccgtcatccagcacaaagacctcgacaggcacgacctgggcgggatattctcgctctcggtatggtcggggacagtcatggcgctgctgtttttcgcagcagccggcacgatcgcctctctctacggcgattcgcaggtgctgcgcaacgtcctgcgcatcctcgcgctgaacctctttttcgccgcggccaacatcgtcccaaatgcccttatcctgaaggaaaaacgcttccgtttcgccgcaatgcggtcgctcacggtgcaaattgcagggggcacggctgccatcgccgcggcctatgccggggcaggtatctacgcactgacgatcaacccggtgttttcgagcctgatgctcctggcgataaactaccgccagaacccgctgccgctgcgcctgcgcccgggacgcaaggcgctgggcaaagtattctcgttctcggcctaccagttctcgttccagttgataaactatttcagccgcaacctcgacaagctgctcatgggacgttacatgagcctctcgcaactgggttattacgacaagtcgtaccggctgatgatgctcccgctgcaaaacatcgcctatgtcatatcgcccgtcatgcaccccattttttcggagatgcagcacgacctgaagcagttgggcgcctcctacctgaaagtcgtccggctgctggcattcatcgggctgccgctctcggccgtgctcttcttcacggcacaagagctggtgctcatcatcttcggcgaccagtgggagccgtccgtcccggtgttccggatactggcgctctcggtcggcatccagatcgtgatgtccacctcgggctcgatcttccaggccgccaacgccacgcggatgctcttcctctgcggcgtattctcggcggcgctcaacgtcgcggcgatctgcaccggcatcttcgcattcggcacgaccgaagccgtggcctggtgcatctgcgcctcgttcgccgtcaacttcgtgcaatgttaccacgcgttgttctgcctcacgctgcgcacggggtggcgcccgttctggcaaaatttcctctcgccgctgctgctcacggcactcgtcggcctgcccctggcagcagccggatggttgctcccgccgatgccgctcgtggcgtcgctcaccctcaaggggacggcggcactcggcgtatggctcctttatgtgcacctgagcggcgaatacgacctgaaagggcttgcataccggctcctcgcccgcaaaaaccgataacagtatgaaaggattattcgtcgtcttccacgggttttcggcccacagcggcatcagcaagaagatctttgcccaatgcgacgcactgcggcgcaacggtgccgacatcgagttgtgccacatcgagatagcgcccgacggcacgcagcgccgaatggtcggcggacaggcgatccgcaccttcggcaagggattgcgggccaagctcgaaaaaagggtctcgctgagcgacatcacgcgctacatccgccacgaaggggtggagttcctctacatccgccacgaccacaacgccagcccggtgctgatccactggctgcgcaaggtcaaaaaactcggcgtgcggatcgcgcttgaaatcccgacctacccttacgacgccgaattcgcgcagtcgcccgcggtgcggaagctcaaactgcgcatcgaccgcatgttccgctgccgcatggcccgctacatcgaccgcatcgtcaccttctccgacgatacggaaatattcggccgcccgacgatccgtatatccaacggcatcgacttccggagtatcccgctcaaaacccaggtacacggggatcaccacaacttacggctgctggccgtggcgaacatccatttctggcacggcctcgaccgcgtgatcgaaggactgcgggactattacgccgccccgcaccagtgcatcgtccgcctgcgcatcgcgggcgacggcgtggaaacgctcatcgcagagtaccgccgcatgatcgacgcatactccctggcagagtatgccgaggtcatcggcccccgttcgggcgcggcgctcgacgccgaattcgagtggtgcgacatgggcatcgccagcctcgggcgccaccgcaacggcatcaccggtatcaagacgctcaaaaaccgcgaatacgccgcacgcggcatcccgttcgtatactcggaacgggacagcgacttcgacggcatgggctacgtgatgaaagccccggccgacgacacgcccctcgacatcgcggcgctcgtgcgtttccacgacgggctgcatctcacgcccgcccagatccgcggcacggtcgagggacgcctctcgtgggacaaccagatgaaacaggtattaaccgaacttttcgaagcatgacgaccgtagcgatactcttctgggcgggggtattcctcgtcttctacacctacctcggatacggcatcctgctgtggctgctggtgaagatccgcgaagccgtgcgccctgcacggcggcatgacgtgcctgccgacccgcccgaggtgacgctgctcatcgccgcctacaacgaacaggaggtcgtggcggaaaagatggccaactgccgggcattggattatccggccggaaagatccgcgtgacgtggatcaccgacggctcgaccgaccgcaccgtcgaactgctcgccgcctaccccgaggtgacggtgctgcacgacccgcgccggggcggcaagaccgcggcgctgaaccgggcgctgggaatagtccgcacgccgctggtcgtattcaccgatgccaatacgatgctcaaccccgaagccgtggcgcagatcgtccgctgcttcgaagatcccgcagtggggtgcgtggccggcgaaaaacgcgtcgccgggacagggaatacgggcgccgccgcaacggaaggcgtctactggaaatacgagtcgaagctcaaggagctggatcaccgtctctactcggcggtgggggcagcgggggagttgttcgctgtgcggcgcgaactgtggcagacgctgagggaggatacgctgctcgacgatttcgtctgctcgatgctgatcgcggcacagggatacaggatcgcctactgcaaggaagcctatgcgctggagagcccttcggccgacatgggcgaagaaggcaaacgcaagaagcgcatcgcggcgggcgggctgcaatcggtatggcggctgcgcaagctgctcaatccgttccgttacggggtgctgtggttccagtacgtatcgcaccgcgcgctgcgctggacgctgacccccgtagtgcttgtcgcactgctgccgctcaacgtcgcgctgctgtggtcgggccatccggcgctctatgccgcgatcctcgccctgcaatgcgcattctacctggccgccctcacgggatgggcgctggagcgcagcgggcaccgcaacaggctgctcttcatcccctactattttctcttcatgaacctcaatgttttccgcggggcatcgtacctggcgacccaccgcggaaagggtgcctgggagaaagcccgcagggcctgaccgaattttgaacggaacctgaaatattatgctatatttgcatgtctaaacctcccctcatgaaaaacatcgccataaaccccgaggactatacgatcctggccgtcgacgacattgccaccaacatcatgctgctgaaagccgtgctgagccgtgccaaatacaagatcgtcacggcatcgggaggtaacgaggcactcgaaaaggccgcgacggagctccccgacctgatcctgctggacatcatgatgcccgacatggacggctacgaggtgatcaaacacctgaaggctgatcccgcattgcaggacatcccggtgattttcctcacggcgctgcacaaccccgaagacatcgtcaaggggttcaaactgggagccagcgactacgtctccaagccgttcaaccacgaggagctgatcacccgcgtatcgcaccacatctatctggcggcggcgcagcgcacgatcatgcagcagcgcgacgaattgcaggccacggtcgacgcccgcgacaagatgtactcggtaatagcccacgacctgcggtcgccgatcggcacgttgaagatggttttcaacatgctctcgataaaccttacgcaggaacagataggcgaagacaacatggagatgatcacgatgggcaacaacatcaccgagagcaccttcatgctgctggacaacctgctcaaatggacgaagagccagatcggacgcatgaacacggtgttccaggtggtcgacatttcggaggtcgtggttttcgccagcaagatgtccgacctcgtggcacaggtcaagaacatcgccgtcgaatacgacatccccggcccgatcaccgtcccgtgcgacgtggacatggtgaaaacgatcatgcgcaacctgatgtcgaacgccatcaagtacagcaacgaaggcggacggatcgtcatcagcgtgcgggaaacccccacccatgccgtaataagcgtacgcgacttcggcacgggtatcagcgaggaaaacctgcccaaactgctcaaccccgaaatacactacaccacctacggcaccaagaacgaagagggatcggggctgggcctgcagctcgtgcaagacctcacgcgccgcaacggcggggagctgaccatcgaatcgacactgggcgaaggctccacgtttacgttcaccatcgccaaggtgcaacctaagtccgagaccgtagaagactcggagggggggggtattgcgcgtccctgagcgataaatggttcgatagtctgaccgcatttttccgcgtggaaaaggcggaagagacgatatctccgtaaaatccggacggacacgcacagatagttccccgaaaaggtcgccatgagcgatctttttgttatattgcaggataaaaccccgacctcgccatgaagtattgcagtacgatcctcgtggggcttctctgcacggccgcctgcctggcgcagaccccgctgcccgaaagccgccgcacctccccggaaatattcatctataaacccgatgccaaagagctccgcgaactgcatgtgaaaggcaaggcgcccgacgaagaaatgctgcacacgttcgtcggcaaatatgctgcggcaggaaagatcccgcagctctcccggggaaactacctgcgggtctggacggacggaaacgaactcgtatacagcgaccatgtcgtggacaatttctactaccggctcgtcagggacgagcaggtgatgctgatactctgcgacacgctgggcaacaccatcgacgatgccgtggtaaaacggggctcgaaacggatgaaatacgaccctgccacacgcacctacaacctgccgcgcatccgcggcgaagaggccacggtcgaagtaaacaacgacggcgtactgcattacatcaccatcgggaacgaaccggactacacctaccgtcccgggttcttcaaaacggcctggggaacggtcaaaacagccttcaagcgggttttcgcaccggggaagctgcccgcgcggaacaagtacgacgggttcgtggtattcagcaaacccaggtacaaacccggggaaacggtgaaattcaaggcgcacatcaaccgcaaaggcaagcccctcgacgggaaggtcgacgtggcactcgtttcgtattactccccgtcgatagacacgaccctcgtatcgctggcgccctaccgtcccggcatgtacgaatgggagttcaggctttcggacagcctccgcctccgtctcgacaaggattacacactccgtttccggacgggcgacaagcgtgcgaatgacgtcacgggccgtttccgctacgaggagtacgaactcgggaagctcaccttcacggccagggccgacaagcaaaaatacgcccggggcgacacggtgaggatttcactgagcgcagcggacgagaacaacatgccggtatacgacgggcgggtaaaggtcttggtcaaacccgccaggtacatgggctgcaaattcctcgcccgcacggcattcgtccccgaccggctctgggagcatacgttcggcatggagggcaagtccacgaaggaaatcatcctgcccgactcgatattcgtcgacggcgtgtcgatgtattacgacgtcgcctgctcattcttcgatgcgggcaacgaacgcagggatgagcgcataagcctgtaccgggacgcaaggcggaggcggatcgactattcggccgaccaggggatgctcgccctgcgtgagctgtatgacggcaaaagcgtcgaaagccgtgccctggtaaccgcctacaacccggaatacgagatcgtatggcaggattcggttacattgccctgcagtgtgccgctgtcgtggatcgtcagcgaatacgaggtgcagagcgccacggcatcggaggacatcgaggtcggaaagctgccgggcgaactgatcgggcaccgcttcttccgccgggacggcaacgtccggctggtggtgaacaaccccgcgaaattcccgttctggtacaccatctgcatgggggacaagacgattgccaaggggtatgccaccgaactcgacttcgcgcgcaaggacaacggccgcaagggctattcgatgcagatagcctatctgcagggggagaatgcccggacgatacgcggcgagctgcccttcacggagaaaaacatcacgatggaggtaaagacggcggcgaccgtctaccccggacagagcgcaaaggtcgaagtggcggtgaaagaccgcaagggacgcccggtgaaaaatgccgacgtgacggcctatgcattcacctcgaaattcgaagccctgccgccagaagtgacgatctacgggaaatcggcatcgggaaaggccatcaccccgaaaaactacgaagccgacgaggatttcctctacaacacccgcagcaggatggattggccgctgtggcggcagcgcatgggactcgattcgatcgaatactacaaattcctctacccggagccgttcttcgcctacaccgaggaagtccccggaagactcacccagctatccccctatgtggtcatcgacggggaagtgcagggtatccatgtcctgtggatcgacgaacaaccccactatttcaaacaggcgcagcaactgacgccgtacagtttcccgatatggccgggactgcacacgctgcggctgcgcacctacgacagggaggtgaccgtcgagaacgtctatgcgggcgaagggctgaagaccatcgtttcggtagacggcggacgatccgcagtgcaaccctgggaggcttccggggacaaccatcccgtacggatctccgtccgggaatacggaagaaaagagaaaggcatgctcacgcagcgcgagacagcgctgctaacgcggcacatgattacggtcgacaataccttcgggaaagcaaccctgctcacaggacagccggacaggcaatcctcctacacggttgaaaccgagctgcctggcattataaacgccggcggagtctgctactacctcaacggcatgcagaagcaggcccgccgctaccgctgggacaggccgcaggccgaaacggcgatcctggccgggccgttcccctaccggggattcaccaccgggggcatgcaggtcggaacgctctattcggatacgcttgcagtcaacagtttcgagatcgagggcggctaccgttacgacattcggaacaactacctgaaacagcagagttgggagcagaacccgatccagaggcagctcgaaccgttcacgcagaaggtctgcttcgggcaggacgcgcttacggccgaatcgatccgcggcatattcaggcggcagctcgccgacatggtcgaaaacgaatcggggctgatctctgccgtcccgcagatatcgctcatggacagctgccgcctgcaactgtccacaggcaagctggcggacggcacaagggcacagccgatcatggtgttcctgcaatcgacgggcaagtaccccgccagcaggctctactacggcacgacgaccgaaatcgacaggctgccggaggggaacctccgcgtagacctcatcttcagggatacgacccgctgttcggccaccataaggctgcggaagggcggcatcaactacctgcggatggattcgctcgtaaaggagccggccaacgaccgcagccgcgcgctgttcgggaaactggaaagaatgttgcgcgtatcgcgccccgcggcaccgctggccgactacaagcccgcggaggcggagcgggacaacccgttgcggaacccgggacgcatcagcgaagccaacctgacgggcaaagtcgtcacgggcaccgtgcgcgacccgtatggggagcccattgccggggcatcggtgcagatcgacgggactaacgtcggaaccgtcacggatacggacggaaaattcaccctttcggacacgggacggggaacgctcgtcgtcaattatatcggctaccggaatttcgccaccaaactgatctccggctacaactataacatcgccctggaagaagattacaacgcactggaagaggtcgtggtcgtagcttacggaaagtccggaaagagggccgtggtgggaagcacggccaattccgcgacggtcacaacggaagtggcattcgcagaattcgacgaggaaacggaaacgctcacaagtacgctcgcgggcatgtccgccgggatacaggtgcggggaacgggcacaatcgccggccaggccccgatgatcgtcgtgaacggcgtaccctacgacggggcgctgtcggacttcgatcagggaagcatcctgtcgatgaacatcgtcagggacgcgaacaccgcaatctacgggacgagggccgcaaacgggatcatcttcatcgaaaccaccgaccggaacggggcgggcggcgaccgcttcccgctcgaggccggcatgccgaacacgctgcgcaccgatttccacgacgacgcattctggaaaccccgcctgacgaccgacaaagcggggcgtctgaccttcgaagtgacttatccggacgacatcaccagctgggacgccaatttcatcgtcgtcggcggccgcaggcaggcggacaggaagcaactgcgcataaaatcgtacaagccgctcaacgcccagctctccgtcccccgcttcgccatcgcgggcgacagcctcaatgctgccggacggctgaccaaccacaccggcgacaccttgtccgtacgccgcatggtcgaaaccgacggacggacagccgaggagcaaatccgcatcgccacctcgcatacggacgcaatacccgccgtcgcaggggatgccgacagcatccggatagtctactcgctgacgacgcccggcggctatttcgacggggagcggcgtgcgatcccgatctacaaggccggaatcctggaaacccacggggagttcgccgtcctcaacgacaccactgccctgcggttcacgcccgacccggcgctgggtaccgtgacgatccacgccgaggcatcggccatgcaggcattcctcgacgagatcgggaacatcgacctctatccccacctctgcaacgagcaaatggcttcgaaggtcaaggctctgctctcgaaaaaacggatatacagcctgttcggacggaaattcaaggacgacgacaaggtcacgaacctgctgcgcaaactgacggccaaccaaaacgacggcaagttatgggggtggtggaaccggaaacagaccgaactgtggatctcgcagcaggtcgtggaggcattgctcgacgccgaaacagaggggtataagaccggcctcgaccggcaggcactgacggacgcgctgcttgccggcctgaaccgccgtatgccggcagcggcatccgacacgacagggatgcgaaaaaacgaactgctctcgctggtggggcttctgcgcaagctggacgccaggatcgactacccgcgctactgcaccttcatcgcgtcgatccccgatgcgacgctcggcaaccggctccggacggcggaaatgctgcaacagctcgccccggatgggatgcccgccgcggattcgctgctggctcttgcctcccgaaccatgatgggatcgttgtactggcgcgacaaaacaccgcgggaaccgacgccccgtaggttcgcgcagccggacatgagcgacgtcgagaacacgctcacggcataccgcatcctgcgcgccgcgggcaaccgcaaggccgagttggaaaagatccgcaactacttcttcgaacagcgtaaaagcggttcgtggcgcaacacctacgaatcgtcgcggatcgtggaaaccatcatgcccgacatgctggagaaggacggcggcacattccgcgaagcgagcctgacgatcgacggacaacggttcggcaaattcccgctgacccggacatacgcccccggaaaggagataaccgtccgcaaagagggttccatgcccgtattcttcacagcctaccaacaagcctggaacgacaaaccggaacgtgcggcagaaggcttcacggtctctaccctgttccgcaaggacggcaagcccgtgacaactctccatgccggggagcgcgtcgaactggtggcaaccgtaacggccgattccgacgccgaatacgtcatggtcgagatcccgatccccgcaggctgttcctacgactcgaaagaaaaaggcgatttctggaaagaaacacaccgggaatattacaaggagaaggtcaccgtcttctgcaacaagctccgcaaggggacgcataccttcaccgtcaggctcctgccccgctatacgggctcctaccacctcaacccggcgcgtgccgagctgatgtactacccggtattccatggccgcaacgagatgaaaaaatgcggcgtggccgaagcgcagtagacgcgctgacggaggggaggggcagcagcgggactattatacccgctacctgaaccgcagttcagcgaccacggccttgtggtcgctgacatcttccgaaggcatgtaataacggatgccctcgaaagcgtcgtcgtaaaagatgtagtcgatgcgcagtacccctcccagatagcggaaagtaccgccgtaaccgctcccgctgtcacggaaaccgtcggtcatgtcccccttcatcgtacggtaggtataggacgaaggcgtatcgttgaagtcgcccgcaaggatcaccggatagggcgaagcatccatttcggcacggatttcacctacctgcccggcacggatactactgttgtgttccagttcgcccaagatttgctcgacgggggcgtcgcggtcgtaatccttccggaaccggtgcctgagctgggcaatgcccgaagtctggaggtggacagcgaagagtcgcaccgtatcgccgccgacgagcaggtcggcacgcaggtagtcgttgctcatatcggcaaaccggacgtatttatgatcgagaacgggatatcggctgaccagggccgcactgccctcatgcaggaaatagggcatccgcggggcaaagaccttcccgatgctgtcggccgggaattccctgctgtccataaactcctgcaggcaaagcacgtcgacctgctcgcggttcatcatgccggcgatggccctggccgtagcgagcatggaacccagcctgcggaatccgtttacgttgagcgtggcgatgcggatgtcgtgcgggtcacccgagtccttgaaatcgggaagctgtaccatggccgaaatataccccaggttgagcaccagcgcgaccagtggcatcagcaggacgatccatttgcggcgaaccgtccaccagaccagcgcaaccacgttggccagcagcacgaccggcatgagcaaagcgagcgtcgcccagaatccgccctccccaggggagacggacgaagcataccggcacaggacggcggcgaccagaagcagcccggtgagcaccaccgaaataccataaaaaagaatagaaacggctttgcgacccattttgttcactatttaagcgatttgcgcgcacaaagatatgcttttcaaaatatatttagtacatttgacgatcaaaaaagacgcaaattggaatgaagagggttttaatctccggcggtgccggattcatcggttcgcacctatgcgaaaggctgcttggtgaaggaaacgacgtaatctgcatcgacaactattttaccggtcacaaaagcaacatccggcacctgctgaaacaccccaatttcgaagtcataaggcacgatataatctacccctacatggcagaggtcgaggagatctacaacctcgcctgccccgcctcgccgatctactaccagcacgacccggtcaagacgacgcagacttcggtcatcggtgcgatgaacatgctcagcatggcgcgttacaaccgcgccaaggtcttgcaggcttcgacctcggaagtatacggcgacccgctggtacatccgcagaccgaggattactggggccacgtgaacccgctgggactgcgctcgtgctacgacgagggcaaacgctgtgccgaatcgctcttcatgagctactaccgcgaacacggcatcccggtgaaaatcgtccgtattttcaatacctacggccccaagatggacatcaacgacggccgcgtagtctcgaatttcatcgtccaggcattgcgcaacgaaccgatcacgatctacggcgacggtgaacaaacccgctcgttccagtatatcgacgacctggtcgaagggatgatccgcctgatggacgatacgcccgacgacttcacgggcccggtcaacataggcaaccccaatgaattcaccatcaatgagctggctgccatcgtcttggaactcacgggttcgaagtcgaagatcatgcacatgcccctgccgtcggacgacccgcagcagcgcaagcccgacatctcgctggcccgcaagatgctcaacgactgggaacccacgatccagctgcgcgacggactggtaaagaccatcgcctatttcgaggatatcctgtcgcgggggagcgtccggcactgatccgcccctgacatcggcccggcccgcccttctttgaacaccgtcagcctgttgagcaccgcccgcctgtttgagtacagcccggcacaattcccaatgcagccccaatcctatttttccaggtaatcccgcaatacggagccaaccagccgtatcagcgtgcgcgtcggatgcaatgcggcgaacccgttgagcattccccaatcgtgtaccacaccgttgaagcgcacggtcgtcacttcgacgcccgcctcgtccagacgacgccccatcgcctcgccctcatcacgcaggatgtcgttctcggcaacggcgatcagcgtcggaggcaatccccgcagccgttcggcagaagcacgcacgggcgacatgaggtcgttgccgcgctgagccgggtctgaaacgtacttgccgaacatccatttcatcaacggcgcggtcaggaaccgctggcggccgtatttcacatacgaatcccagtcgtaccccgcatcggtcacgggccacatcagcacgagcgtgcgcagccgcggcccgccgtgatcctcggccacgagcgccgccgcaagcgacatgttaccgccgacgctgttgcccgccagcgccagccggctgccgtcgaccccgatctcccggccgttttcggccacccatttcactgcggcatacacctcctcgacagccttcggaaaatgcgcctcgggcgaaggcgtatagttgacgaataccgccgcacaacccgactccacgacaaggtcgcgcaccagccgcctgtgggtgggatagtcgcccagcacccagcccccgccgtgaatgaacacgaacgccggaagatacccgcgccccgcccccgaaggacggacgaggttcaggcggagcgtatgcccttcgctttcgaccgtccgttcggactcctcgatgcccgacagatcgacatgcacggccgcctgcacatcagccaggacgcgacgggcctccccgaccggcaacgattcgacgggagcgccgccgttcaacactttcagataagctttggttccccgcgacaggtggtcgtcctgcaaataatccggagcttccttcagatgatccataacaaaccgttttaaagtttatgacacggactgcaaaggcgctgccacaaacgaaaaaagccggacgaaatgtccggcttttcggtatgtcaaagcggtttttactgcgccatggcatggcggaacccgtccaccttgtcccagtcgccgcgcgtgaagtcgggcacggcgaccggcatgctgttgtgttcgagcgaagccgaggtcagcgacccgatgcacgaccactcggcagcgtcgtaaacgtcctgatcgagcggcaggccatgctgcaggcagtaaacgaggcgatagtccatgatgaaatccatgccgccgtggccgcccacgcggcgggccttctcctcgatgtcccgggcgatcggatgcttgtaacgctccatcagcgccgccttcgccgcctgggggatgaacgaatgctcgctcagattctcgtggtcgggaatctcctcgccggcgatttgctcgggacggaacgcatagccctcgacagggtatttgttggcgaagccctcggtgcccgtaagctggtacatgcggctgtaaggacggggcgtatagacgttgtgttcgagcagaatcgtgcgtccccgctcggtcttgatgagcgtcagcgtctggtcggcattggcgaaggtctcggcacccatcttctccttggcgagtttcaggccgttgaccgacttggtatccatcgccacgaggtaattcatcttgtcgccgcggtggatgtccagcaactggcaggcggggccgaggccgtgcgtggcatagacgtcgccgcggtgcgactggttgaagtcgaggcgccagttgccctggtaataatcccagtagggttcgaggttatgaatataggagccttcggtgtggaggatctcgccgaacagcccgtgctgggccatgttgagcgtcgtcagctcgaagaagtcatagacgcagttctcgagcatcatgcagtgacgctgtgtcttctcggcagtgtcgaccagttgccagcactcgtcaagcgacatggcggctgggacttcgacggcgacatgcttgccgtgctccatggcataaaccgccatcgggacgtgcagctgccacggggtgcagatgtaaaccaggtcgatgtcatcgcgccggcaaagttccttccacccctcctccccgctgtacggggcggcggccggaaggttatgtccggcgaggatttcctgcgacttgtcgacacactcggggtagaggtcgcagagcgccacgatctcgaccccgtcgatatttgcgaagcgttccacggcgcccgggccgcgcatacccaacccgatgaaccctacgcgtacgaccgggatcgggtcgaccgtcagccgcaatacggaatgctggccctcggcgcgggccgggacgtcgaatacgatcacaccgtcgacgatgctgtaaccttccttcggcgaggtgctgcaaccgcagaacaatacggtcgccgccgagaacaataaaaaggcaaatttcttcattatatccgggatatttagatgtttagacaaaagtatgaaatattttgaaatctgcgctcatttgactacttttgccgacgtaaaaatcacacaccatgtttcgtagattagcggcggtaatcctctcggtcgtcctgctctcaccgggctggctcggcatgacggggctcacgctgcccttcgccatgatcccgctgctgtggatcagcgcatcgtacgaccagacgcgccgctcgtggtggcgcatgttcggctgggcggcgctgaccttcgcgctgtggaacatctcgaccgtctggtggatatggaacgccaccccggtagggcccgtagccgcgacgctcgcctcgacgacgctcaacatgatcgccttcatgctgttccacaccgtctcgaagaaagggccgaaggcgctggcatacaccttactcattgccgggtggatcgcaacggaatactggtatacggtcggcgaattctcgtggccgtggctcatcctgggcaacgggttctcgcacgacgtatggctcgtacagtggtacgaatacacgggtgtcttcggcggttcgctgtgggtgctgctctgtaacatactcttcttcgaagcgctgcgggcacgccgcagcatcggacggtggatcccggccgcgggcgtcttgctccttccggccgccgtgtcgctgggcatctggtggagctgggagcaacctgacgaagggacggccgaggtgagcatcctccaacccaacgtcgactgctacgacaaattcaacggccgcgccgactggcaggaagacaacatcaccgaccttctggcacaggtgcccgccggggcgcaattcatcctgctgcccgagaccgccgtaccggggcattactgggaaccggagctttcggaactccgcccggccgacgaaccgggcatgttctggcaggaactgaccgacaacctgcgccggtcgcaccccggggcgctgctcgtcacgggcgccaacaccctgcgttattatgccgccggggtacaaccccgcacggcacgcagggacgggttcggcgaaggttactacgacgtattcaacacggccgtagggctcgactccgcaggccggatgcagctgcaccacaaaggcaaactggtgatcggcgtggaaaataccccgacactgctcttcgacatcctgcaattcctcgtgatcgacctgggcggcgtcgtgggacagatcggcatgggccagcacggcacggccttcgaacaccggggcgtgaaaaccggcccggcaatctgctacgaaggactttacggcgatttcttcggcgatttcgtgcgccgcggggcgcagttcatggccatcatctccaacgacggctggtggggcgacacgcccggctacaaacacctcttcacgatctcgcgcctgcgcgccgtcgaacaccgccgtgccatcgcccggtcggccaacaccggcatgtcgggcttcatatcggcccgcggcgacatcggccagacgctcggctgggaaaaacggggcgtgctcaccgcggccgtgcccctcaactccgaactcaccttctacacccggtacggcgactacctgggacgcatctcagaatacctgatgctgctctgtgtgctctactacatcgcctaccgggccaagaaaaagaaccacctcgtaaaataaaacccgaaacccgatatgaattacacccagaccctcgaattcctcttccagtcgctgccggccttcgaaaccaaaggcgcaacggcctacaagccgggattggagcgcatcaccgcattctgccgccacatcggcaacccccagcgcaatttcttcacgatccacgtggcgggcacgaacggcaaaggttccgtatcgcatatcatcgcctcggtattgcagcaggccggctaccgcacggggcttttcacctcgccccacctgcaggatttccgcgaacgcatccgcgtcgacggcgagatgattcccaaacagaaggtcgtgaacttcgtggacaaacaccacgacaagatggtcgagctggaactgtcgttcttcgaaatgaccgcggcactggctttcgactacttcgcacagagcgacgtcgaggtcgcggtgatcgaaacgggactgggcggacgactcgacgccacgaatatcatcgtaccggtcgtaagcgtcatcaccaacatcgggctggagcatacggcgctgctgggcgacacgctccagaagatcgcagccgaaaaagccggaatcatcaagaagagcatcccggtcgtgatcggcgagggcgatgtgcgctacaacgaagtgttcgagcaggtcgctgcggccaacaaatcgaaagtcatctatgccgaaaaggtattctcgtgccaagagtgcggttgccgggaagggcggcagcacttctgcatgcaccgcgtgcgcgacgaccgcaaattcgaggtagacctcgaccttacgggcaattaccagcgccataatatcctgacagccgcggcgacggtcgatttcctgcacgaggaaaccccgctgacgatctcccgccgtgccttcctcgaagggacgcgcgatgcggcggccatcacttctctggcgggacgctggcagaagctgggtgaaaatccgctcgtcgtatgcgacacggggcacaacccccacggcatcgcctacgtggccgaacagctcaaagcgacgccccacaaggagctttactgcgtgatcgggttcgtccgcgacaaagacctggcacacatcctgcccctgctgccccgcgacgcacactacatcttcacgcaggctcagaccgaaagggcattgcccgccgccgaactgacagccaaggctgagatctacgggctcaggggggaaaccatccccgaagtgccggctgccgtggcacacgcccgggaacttgccgctgcggacgatatggtcttcatcggcggcagcacctatgtcgtcgccgaagcgctctgatacatacgatattcagatcccgtataaagtccgtccgagtgtctcggacggactttcttttgtcatcgcgaataaaactataaaaaatagttttatgtgaagattttttagttatatttgcagaaaaccaatcgcatgaaacgaatccttccgctcctggcggccatgatcgcattgacaaccgtactccccggcaaggcgcaaaccggcaaatattacatcgacggacgggaaaccacccgtgaagagctattgaagctacccgcgggtacaatcgaatccatggcgaattcggtggaaaacggattgcccgtagtgcgtataaaattaaaacccgaaggcggggaacaggctccggccaccgggcaacaggaaaaaaacactgcgaccccgcatgaaaaagcgatgcaactggtacgaggaatctacgagcagcacaccctgctcaaggagggcgacctggcggccgatttccgggctacgaaatatgccggaggggatctcacgcttacagccctgcgcggcaaagtcgtgctgctgaacttctgggctacctggtgcggcccctgcctgcgggaactggcgccggaagccctgccgaaaatcattctcgaacggtttgccgcagacagcgaattcgtattcctgccagtcgcctataccgattcaaaagagagcctcgacaagtttttcgcaggcgacgaacagcagaattacgcttatctgcgcgacctgacagcaatggatccggacaaacgggtattcggcctctatgcagagcagggcgttccgcgctccttcgtaatcgaccgcaacggccgcatcgtcctcgggtcgctgggtgcggcacaggaggaactggaacgcatagcggcggctatcgaaaaagaactttccagataacggataaaaacagcccggccgaaaaacggccgggctgttgcgattttaagcttcacccatcttggggcccgcttcgggaaccggcggaggagtgggtatttcgatcttgcccacattgctttcataacgcacgatattctcctgcagcgaacgcaacagccgtttggcgtgttcgggcgtgaggataatgcggctcttgacacgggctttctgcacgccaggaagcaccgcggcaaaatcgataatgaattccgaggtggagtgggatatgatcgccaggttcgaatagtggccctgggccaccgtatcgtcgagttcgaggtcgatcccgaattgtttcatttctgccataggcccgcttgttgtttctgcaaatttaccgactttcgactgccaatatacaactctgcggccaaagttttcgatattttatcaacatatcggccatttccgacaatcggccgcgcccttttttcacccggccttgacggatgtccgaggtttttcgtatctttgttgcctgaaactccgcaaccgaagaaaatgggattggaaatcttggacgttatgttccgcggcatctgcgtaggcgtggcggcatcgatcacggtaggccccgtggccgtgctgtgcatccagcgcaccctgtcgaaaagccgtcgttcgggaatcgtctccggtgtgggcgtagcctgtgccgacaccttcatggccatggcagcgttgtttttctactcgatgctccagacccagatcgaacagtacaacaccctgctgcgcgtgataggcggcatcttcgtggtaatcgtcggcgtctacatcttcgcccagaaccccgtaccgcagatacgccgcaaccgggcgggcaagacgtcgctgtggcaggacttcgcctcgatcttcgggctgacgatcgccaatttcatcatggtgatcccctacatcctcgccttcttcgcggtattcaagatttcgggcggcgacatcacgcacgaaggcgtgggaggcttcttccgcgccatgttcatcatcgccggattcttcggcggcgccgcggcctggtggacgatgctggccttcgtcatcaaccttttccgccgccgcttccgcccgcgccacatgctgacgatcaaccatgtcgccggccttatcatcgggatactgggtatttacacgatactttcaacattctttgatatattccccaatgtcggataacaaacacaagatcataatcgccatcgacggcttttcgtcgtgcggcaagagtacgttcgccaaagccatcgcccgcgaactgggttacatcttcatcgacaccggcgccatgtaccgcgccgtcacgctctatgcgttggaacacggtgcgatccggtcgggcatcgtcgacgaggacgcagtcgtcaggctgctagaccagatcgccatcacgttccgtttcaaccccgaacgcggtgccagcgacatctacatcaacggcgacctggtcgaaggcaagatccgcacgatcgaggtgagcaactgcgtgagccgcgtgagcgccatcgccgccgtacgcaggaaactggtggccatgcagcaggagatggggcgccgccgcggcgtggtgatggacggccgcgacatcggcacggtggtttttcccgatgccgaactgaagatttttatgacggccgacccgcgggttcgcgcctgccgccgctatgacgagctgcgcgccaagggcgaccaggtgtcgctcgaggagatcgaacgcaacgtgcgcgaacgcgataaggccgatatggggcgtgcgatatcgccgctcaggcaggccgaagacgccatcgtactcgacaacagctgcatgacggtcggcgagcagatggcgtggttcaggaaggaattcgaacaagttaccagataggagcacggatcgccgtgcgcagggcacagtgaaagggttgcgaatagagatcgatgacaaatcgggcttctgcttcggcgtagtccgagctatttcggaggccgagaaagccctcgccgaggggagtacggtctattcgctgggcgacatcgtccacaaccgcatcgaagtgcagcgcctcgaacggctggggctgcgcaccgtaacccacgccgacatgccagcgctggtcggccggcggctgttcatccgcgcccacggggaaccgcccacgacttacgcgcgcgcgaaggagctcggcatcggggtgatcgacgccacctgcccggtggtcgcccgtttgcagaaccgtgtggtgaaggcacacgaacagatgcaccccgtcggcggacaggtagtgatcctcggcaaacggggccatgcggaagtcgtggggctcacgggacaggtgcaggcaccgaccatcgtcatcgagggcgagaaagacctcggcctgatcgactttacgcggccggtctatttcctgtcgcagacgacccagagcatcgccctgttcgaggccctgggtgccgagatgcgccgccgggcagcacatccggacggggtgcggatcgacgacacgatctgccggcaggtatcgaaccgcgaacaacacctggcagaattcgcacgccgcttcgacgtggtggtgttcgtctgtgggcgcaagtcgtcgaacggcaaggtgctctcggaggtgtgccgcagggcgaacgcccggacacacacgatcgaggaggccgcagagatcgacccggcatggttcccgggtgccgagtcggtcggaatatgcggcgccacgtcgacccccaaatggctgatgcaggaggttgccgatcgcatcgggcaaattgggagaagatgatacacagaaaaacgaccgcatgcaacaagcccctcccaaggaaggggtttgggatggggtcaaaattgcaaacggcgccggcggcggctacgaccgacaaaggcattgtaacgatacaaatccaacaaaaatcactgttatgaaatacttcatccgttcgttaaaatatttcgtagccctgtgcgttatctgtgtagccatcctggccctgatgctcgcaacggggacttcggcactcacgctcgaccagacggtctacgtaatgttccacaccagccgttacgcgacgctgttcgcggcgatcgtggtgcttgcggcgctctaccccagattcgggttcgtggtgcgcaaggtcgaaggcgacgtggagcagaaccgcgaacagatcgtcaacgccttcaagtcggcaggcttttcgctgcgcggagaggaagacggggtgatgacattccgcgccgacggcccgctgcgcaagctgatgctgctgggagaggacgaaataaaggtttcacaatacggacagtggattcagatcgacggcatacgccgcggcgtcgcccgggtcgaataccggctggattcgtacatacaaatgagtaaacatgattaggaaaggatacagatacctgctcacggccgtcattgcggcctcggcggcagcccttttgacctttgcggcccgcaacgacttcgggctagggcgcaacatggagatcacggtcaatatgatgcgcgaactttcgctcggctatgtcgacccggtagacccggacaagctgatggaaggtgccgcagaaggcatggtcagcgacctcgacccctacacggagttcatccccgaagaccagatgtccaacttcgagctgctcaccaccggcaaatacggcggcgtaggctccctcatccgcaagaaaggcgactgggtaacgatcgcccagccctacaagggatcgcccgccgaccgtgccgggctgaagatcggcgacaagatcctcgccatcgacggcaaagatgccaagggcttcaccaccgagcaggtcagctcacgcctcaagggagacccgggcagcaaggtcagggtgaccgtcgaacacctgacgggaggcaccgagaccgtcactctgcaacgcgaacggatcgccattccgggcgtaccctacgcgggatgggtggacgaaggcatcgggtacatccgccacagcgatttcaccgaaggttgctacgaggatatgcgggcagccatcgaacggctgcgttcggagggcgaactgaaggggctgatcctcgattaccgcagcaacggcggcggcatcatgcaggaggccgtgaagatactggggatgttcgtcccgaaaggcaccgaagtggtaagcaccaaaggccgcacggaagattcgcgccgggtataccgcaccgaatcggaaccgatactcccggacttgccgctggcggtgctcgtcaacggcaactcggcatcggcatcggagatcgtgacgggagcgttgcaggatctcgaccgcgcggtcatcatcggccagcgcagctacggcaaagggctcgtgcagaccccgcgcccgctgggatacaacgccatgctgaagctcaccaccgccaaatactacatcccttcgggacgctgcatacaggccatcgactattcccactcgcaggagggcaccgttcgctcggtacccgactcgctcatctcggaatacacgacccgcgccggacgcaaggtctacgacgggggcggcatcatgcccgacatccgcaccgaaccggagtacatcagccgctttgccatgacgctctatgcgctgggattcatcgaggatttcggggacgaatacgtacgccggcacccgggacaacagatcgacatccgcacgttctcgatcacggacggggattacgccgagttcgctgagttcatgaaggacaaggaggttccctatgagtcggatacgcggcgggcactcaagaaactgcgcgaggctgccaaaacggatcgcttcgaagaggtggaacagcagatcgcagccatcgactcgacgctccgggacgatacggcgaccaatcttgaaacctaccgcaaggagatcgtcgagtcgatcaacaacgacatcgtactgcgccacggctattcggaaggcgtcatcgagcattcgcttcccgacgacggggacgtgctgaaagccatcgaaatactcggcaacaggcaggagtacgcgcggatcgtcaccgagcaggacaccccgcgtaaataaacacaggccatgaaaatccgccgcgacatattctcgttccgcaaccgcgtggtggtcatcatcgtgggggtatccctcggcatggtgtcgctgctctacaccaacaacatggccaagcgcctgaaggaaaaggagcagcacgacgtggcactgtgggcccatgcgatggaacgtgcgaaccgcaacgtgatgggaggctcgatggaagacccgctcatcaccgacatcgtgtcgaacggcaacaacatcccgttcatcatgaccaacgagaacctggaggtactccaattccacctggttcccgaaaagatcatcgaccaccccgaccggctgcgcaggcagatcgacaaattcacggccgagaacaccccgcgcacggtgcgtttctggtggtccaacgaccactaccacatcatcttctacgggcgatcggcactgctcaaatcgctctactacttcccctatgtccagatattggtcataacggcctttatcctactggggttcatcgcattccggtcttcgaaacacgacgagcagaaccgggtgtggatcgggctggcgaaggagacggcacaccaactgggtacccccacctcgtcgttgctcgggtggatcgaatacctgcgctcgcaggacgtggatcagagcgccgtggaggagatgaacaaagacctcacgcacctgatgaagatcgtcgaccgcttctcgaagatcggctccgaaacgccccttaccccggccaacatcaacgaagtcgtgggcgaatcggtcatgtatttccgcaagcgcatcccgcgcaacgtgacgctcgactataacgggctggccatcgcccccgtgcaggccaacatcaacgccgcactgttcgaatgggtggtcgagaacctgatgaaaaactcgctcgacgccctgcaggggcacgggtcgatcgacgtgcgcatctcgtcggacgacaagaacgtgatgatcgacgtcaaggataccggcaagggcatccccaaggggaactggaagcgtatcttcgaaccgggattcacgaccaagacccgtggctgggggctcgggctctcgctttcgcgccgcatcgtggaggattaccaccagggtaagatcggcgtgacggaatcggagatcggcaaaggcacgacgatccgcatcacgctcaaacgtatattcgaggaatgaccgacacgctgagacataccgtgccggttccgctgcccccaacgcaggaatccggcgttgcgccgatacacggcaccgggggttccgccacgccacaggccgcggccccgtccggggattccgtaccgcatcgccatgctggtatgcccgcgacgcccccgggggactcgcccgcagcacggacgctccaggcacagtccccgacggacaatacgggaaatacgacctcaggcgacacgctcgccgcagacagtgctgcggacggcgaatttccgttcctccccttcggcgacccgttcccggagctgcaggcaacaccctggcacgacgtcccggcggcggaggtcttcggcacggcctccgtgcttgcctcgccgcagccgatatattccgcccgggcggagtcgctcaccgagaatcccgttttccagggtttcgtgctactgttggccgcaacctatgccatgctgctctaccgcaatctggaagatgtgcgcctgctgctgacacgtgtttcacgcgacagggccacaggagaacgcctgaccgaagaccccggcggcagcgggttctcgcgcttcctgaatatcgccacgacgatcggcatgctcttcatgggggtcatggtcgtcaaatacggggattccctgatgccgggacgcctgaccgaactcctgtcgcacggagccgtactggccctgagcctgctggcgacgctcgcctgcatgggggtggtactcttccagctggcaaccgtaaggctggccggggcggtgacgctttcgcagcccttcatctcgcagatcgtcctgctgaaacgcacctacttcgccctcgccgtcatcgtcacgtcacccgtactcctgctcttcgccctctgtccccggggtaccggaggcgtctggttctgcatcattgtcatcgagttgatcgtaacggctatcttatacctcagggaggtgctgaacctgtttatttccaaaaaagtttcgattttgcattggattttgtacctttgcatcgtggaagtcttcccggtcagcctgttatggctgctcgtggcaaggtgattcagtgattgaagaacaacgtaaaacttaggtcagcattgaaagttaaaaaagtattggtttcgcagccgaggcccgcagttatagagaagtccccgttctacgaattgtccgagaaatacaacgtagagatcgcctataaaccttttatacgtgtcgtgggcgtatccctgaaggagttccgtgcccagcgggtcgagatactgacacatacggccgttattttcacgtcgcgcacgacggtagacagctttttccatatctgcgaggaagcccgcatcaccgtgccggaaaccatgaaatacatctgccagacggaagccgtggcactctacctgcaaaaatatatcgtttaccgcaaacgcaagatttcgttcgccgacggatcgttcacgtcattcatcgaactgataatcaaacataaggacgagaaattcctgctggcgctgagcgagccccacaaacccgagctgcccgagacgcttgccaagctcaagctggcggtagaccccgtcatcctggcacgcacggtggcttcggaactcgaagacgtacagcttgcggattacggactgctggcgctctattcgccttcggacgtcaagacccttgccgacaagttcggcaccgaaaacctgcccgccgtggcggtattcggtgaaggcacgctgcgcgctgcccttgcggcaggcatcacggtacaggccaatgccccgaccccggtggccccgtcgatggccaaggccgtcgacatctatttgcagaaggttcataaaggcgaggagatagaacctgtagagttggttaccgatacggaaaaagaggagttcatccgcagccagcagcataaactggccaaaaagagccgcacgcgccgcactgccgaaccccgcaaataaaatagccatgcccgactgctcgcttccccgcacggaacggctccgttcgctcggtgccgtgcgccgcatgttcgagagcggggagagcgggtttatcttcccgttccggtacgtctggttcgccgaggccgacgagataccttcggtcgaggtattgttctccgtgcccaagaaattccacaagcgggccaacaaacgcaacttgctgcggcgccgtatcaaggaggcataccggttgcagaaacagacgttgaagaacggcagcccggcgaacctcgacctggcgctgatctactcctcgaaagaggtgctgccctataaaaccattcaaaatgcagtccgccggattctggaaacagtcgtggaacacctttaaacgcatctgcgccctgccgctgatcgcgttggtgaagttctaccagctctgcatctccccgttcacgcctccgtcgtgccgcttcacgccgacctgctcgcaatatgccctcgaagcactgcgtaaatacgggccgttgaaggggctgtggctgacgctccggcggctcgcacgctgccatccgtggggaggcagcggttacgatccggtaccctgaacccgcgggtaaggaaaacccggacggcacaaatgctgcccgggacaataaaaacatccgacctttccgggtcggattgttttttcagacagcatacgtgcccccgcagggcggaaaaaccggaggaacccgcaaaaggcaggcacacagcccctcccggccggtcgcactatcagtcgcacgtcccagggcaatgttcggccgaagattcgaattcgagtgtcacatggtggatcccggccgtttccagctccgctttgagctgtctcttgaccgtttccatacggggcagctctgctaacacgacatgcgccgtaagggcattttcggtagtgctgatcgcccagacatggatatggtgcacggccttgacacccggcacggcctccatcgtcttttccacttcggcaatgcggatacccacgggaacgccgtcgagcgacagacgcaggctgtcgcgcgtcagcgaccagaccgatgccacgatcacggcggcaacgacaagcccgacgacggggtctacgatcgtccatcccgtccacgagatcacgacacccgacaccagcacccccaccgataccagcgcatcggcggccatatgcaaataagcccctttcacgttcaggtctttgtccttatccttcatgaaaagccaggccgtaaagccgttgattacgaccccgacgccggccgtccaggcaatggctccgccctcgacgggtgccggatgcagcatccgccccacgctctcggcaacgatgacccccacggcgacgagcaggatcacggagttgagcagcgaaatgagcaccgtgctcttcttatagccgtaggtataccggggcgtagcatgggcctgtgcaaggcggaaagccagcatggccagcagtaggctcgccacgtcggaaaggttgtgcccggcatctgacagcagccccatcgacccgtaatagagcccgacggcgaattcgacgacaacgaatgccacgttgagcacaatgccgaggataaaggctttgttgagcgacgtgaccgtatggtcgtgatgatggtgttcgtgtgccataaccgttatatttcagcgatcgtatcccggatgtccgagagatcgaccagtttgttgacgatggcgtagatcgtaagccctgccggagagtgtatctgcagcttggccacgatgttgcgccgatgtgtgatgaccgtatgggtcgagatgcagagtgcatcggctatctgcttgttggtcattcccttgacgatgcagacgacgatctcgcgttcgcgggcgctcaacggctcctggcgctcttcacggggtgcatcgccgaccggttgcatgatcttttcgcgtagcatctcgaccgggtcgtagaccgaaagcacctcatcataggcattgagcatagcagcgtccgtcacggccatttgcaacgcaatgcagcgcaggccctcgcaaccggtttgcaccctcagttgctggggcgtacaaaatcccagcgaagccgggttgacgaccagcacgtcgggacgatggcgcgacaactgcgcggtgagctgcgaaatatcggcgatttcgaggatatcgacgtcgggggccggcaggcggcgcaacacggcgataatgccacagcgcaggatggccgaaggctcggcgacggcgagtttcaacgccttcatcgacggcctcctttcttggggacgggttgcttgggaggcgtgtccccgggctgtgcgccggacaccccgctccccgtccgctcttcgagccgcttgatcgccgggatgaacagacggtcttcgatatcgttgtgcgacgcaaggtcgcgttcgcaggtgaagatgtcaaaaagcacgccgttcagctcgttggtactgcccgaagggtaataacggatgatgatccgcttcagttcggcaagtttcgcctcgacctggtcgtggtgccggcggaatatgtcgatcgaatagccttcgggatgctccccccggagcagcccttcgacataggggaaaactttctgttcctcatagtccatgtgcttgtgcacttcggcgacgtactcgtcgaagaaccgcaggatggcgaaagccacgtcgttatggctgcaatcgatcgcctcgatcagcttgcggcggatggccggaagccggaaatcgaggaaatagttatgcgaattgcgcaggtagctgacaagcgcggccacggagatcgtctccggatcgggggccttgtcgtcggcatgcatattcaccacagccagaaaagtcgccgtatcgaccccgctgtcgaagcagacctcgccgatggtcttgtcgccgaaacccagtgcgataccgaagcggctcatgataagcagcacgggatagcggtcgcaaaccaggtcgcacatgcggtcgtcggaattgtatcgccctattctatacataatatgttctatatctgcaaaaataacgaattaccgcacaccgcgcaatacctaatttcaggtatttgtcccggaatcagcggtttccgatgtcgacataggttgtctgaagcatcgtgcggccgatatccagcaggccgggcgcggtctcgctgacggtcttgccgctcgtagcgtcccacacgacctcacccgaggcatcgaccacgccgaaaccgtcgttgaacgtatagtaagcgaatttgcgggggggggtcggggcgaaaatatccttgctgtaatcgaaatccgaatggtcgatccccagctgcccgaggatcgtggcgcagatgtcgatctgcgaggcgtaggtatcgaccacacgtggtgcagcgacggcgccgcccagccagatcatcgggatgcggtggcgcagcggttcgttataggagaggctccgcggccacggatagccgtggtcggcgaccagcaccagaagcagattgtcccatgccggcgaagccttcagtttgtcgaccatacgaccgacgcactcgtcggaaaaggcgaaggcgttgagttccttgtcgtcgaacttcgagaacggcacgtcgaacgggcgatggctgctcaatgtcagcatgccggccaggaacggctcgcccttcccgctcagggcgatcacgcggtcggcgaaccagtcgcacatcaccgcgtcgtcatagccccagtcggccggcggggtatcgaagcgcaggtctttctgccacgtgagctgctgccagcccgtagcgtacatgtacgaagcctgattggtaaagttcaggtcgccgccataggagaagcaggtggcataccccgcgccggagagcgaacgcgccagcgagggcaggttacggctcttggccgggagcttcatgatcgacatgcgggtctgggcagggaatccgctcaggatagccacctcgccccggtcggtgcggaacgagttggcgaagaaattttcgaaccagatgccttcgcccttcaggcgctgcatgttgggcatgacgggcaggcccccgacatcggcatccatgaccgtacgggcgaaactttcgagaatgaccaccacgacattggggcgcggggtcgtcagcacccgctcgggagcggcggcggaagggttgttcccgcgcaagggggcaaaccgttcctcgcgtccggcctcgtcgaagaaggggtattcggcggcatagtcggtatgatcgccgaggctcgtgaggaacgaaaagaccgggttggtcgccgcatgattcagaaacatgttcgcactgaaataggccttcgacacattggcgaccgaagcccccagcccgccgcggatggcgaggaaatcgcacccggcgagcagcagcaggacaaggctccacagcagcgccgcacgccggcggagcggctccccgtcgaacaggcggcagacaaggcggtagacccaaaccataagtgccgcgtatgcgacggccagcagggtctggcgtaccccgagccagaaatcgacgctcgccatggcctcccggggatcggtaaggtaaatcaggatcgtcgcatcgaggcggaagccccaatgctggtataactcgacatcgacggcgaagatgaccgccgtgacggttgcgaccaacacgaaatagcctgtcagcacccgccgccatattctcccgggcagccgcacccacagcgacacaagggtcagcagcagcggcagtgcggtgacatacccggcgacggtgctgtcgagcgtcagcccgtgccacacgacgcccagccattcgccgacggaagcctgcgcggcatcggccgcatagtaggccaggaaaacgggtttctggacggccatcagcagaacggtcgcacagaacaccgctaaaacaaaagctatcttcttctttaccatgcgcacatcttaaattggcggtcatacctttcgaagtaccggaaatttccgccccggattttcgaatcagaccgcgtcattcgcagcctgcggctacgttgacaagtcagcccctaaatccccggctcggaagaaattccggccgcgccggccgacaaaaccgggaaagtggctgacgggcatcggcgccgggtgctcccggcgcaaggtgccgggctcagaccttctcgccgtaggccaggtcaccggcatcgccgatacccggaacaatatagcagcgcgaggtcaactcttcgtcgacggcggccgcccagatcgtggtggttttgcgcggcatattcttctgcacgtagtcgatcccctgttcgctggcaatcacagccgcaacgtgcgtatatttgggcgtaccacccttctcgcacaaggccttataggccagcacgagcgaagagcccgtggcgagcatcggatcgaccagcaacaagaccttgccttcgaggtcgccgcacgagatatactcgaccttgaccgtaaacttgccgtctttcgtacttttacggtaggccgaaacaaaagcgttctcggcatcgtcgaagtagttcaggaatccctgatggtaaggcagcccggcccgcaggatcgtcgccacgacgacctggtcgtcaatcagcccgacctccgcttcgcccagaggcgtctcgacgatacggggcgaataggcgagctccttcgatatctcataggccgtgatttccccgatacgctccaggttacggcggaagcgcatcgagtccttctgcaccgacttatcgcggatctgtgcgatgaacttgttgaggacagtgtcctgtttactcaaaatatgcagggtcataggtatgaagtttggttgtcaatagaggaagttgttgaaggggtaacgcccggcatggatctcgcgtaccatcccgtagagatccgaacggaatttctcgatgttggtcttggcgagcgccgaaaggaaaatgcagggggtattggcccgggcgatccagctctttttcaggtcgtcgagcgacaggttctcgcgcgtggcgggcgtgaggtcgtcctcgtccttcctgacataggtataggcatcgaccttgttgaagaccaggtaaacgggtttgtcgcccgcgccgatatcctgcagggtctgcttcaccacgtcgatctgctcttcgaactgcggatgcgagatgtcgaccacatgcaccagcaggtcggcttcgcgcacctcgtcgagcgtcgatttgaacgactcgatcagctcggtgggcagtttgcggatgaatcccacggtatcggacagcaggaacgggaggttgtcgaaaaccaccttgcgcaccgtcgtgtcgagtgtcgcaaagagtttgttctcggcaaacacctcgcttttggagatcaggttcatcaacgtggacttgcccacgttggtatagcctaccagcgccacacgcaccatcgaaccgcggttcgagcgctgcacggccatctgacggtcgattttctgcaaatcctccttgagtttggagatccggttgcggatgatacggcggtcggtctcgatctcgcgctcaccggcaccgccgcgggtaccggtaccgccgcgctgccgttcgaggtgagtccacatgcccgaaaggcggggcagcatatattcgtagttggccagctgcacctgcgtcttggcataggccgtctgcgcccgcgacatgaagatgtcgaggatcaggcgcgtacggtcgaggatgcggcagggcatggccttttcgatattgcgcgtctgcgacggggagagctcgtcgtcgaaaatcaccacgtcgatctgctgctcccggcagtaaccagcgatctcttccaacttgcccgggccgacgtatatgcgggccgaaggctgcggcagccgctgcgtaaagcgtttcacactcacgatatcggccgtttcggccaagaattcgagttcgtcaaggaactcttcggcctgccgcggatcctggttgtcgcggacaacggcgaccatcacggcgcgctcccggcaatcggagacagcttcggggcccggagttatatttttattctcagtcaaagtcgtacacttaattttaaacggttacagcgtgcgcatgttgcggcacgaaaggcgctccctgcgaggagcaaacattatgctacaaaaagggtatcctgctttcggcggataccctatttattaaattttcatgcagaacattctcaactcaaaccacatacgtccggtcagttctgtacgcggaaatcgaccgggagcgtgtatttgacacgcacagcctggttacgctgcttgccggggctccatttcggcgacttgttcagcacgcggatggcttcttcggaaagcgaccggtcgggcgactgcaacacctcgatattggtcaagcgaccgtccttgtcaattacgaacgaaagaacgacacggccctgaatccggttctcaagggcaacctgcgggaacttgacattctgcatcacccacgcccggaacgtattgaggtctccatcctggaacgatggcatcgtctcggcagtaatgaaaatcgtgtcgtccgcgaaatcctcgtccttggccggcggcacaatttcgacaatcgcatccggatcgaactcctcgaaggtgagatccgtctgcacgaaccggtgattgggaatgacttcgatcaactgggaaagagcctttacctcgaccttctggggtttctgtttgggcgcgtcggtcgtgaccgggacaatatcgacatcgacaggcataacattcactgcgactttctggatcctgtactcgtccggcgtataggtaaatgcgacaatgaccagggacaatgccacgaccaaaccaatctccaataaaaggcctctcttattcctaagatctgccttgaatgattttttaatctccatatcaatcagaattaggtggttagtacgcgaatccagtgcagcgtatgtatcgtcggattccgggtcgctgccgccggaacccctaccgtcccggcttagttctgcacgcggaagtcaacgggcagggtgtactttacacgtacaacctggttacgctgcttgccggggctccatttcggcgacttgttcagcacgcggatggcctcttcggaaagcgaccggtcgggcgtctgcaacacctggatattggtcaggcgtccgtccttctcgatcacgaacgaaagaaccacacgcccctgaatgccgttttcgagggcgatctgcgggaacttgacgttctgctgaacccacgtacggaaggtattgagatctccgccctggaacgaaggcattgtctcggcgatcaggaacggctggtcgtcctcgatggtttcttcgaccacttcgacctgctgaaccacttcggtattctcgtcgaactcggcgaaatccacctcggtcgtgatcttcgtgtcgttggtcaccacctgcaacaggtcggcaatcaccttcacctcgaccttcttgggaggctcgggcggcttctgatcctgacgcgtaatctcggtaatttcttcttctaccggagcgtagttcaagtccggcttttcgatccggtactccttcggcgtgtaagcaaaagccgcaataaccaggataagggctacgacaagtccgatttcaagcaaaaggccccgcttgttctgaaggtctgccttgggtgatttcttgatttccatctattttaaatttaaattgttcggcaatgataaatcgcacataggcatgctatgcaccacaaatatatggataaaaattcaaaaatgcgccatccggcacgaaaatctttaatttttgcctacttttgcggggtaaaagatcacatcggagattgataaatggccgtttcggaaccactatacgggaaaaaccccgcggagctcgccgccctctgcgccgagacgggtctgccgcgtttcgcagcacgacagctcgcccgctggctctatgtgaagcacatcgaagacccgatgctgatgaccgatatcccggctgcccggcgcgccctgctggccgaacggttccggcaggtgctgaccccgcccgaacgggtcaccgaatcggccgacggcacgaagaaatacctcttccgcacacaacagggagcctacatcgaatcggcctatattcccgacggcgacagggccacgctctgcgtctcgtcgcaggccgggtgccgcatggggtgtaaattctgcgccacggggcggcaggggctgcaacactcgcttacggcggccgaaatcctcaaccagatcgtctccctgcccgaacgcgacacgctgacgaacgtagttttcatgggcatgggcgaaccgctcgacaatacggacaacgtgctcagggcgctcgacatcctcacggcggagtggggcttcggctggtcgcccacgcgcatcacgctctccacggcaggcgtcgtccccgagttgcggcggttgctcgacagcacgaaggtgcacctggccgtgagcctgcacaaccccttccacgaggagcgggcagccatcatgcccgtcgaacgggcatggccggtcgccgaggtcgcggcaatcctgcgccgatacgacttcacgcaccaacgccgcgtatcgttcgaatacatcgtcatgagcggactgaacgactcgccgcggcatatccgcgaactatgccgcctgctggacggcatcaagtgccgcatcaacctgatccggttccataaaatccccgggtcaccctatttctcgccggacgacgcggccatggtacgtttgcgcgacacgctgacggccaagggcatacaaaccacgatccgggcttcgcgaggcgaggacatccaggcggcctgcgggctgctgagcacttcggcgctcgaaggcgggcaatagagcacggttcttgcacgttatacggaaaacgaatccgcatgaaaaaactgatcttcatactgatgctggcactcgcagcgggcgccgcacaggcacaggtaaaattcgaaacaaaatcgaccgacgccgtccgggagatggcggtcaaaaccgggaaactggtcttcatcgacctctacgccacgtggtgtccgccctgccgcacgatggaacgggaggttttctcacgcaaggacgtgggggatttcatggaacggcatttcgtggccgccaaatacgacgtggacaaaaccacgggcaaggaactgctcaaacgctacggaagcggggcgatcccgctctacctggtcttcgacacgcagggcgaactgctggggcgcatacagggggcggccaagcccgacaaattcatggccgacctgcaaacgatcctcgacagacagcagcccaaacagggaaagtaatcacctgggctcatgcatcgtctggcggcgccgccagacgatgcacgagccagagattgaccgcggcgacggcacatcccgccatcccgcataacacgaactcccggagcgaaaaggcccgggagtttatcatgatgcacagtccccggccacagcaggccaggcacggcagcgacgtcgcaatgacggggacatagcgtcccacggcagcccactgcccgagatggatcagcaggtgcatcccgaacgcaaggaacagggccagccacggataataacagccggcaagggccgcacaggccgttcccgccaccagcaaaaccagttcttcggcagccatggcggcaaaccgcaagggggggggagatcccgtcgaaatgcaggagcatgcggcgggcgagctgcgggaaacgccgcgccagccactcccggttgcggcgaagccacggcgaaagaaagagcacctcctcggcatcgtggagcaggaacatcgcgggcagcgacc

SEQ ID NO: 316 - DNA, 77348 bp, Alistipes onderdonkii
  source 1..77348: mol_type = genomic DNA
tccgccgcaacaacaccccaaacatccatccaaatgacattcacacaaattccgccggagtacgccccgctcggcgggaaactccgctacaccgtcaccacgccggaaaccgccaccctcgacctgcgcatcgcggatgcggggaacggcacgctgatcggcgccaaacgcttcgccggagtcacgtccgcctcgttcgatgccgccccctacctgcggcgcaccgtcgcgttcgtcccgacgaccggaagcacgggattccgcatggcagacgggcgtaccgtgacggcctacatcgaggcccaagcggcacaggcaaccgggacggccccgaccgtccactccccgctgcggacgttcctcccctgccggacaaacgtaacggcacccgccctgctgacctcgatgccgctcgtccgcctgatctcgcacggccagagcgacgaactgacgctcttctcggacgaagccgtcacggtaaccgtcacggcacaatcggggacgaccacgaccgccgaaagctaccgcacggccacgggaggattgcatgttttccggctcgacacgcgcgacttccccgaagccgaaacactgaccgtagacgccggagcctgcggctcggtcgcctacacggtcatctccgcccccaccggagcccggcggctggcctggcgcagcagcgcgggagggatcgaacattacaccttcccggtcgaaaagtcggagtccgtcgaaacaatcaggcaacgggcatacggagccgaagggcatctggtcgcccgaacccgtaccgaacggcgaacggtgctcgtgtcggcctacgaaccccgggcggccctcgaagggctttccgaagtcctctcctcgcccgacgtctggctggcggaggacgacggctacacggcggtcgacgtcgttacggaaaagagcgtcctgcaccggcatggcgccgtgacctgcctcgaaatcgaaatccgtcccaaacgtaaaaccgggatgccatggaactgacgatcgactcgaagccctgcgacctggccggggagcccatcaccgtcgggggttacgccgccgcggaactcgcagacgtggaggccgcacgggaaggccggtcgcaggagttcacgctccccgcgacgccccgtaacgaggcgcttctgggattcgcccgcgacccgcatacctcagggcggttcaacgcctcgctccacagggctgtgctctcggccgaaggggcgaagttgctggccgggacggtacggctgctcaaggtttcggacgaagggtaccggatcgaaattcgcgaaggcggtgcccgctgggcgaaaaatgccgcccgacgggtgttcagcgccctgggcatcgattatcatgcgcgcctgctcccgtcgaccgtctcggccagctggacggacgattcgcccgtaaagtttttcccgatccgccgcgacgaatacccgcaacaaaacagcccgtcggatctgctgccggccgaaaggatcctctcggtggacgactaccatcccttcctgcacgtggcgacgctcgtcgagacgatcttcgcagaggccggctaccgcatcgaaagcaatttcacgagcagtccggagttccgctcgctttacatgagcggtgcctacccgtcgcgcgacacggcggcgcttgctgcgcggatgggcttctacgcccgcaggctggctccggccaccgcacagggcaaccacctggggcgggtgtcggccaacccgagcacaacggccaacagcgtgggcaacatcgtcgaaacggctacgccgcagacgcttgacaccgacggggagccgattcccgaactttgcaacaacggcaactgcttcgggttcgacaaggggcgcatcgtcttcacccccacgaccgaagtgagtgcgggcttcgaatactacctgaaatacaccaccgaccaccgtatcctgacgcgtgagcggctccggggattcgactcggtttacctcgggacgggcgccgacatgcccttcacgctggcgaaccgatatgaagaccgccggccggacatctctcccgggcaccgttacctggctatcgtgttcgaccacaccgacggggcgcagtaccgcctggcctacacgaaggatggagtggcagaggctctctggacggagttttcggcgcgcacggcgcaggtcacgaccccggcctcgggcaccgtcgccgaccccgtgttgctcatccgcagcggcacccgctgggtacgctatgcgggcgactgggcgctgtacgacggatacgtcaccgaatcgggacggacgaccgtcgagctgcgggtacgaaccgccccggaacgcatcgcccccgcatcgcccaaattcttcgaccggatttatttctacggcgcagaggagggaatgtcgctcacgctccacaaggagtgttcactccgaccgcggttctcgtcggcaccgggctacggctccgcaatcactttcgccgacgtcgcccggcatcctatccggcagtcggcactgctcgaagcgctgcaacacctcttcaacctgaggttccacaccgaggaggagaccaagaccgtccgcatcgaacccgccgacgaatttttcggcagcggaaccacggccgactggcgcgacaggagcgatttctcgcagcctgtggtgctggccgacatcgcccccgaaatacacgaaagccgcacatggggctaccaggaaggcgacggcgccgtgaaccgtttcaatgccggagccgggagccccttcggggagtggagcgtccgcaccgattcctatgccgcacgagagggcgaccaagtattgcgcaaccccctcttccggcccacgctcagcgaggcagggcactatgccaacgccccctcggcgcagatcatgcaggtcggcgaccgggatgacgtgcaggaggacggcaccaacttcacgccccgtatcgtgcgcttcgccgggctgcacccgctgcccgcgggcgaacgctgggggtatccttcggggctggcggaatacccgctcgcggcattccacttcacgggggacgcagcgacggagggcttcacgctctgtttcgaagaccgcgacggcatccgcggcctgcaccatcgctacgaccgtcaggcagcacaggaagccacctgccagcgcatcaccctctcgctgcggctcgcgccgcacgaattcgaaagcctcttcacgcccggcaccgggatgcccgacctgcgttcggtattccggctcgacaccgggggcgaggaaatccgcgccacgctccatgctatagaaagctacgacccgcaggcggcatcggccagatgcaccttcacacgcttgagcgaaggatgatgacacggcacgaaaaacggctcgccgaagtgttgctcgacgcaataggcggcctagaaggggaacaggccgtcgaacggctgttcggattgggactggtcaacctacgggcctgcgaacagcgggccgtacgggcacggatcgaccggctggcagaggaaggcgcaccccgctgcgaggccatgcacgtcacggccgacgaattctgctgctcctacgaaaaggtgcgcagctactattacaacacgtacaaatcctgaaacatgaaatcggaaatccaaatcaaaaacagcgccggcgtctgccgcatcgagatcgaaggtaccatcggcgtaccggaagagtggcagttcgaccagcccgaagcgcgcgtcgcaacctacgagaagttccgcgacacggtgcggcgcatcgccgggatcgacgccccgcagatcgtggtcgacatccgttcgacgggcggcgacgtcaacgacgcactcctgatccacgacgcactatgctcgctcgatgcgcacatcaccacccgctgttacggttacacggcctcggcggcgacgatcatcgcacaggccgcatcgcccggctgccgcgaaatctcggccaacgccctctacctgatccacacggccatctgtgccgccgaaggaaacgctgcagaaatagcggggaaactcgacctgctccgccagaccgacacgcgcatcgccgcggtctatgccgcccgttccggccgcccgaccggggagttcgaggcgctgatggccgaaaacaacggcaacggccgctggctgtcgcccgaagaggccgtcgcagcagggctcgccgacacggtgaccgacaacggggagcgcacggcgccctcgctggcggggaatatcgcccgcggctgggagcggctgctcgcaggtatcgggctcaaccgccgcgaggagcttcccgccgaccgcaatgtactgctcaccgcgggagaacggcaggagttgctgcgccgctcggccacggccatacggcaagcgcagcagaacgcctcgcccacctgcaccaaaccgcgcgaagacccgtcgtacggcgacacggtgcggacggcgaaccaacgcgcctacgccgaagacgtcaaacgcttcaaaggcatctgacattcacacacgacataacccaacaccaaaaacaaatcagccatgagtttcttagaaagtgcaaaacagtacaccggttccgacctcgaaaccatctttttccgcccgatcctgagcggcgactccgcccgcgaactgggcgtgcgggtactctataacatgcccgtacccacgaccatccagctctgggacggacagcgcaacgtcctccagaaatactccgccgccggatggacgggcggcaacgcagcgaccaagctgcaaaagaccatcagcctgggacgcgtgaaggccgaactgggattttcggccgccgactatttctcgctggtctatgaaaagatcgccgcacgcgccgacgtcaacatggacgacctgacgggcaccgaactcgaacaggccgagacggcactcttcaaacaggccgtcgccgaaagcatccgcgccacgatgtgggtgggcgacacctcggcggcatcgggttacaacaccttcgacgggttcctcaagaccgtgaaggccggagccatgcaggagaagttctacaactcgatctgccaggctgaggatttctccgatcccgagaaggtagtcgccgtcctcgacgacctctggatgaacgccgacgagcgtgtcaaggacatgaaggccgacgggcagctcgccttcttcgtcacgtccgacatctactacgctttcgagaaatacctcgacggcaagagtgccgatgccgcctacatggcgaccacagaaggccgtccgagcctcgcctaccacggcataccgctcgtggacgtgcgtctgggctcctacctcaccggcacgtcgctgcacaagtcgttctgcctgctgaccgaccgccgcaacctggtactggcggtcaacacggccgatttccccggcaacgaagtgcgcatgtggtacaaccccgacctgatggaaaaccgccagcgtgccgtcttcatggccgggtgcgacgtactcgacgagactctgatgacctacgcctacaacccggcataacgatggcagcctccacaccccgcaaaccggctgggggcgtcgcagccgtcacggtcacccccgcaggaaacctcctgcgggcggcggtggcggcggacgggcgcgccgaagcgattttccgtgacgcgacgcagctcaccgccctgccgctcgccgaacaacgctcgtcctatgccgaacggctcgacaccgacgccgggccacagcgcgtgcgccacacgctcacgctggtcgtgggccgcgaggcgttccgcaaggctttcaccccggcactccgccgtgcggccgagaccgaagggctcatagccctggtcacgatggcctcgggcgagcggctgctggcgggatggtcggcacgcttcggcacctcgcaacccctgcgcccggactccttcgccatggagtcgggcatcaaacccctcgacggcacgccggccgtcctgacgcttgcgagcgaggacaccgacccggccgccgagctcaaagaacaagaagcatgagcagaaaacagaaattcaagccggccgtagcggtcgccaaccgtgcggacgacccatatatcacatcgggcgcggggagcgtccaaagcgacaagttctggcgctggggtgacgacaatctctttcccaatgccctggcgctgatggcccggcgttcggtcacgcaccgccgcatcatcaacgacaaggccgactacatctcgggcaaggggttctcctgcgacgaggggcatgaacccctgctcgcagccttcatccgacgtgtgaacagcgacggggagagcctgcggcaggtgctcaacaagctggccttcgacaaggccctgttcggcaacgccttcctcgaaatagtgaccgacgcggaacactcgttcctcgcgttccaccaccaggacgcttcgcgctgccgtgtggcccgcgattcggcgcacatcctcctgcaccacgactgggcggccttcaacgccgccgaggcacggacgctgcccctctacccggccttcgaacggcaggaggacggcacgctgcgggccatgatccactacaaggactacgaaccgatgttcgagcactacggcgtaccgccctatatcgccgggttcaacgtctcggccatcgcctacaagaccgacaaatggaacatctcgcggctcgacaactcgttccagctctcgggcgtgatgatgctcgacagcaccgtggacaacgaatccgaagccgagcgcatcgtacggctggccgaacagaaattcgcaggcaaccccgggcaggtgatgttcgtcatccgcgacggcggcgagggcgacaattcacgcttcatccctatcgcgtcgcagaacgaaggcgactggcaggcgctgcacgaacaggccgtgtcggacatcgtcgtggcacactcatggttccggacgctgagcggactgaactacgcctcgggattcagcgccgagcgcatcctgcacgagtacgaagtggcgctcaacacggtcatccttggcgagcaggccgaactgacggagcccgtgcgcgaggcgatcacgtccatcctggggatagacgcctcgtcgttacaggtcatcaaccgtccgccgacgcgctccaaacccatctacatgaaggtctgggaagcccgcaaggccgacgggctggattacgacctcgatgacgagcgccaacaggcgttcctgtcggagatcacgaaatacaacatacgaagcatagaataaggccggttctccgggtctttcgaaacttgccgttcgccgcctctggcggcactcggacactcatttcaaccacgacaatcatgaacacactgatcacccccgcacaagccgtcgcattggcctttacggacggggagtaccttgcgccggaagccatcggcgaaggcgacatcgcagcggccgaacaacgctacatcgtgcccgtcatcggacgggcattccacgaaaaactgctcgcaggcctccatgccggcttcacggccgaatacctcgcagccccggtagcgctcttcacccgcatcgccgtacagccgcggctcgacatccgcaccggacagtgcggcaccgtagcccccaaatcgggttcctaccagccggcggatgcccagtcgctgcgcgaactgcaacgcagcctgcgccgccaggcccgcacactcctgcgccgcgctgcggaatacatcgaagcacatgccgcggaatttcccgaatacgatcccgataacaacatcctcaaacgctgcacgaccgatggaaaccttatacagactcgttagcgggctcacggcaggcttcatcgccctgttcgcccccataggcccgctggtggcatgtgccatggcgttcatcggcatcgacttcctctcgggcgtagccgccagccgcgccgctgcccgccgcaaagggcacacctggtatttcgaaagctgcgaggcctggcgcacggtgctcaaactgggacttacggtcacggccatcgccatggcctggctgatagacagctgtatcctcgacttcatgcagctgaacgtggcccggctcttcacgggcttcacctgcggcgtggagctgtggtcgttcctcgaaaatgccgcacagctctccgatgcaccgctgttccattggctgcgccgctatgtccgccgccgtatccgaaaggaggcgggcgatgagtaggggactgcaaaactgcaacccgggcaatatccgccagtcgaaggtgcgctacaaaggcgaagtgcgcccctcgcgcgacccggcgttcaaacagttcgagtcccttgcatggggctaccgcgcgatattcgtactgcttgacacctaccggatacgctacgggctcgacacgatccggggcatgatttcgcggtgggcgccgccttcggaaaaccacaccgaaacctacatccgcgccgtggccgacgccgtcggaatcccggacgggcaaccgctcgacacccgcgaccgcacgacgatgctacgcatggcagccgctatttcacgcgtggaaaacggcgccgcggccgatatgggcgaggtggaactggggtgggaactgttcgtccgcgacaagcccgcatccggctgacccgcccggcgggcgacgaaaggaaacagtaaacggaggcgggttgcgaggatccgcaaagagccggcagccaacaaaaaccgggacacccacccgaatatcgcacgaaacaatccgaatttactatatttgcagagatgaaagccgcctccctgtccgcacgactcgaccgtatgccgatggtaaaagccgtcgcaccgttcgccgcggggattctcgccgcggactgcttcacactgcccctgtggttcctcgcaggggcttttttgctgtccgggacactggcgctgttgctgcactcacagtccggcgcactcgtaatgctgctcacggccggattcgccgcctcgcagctccgcgacacggcgcacacgctgccccgcggtatatacacgacttacgaacttaccgtcgagggtatcccctccgaccgcggacgttacacctcggccgaagcgacggccgtagcgtggcgcgacccttcacacggaacctggcacgcctcgggtgaccgtataatgctctatgccgacagccttacggccctctaccccggcgagagaatccgctgccggggttcggtgcggccgtttcgcggcggagcggaaagttaccgccggctgatggcacgccgggggttctccggaacgttgtggctgtcggagcgcaccctcattgagcgcctgcccggacgaagcagcgccctgcacctgcacgccgtcgagcggatgcaacggatcgggatgcgggacgatgcgggcgccgtctgccgcgccatggtcacgggcgaccggagcggcatcacgcaggagttgcgcacggcctattcgcgcagcgggctgtcgcacctgctggccgtctcgggactgcacacgggcatcgtcttcgcactggtcaacctcatgctgtggtggctgccgctgctgcaccgcgggcacctggtgcgcaacctgctcgcaacggtctgcatctggctgttcgtcgcggcggccggattcccgcccagcgccgtgcgggcggccgtgatgtgcacgatgctccagttcgcactggcctcggcgtcggagtacgtcgcactcaacgcactggcggccgccggcttcgggatgctgctgtggaaccccgcctggctgggcgacatcagtttccaactctcgttcatcgccgtcgcggccatcctcgcctggggcgtgccgctctgccgactgctccatacccgccggcgggcgctcaacctgctcacggacgccctcgtcatcagcctcgtggcgggcatcgccacggcacccctcgtatcgcacaccttcggcacagtcccgctggcggggctgctcgtcaatcccgtggcgatcctcgtgggaagcatcgtcgtgctaggcggcaccgtctggatgatccttcccgtaaactggctcgccccggccttcgacgccgtgctttcgggcacggccggcctactcaacacgctggcccgagctgccgcggcgttcccgggcggatatgccgaatacaccctcggcggcggggcgacggcgggcatctacctgttttttctgctcaccaccctggctgcatggtctttcgagccgaaaaaaagcgtacatttgccggcatgataacccccggggaatatacgctgctgctgacggacgaagtgcagcgggccatcgccgccaaccgcggccgcgacccgctgaaggtggccttagaccgcaacacaccccacgcccggctggtcgccacgcaggtcaagtacctcgcgcgggcagaggcgaaactcccctcgtacgccgccgcacagtgcatcctgccgccgctggcgttcgaacaggcatcgagcgaagcctgcgccgcccacaagcagatcgcgggcggggccgttctcgacctcacctgcgggctgggcgccgacgcctttttcctggcgcgccgtttccgccgtgtggtggcactcgaacgcgaccagacgctcgcccgcatcgccgcggagaacttccggcggctcggcgccgcgaacatcgaggtcgtcaacacctccgccgaagcatacctcgcacagcccggactgcatttcgactgggtctatgccgaccccgaccgccgttcgggcgacggacgcaaactggtacggctcgaggattgttcgcccgacatactctccctgatgccgctcatcggcagggcttcgggacgactgtgcgtcaaaaactccccgctgttcgacatcggcgaggcgctgcggctcttccccggcgcccgcgtagaggccgtatcgctgggcgacgaatgcaaggaggtcgtcatctacgccgacggcacgggccccggcattaccgcgaccgccctcggacgcggctcgttcacggcaacgcccgcccaagccggcgcacccccgcacccgggggcgttcgaaccggatcgttaccggtggctcgtggtacccgacgtggcgttgcagaaagcgcggctggcacggctgcacctgcgcggcaaagccgacatatggagcgaaaacgggtatggtttcgccacggagcggccagaggggataattggcaaagtattcgcaatcgaacgtatcgagccctacgaccctcggcggctgaaacgcgcgctcaaaggctgcggcgcggagttgatgaaaagggacttcccgttcgccgcggaggagctggcacggcggctgggcgtacatgccggcaacgacgtacggctggccttcacgaaaatcgggagcggtttttgggttgtacggctggaatagctatatttgcacgactgggacagcgtccgccccgacggcacaccggcctcggcacggcgcctccgggttacgggaacggaaacggcttatgaaaatcagcgaaatattcacctattttacggacacgatcttccggcgcgacatccgcgaatggcgcaacccggtgatccgctggctcgtgcagcaataccggctgctgttctacacggcgcggggcctgctcgaacacggcaccatcgtccgcagcgcggcactcacgttctacacgctgatgtcgctggtaccgatcgtcgcggtagtcttcgccgtcgtcaagggcttcgggctggccgacgggctggtggaaaacctctacgccctcttcccgcagaaccccgagatcgtagactacatcgtcacgttcgccgaaaaggcgctcgcccgtacacagggcggcgtggtggccgccgtggcgctggtcatgctcttctgggcggtgatccgggtcttcggctcgatcgaaagcgccttcaacaacatctgggaggtcaaggtcgatcgcagcctcacccgccagtataccgactacatcgccgtggtgatgatcgtgccggtgctgtgggtcgttgccaatgccgtcggcaaattcgcccagcagatgctgggcttcgacggcagctggtatttcaccctgctctcgcacctggcttcaatggtcatcatctggatcatgttcaccatcctgtatatcatcatccccaatacgaaggtcaaattcaggagcgccctgatggcgggcatcgtcgccggcacgcttttcctgcttttccagtggggatacctctacatccagcggtggatgacctcctacaacgccatctacggcagtttcgcagcgctaccgctgttgcttatctggctccagacctcgtggcagatcctgctgttcggcggcgaattgtcgttcgcctaccagaacatcgcccgtttcggcgaagagcgcgaatcgctgctcatcagctacgaccagcggcgcaagatcctgctggccgtgatgctcacggtcgtgcggcgcttccgcggccagggcggcgccaccccggccgacgagatccgggcacaactggatctgcccacgcgcatcgtcaacgacatcctttaccagctcgtgcaggccggacaactgatcgccgtgccctcgggcgacggcgagcgcgaagtggccttcgccccggcgcacgacccccagtcgatgaccgtttacggcatactcgaagcggtcgaaaaatcggggcaaacgaccgtcgacctgacccagagcgccgaactgacccgcatcgaccaagaactggaaacgctcaaagagaccgcccgcaaatcgcaggacaacgtccggctggtggatttactgtaaaacgatatggagagacctttggaacgcgtagtgatcgtcggcagcggaaaccttgccgaagcattggcacaggccgtcgcccgaagcggcctgcaactggtacagttgttcgcccgcaacgccgcacggggggaggctgtcgccgcactcgccggaacgcagtggacggcagacccggcacggctggccgacgcggacatatacctgatctcggtaagcgacaaggccgtcggggaggtagccgcggcgctgcccctgcctgcaggagccgtcgtcgcccatactgcggggagcgtgccgctcgatgcgcttcccgcccacgcacgccgcgccgtcttctatccgttgcaaaccttcaccaaagggcgcagcgtggatttttcgcaaatccccctcttcctcgaaaccgatgacgaatccctgcgtcccgcactcgaagccttcgcccgccgtctttcgcacacggtggtgtgggccgactcggcctgccgcgccaaggtgcacctcgcggcggttttcgcctgcaacttcgtcaaccacatgtacgccgtcggcgaaggcatcgtccgcagcgcgggcctgcccttcgacgttctcaaaccgctcctggccgagaccgccgccaaggcactcgacgccgcctccccggccgacgtgcagacaggccccgccgtgcgcaacgacctgcccacgatggtacgccaccgtgcactgctcgccgccgacccccgactcgaaaacatctactcgataataagtaacaacatatgggaaatttcaaagaagatatagcccgcaccgaggcgtttatcttcgacgtggacggcgtgatgaccgacggtggcatcatccccacgctcgacggcgatttcatccgccgctacaatgccaaggacggctatgcgctgggctacgccgtcaagatgggctacaaggtctgcatcatcaccggcggacgcggcaagacgctcgaaaaccgcctgcggatgctgggtatcaaccgctactacaccgactgcatggacaaaatcacggccatgcgggaatatttcgccgacgagggcatcgaccccgcgcatgcgatctacatgggcgacgacatccccgatctggagtgcatgcgcgaggtgggcatcccggtctgcccggccgacgccgcggccgaagtgatcgaggcttcgcgttacgtctcggagttccggggcggcgaaggggccgtgcgcgacattgtcgagcaggtgctccgcgcccgcggcgactgggcgaaaaactccgagggcgtcaccccgtcgtcgctggcggcgtcgcggtaaacccgctccgaaaaggccacgaaaaagccgggcttcgcaggaagcccggcttttccatatactgcctaaaggcacctattgcatccattccacgtccgtcgcgtcgcggaacagaatgttgagcggtcgcgccatgctctcggcattcgcggcgaagatgaaccgcactttatcgaggggcaccgtcaggaacaccgtcgaggggtagccgccgatcatgtccacgcggtcgatcagcgcccacacgaatatctcgaacggcatttggccgggcagcagcgttaaccccgggaactcggtctcgtaaccggccgacgaggtatcggcggggtggggcttgaagaagatgtcatacccctcgccgtactgctccacgatccgtgcgacatagtcgcgctgttgccgtgcgctctcctcgctcccgtggctggtaccgatgatgaccaggttctttttcggggaagcgtcgaacagggccgcgaattcgtcgtaatcgaatcccgccatgtcgtaaaaccgcttacgggcggactcgggcaacgccgaaagcatctcgtaaggctggatactttcgatctccatctccccgagcttttcggtgatgaacggacaggaactttccagcagcgaaccgtcctgcaccaccagccggtagtcggggcgggtggaaaggtaatagggccacgtatagctttcgaactcgggcagtgaacgggtctcgggataacgtccgccgtggttccagtcgagtgcctctacctcggcggcataggtatcccagttctgttcggccgtcgccgcgtcgccgaagtagttgtagaaattgttataagttcccgtaccgtcggaaagcatactcaccttgacccgtgccgagtcgatcccctgcgccacgaaccagtcgtaaccgatccggcagcggaggtcgtccacatagaggccgaagacggccgtcgggtcggcgctgttgatctccaggatacggcgcttcatttcgcgcgccattgcttccatttcggcctgcgtggcatcggccgttcggtctgcggcggtcgtaacctcggcacgccccgggaactccgccggatcgaacgtcctggagcgcgaatagaatacgtagctgggcttgtcgtgcgagagcaggtgaatgcccgcatacagggtaggcatcgtcccgaacgtcacgtagaaataataatcgggggagtcatagccggccgacagggctccctgcgacaggcggaagggtacgatcgcatccccgcatgcaaaggcgagctgggcgctgcgtgcggcacccggattctcggcgaggctcagttcgacctcggaatatcccgcagggccctcggtcgcggaaagcgtgaaccacgtgtctcccgcagccttcgtcacacgccacggggcgggagccagcacggaaatcttgcctgcgcgggccagtccgtcgagcgacaggaaatgttccccgccgttgattacgatcaggttctgcgatgcttcgtcatcactgcacgccgcggtgcccgaaaacagcgccaggcaaaggaagagccggaataattttttcataaggcgaattgttttatgatactgcctatataaacgccgcgaatcccgttttactgcgttcccgcggaaaataacagtaaaatttaagccgcacgggttgtctccgtgcggctttgtcattgaaaacgaggagttagccgtttcttttcttcttgatccggtcgaaatgcccgcggatgtgctcgcggaataactcccgccggtatttcagatcggcctgccaacccagccagcgggtatagcgctcgcgcttttcaggataaatatcgcgtatggtcaccaggatgcccgtctcctccacgccgccgaaatcggggttcgacaccgtatcgaagacccgcatcgtgggcgaaaggttcatataggcatttatcagcggcggtatattctcgttgaactcgcggatcttctggatcagtatccggtagttctcctgataggtacgccccgtgaaaagctgttcgtaataggggtcgtcgaggtcgagcttcaacggatggataccctccacgaggttctcgcggtcggggaaatagcggcgcaggaaccagatcagcgcattgcgcgccacggccttgtaggtcgtatacatcgtcaccttgccgaaaaggtatttcgcattcggatccagcacgatcagcgccccgaggccgtcccaaaggttatccagcgcatagatgctcttggcgttgccgcgcgcctggtaggagggctgcacgaacgagcgtcccagctcgatggtgcggggcaggtacttgcgacgaaacttgtcgctgaaacggaaatagtgttcggtcgagaggtggcggggatattcgtccgtacagatgatgaaacggtagcctccaacgatctccccggccgccggatcccagacgatcagctggtaatacccgtcctcggccaggtcttcggcatcgatatccaccttccggcccgtaccgccgccggcgccgcggaacgcgatctcgcgcagccgtccgatttcacgcatcagcgccgggcactccgacgccgggaagatatagatctcgttcccggccttcttcgtgtcgcgcgctttgcgctcgggcgtaagctcggcgcggagcaattcccggtcgacgggaggtatgataggttccatttctcgtgcttgcataacttgggacaaaaataccgatttacccgttattttccgccgggaggagcatattttccaaaaaatacgcttttttacgtacgtagtccgcctggtcgcggagggcgccgtagcgttgcagctcggcgacggggatggggtcgcccacgaggatgcggaaatgcttgcccttctgcgaaaacatctcgtcggacaaccacagcatctcgatattgaatttcacgcccagcatccggcggatacggtcgacgcggtaaaagaagttcgacaaccgaccctcgacgaacaccggcacgatctggcgctgcgaggcataggctttcttcaggaaattggtcttccacggcaggtcggtcacctcgcccccgatgcagcgcgagcacagcccggcggggaaggtgaggatgggcagctcgccaaagaactcctcgtcgaacttgcgggcgtaaaggctgttctgcgaaccgtgtttgttgaccgggatccacagcgggcggaggggttcgaggtgcatcagcaggtcgttgaccaccacgcgcgcatcgccgaagcggtcgatcagcttgtcggccagcatcatgccgtccatccccccgaacgggtggttcgatgcgaaaagataacggcctttgggatcgagtttttcgagcccttcgaccgaataggtcacctgccattcgcggaaacaggcgcggatgaactcctgcggcggcaggttccagtaatgctcgaggatgtaattgatttccggctcatggatcgtacggcggagccagcggaggacgaacccgggaacccagcgggccaaccgcggggctttctcggcgagtaccgctccgatatctattctgggcatagggatgttcaaaaaattatatccgcaaatataggtattgtttttcgaaaaatccctaactttacacccaaatcgacctcatcggcaacgaatatgtctcagtaccatacacctgtgcttttggaagagtccgtcggtctgctcggcatcgaccccgcaggcacctatgtcgacctcactttcggcgggggcggccactcgcgccgtatcctcgaagaactggggcccgaagggcggctctatgccttcgaccaggatcgcgacacgctcgccaacgcccccgccgacggacggttccactacgtcgaaagcaatttccggttcctgcgcggagccctcaggctgcgcggggtgaccgaggcagacggcatactggccgacctgggagtctcgtcgcaccatttcgacgccgtggaacggggtttttcgttccggggcgaggcgccgctggacatgcgcatgaaccagcggggcgggctgacggcggcgaaggtcgtcaacagctacccggcccagacgctgacgcagctgctgggggactggggcgaactggacaccccgtggaaggtcgccaactgcatcgtccgggcgcgggaaacggcaccgattcaaaccacggcgcagctggtcgaggccgtccgtccctgcacgccgaagaaagacgagtcgaagttcctgaccaagctcttccaggcactccgcatcgaggtcaacggcgagatggaggcactcaaaatggcgctcgaacagagcctcagggtattgcgccccggcggacggctggtcgtcatctcctaccactcgctcgaagaccggctggtaaagaatttcctgcgcagcggcaatttcgcgggcgcggtggaaaaggatttctacggccgcgccctcacgccattcgaaatcctcacgcgcaaggcggtcgtcccctcggacgaagaactggaacgcaacccccggtcgcgctcggcgaagctgcgcgccgccgtaaaacgatgacccggccatgtatcccgaccacgaattcgaccccataacccccgaagaggaggcgcagcgcgcacaggaagcggaattcgcccgccgcgtgcggcgcgaggtactgcgcatcgaacggggcgaggccgaggaggagatccgcgccgacctggaacgcgaggcagcagaaaaggccgaagccgaggagcgcgaacgcagggagcgccgccgcagggccagcaccttctggcagcttttctcgggcacgatcctcgtacgcgaaggcgtgtcgaaatattacccctacatgctctcgatcgcgggcatgttcttcctgagcatcgccgtcatgttcacggcgctgcacctcgacatgaaatacacgcgcctcgaacgcgaagtccagatcctgcgcgaacggtcgatccgcctgcaggagcagcgttacagccgtacgacccactcggccatcgtcgagcggctgcgcgaacgcggcatcgacctcaatgacccctccgccccgggcgagatcatcgaaaactaaacggcgatgaaacaggagcgttcgaagatcaaaagcgacattctgctgcgggtacggctgctttacgtgctgttcatactcgcggggctcaccgtgttcgcacgcctggtctgggtacagcttttcagcgccgaagtggcctacaacgccgaccggctcgccagccgcatcttcaccgaagagaccatcccggcccagcggggcagcatcctctcgcgcaacggggcgccgctggcgacctcgatcttccgctaccaggcggccttcgacttcgcttcgcccggcctcgattcgctcaagaccttccgcgaacagagcgactcgctcgccaagctgctctccgccttcttcaaggacaaacccgcctcggaatacgcccgccgcttccgcgaggagcacgcccgccgctaccggctggtcaacggccgcgacacctcctacctgcgctccgaagggtggctgtcgcgcatgatggatcgcctgcggggcgaagagtacgtcacccggaaaatctacgacacgatccgcgaccacacacccgtcaacatcttcccccgcgaggtggactatgccgaatgggagaccctgcggcgttacccgatgctgaactggaacatgggcatggtctaccgcctcgtcgaacgcgaccagcgcatctacccgcagggcgaactggcgcgccgtacgatcgggctcacgggcgacaagggcaattacggcatcgaggaggcctaccgtgaggaactcgcgggacaggacggcaaggcgctgcggcagcgcatcgcccggggcttctacggccgcgtggcgggagccgggcatgaagacccggtggacgggtacgacatcgtgacgacactcgacctcgacctgcaggacgtggccgacaaagcgctgcggcgccagttggaagcccagaacgccatctggggcacgaccatcgtcatggaggtggagaccggcgagatactcgccatggccaacctgggccgctcgggttcctcgggcggcagctattacgaaagggagaactacgcgctgggacgcagcatggagcccggatcgaccttcaagctggcgacgatgctcacgctgctcgacgacgccggcatgtcgcccgagacgacctacgacacgcacaacggcgaccccgtgacggtcggcccggcccggaatatccgcgactcgcaccggggcgaccatgtcatcggcttccgccgcgccgtagcctcgtcgtcgaatgtctatttcgccaaggcgatctgggatcgctacggcatcacgggcaagaaacaggaatacagcaactttctgcacgaaaaactccacctgggcaagaccgtcgggctggaacggctcggcgaacgcgccccgtcgatcaccgccgactggaaagtacccgacccgggcgtcatgctcgtcaagatgagctacggctaccgcgtgcggctggcgccgatccagatgatcacgttctacaacgccatcgccaacggcgggaagatgatctcgcccgtgctgatccgcgaactgcggcgcggcgaccgcgtcgaggagcggttcgagacgcagaccatcgcctcgtcgatctgctcgcgcgcggcattgcgcgaggtgcagcgctgcctcgaactggtctgcacacaaggtaccgcaagcctctatttcaaggactccacgcgcctgcgcgtggctgccaagaccggcacggcgcagatcaccgacgcccgcagccgcgagggacgctattacctcggttcgatggtcgcctatttcccggccgacaatccccgctatacggtgctgacgaccatcgaaacccgggcgcaaccgggcaaagcctactacggcgggccgctggcgggccccgtggtcaaacggatggtcgattacatttacaaccgcaaccgcgactggtacggccgcgtggaacggcacggcggccgctgctacccggggcacgtcaagggcggcgacatcgcccagatccgccgcgtggccgacaagttctcgccccgcgcctcgttcgaccaacgtacgggctgggggcgcgcccgggtcgacagcctctcgaacgtaatcatcacgagcctcccgcccgaaacagggacgatgcccgacgtgcgcggcatggggctcaaggatgcactgttcgtactcgaaagccgcgggctgaaagtccgtttttcgggcgcgggcgccgtaacacagcaaagtatccccgccggagcccgcatcacgcctggctcgacggtcggcataacactgaaataagatgaaaacactgaaagacctactcaaagatacgcccgtcacggcgctgcacggcgacggttccacgacggtggccgccctggcctacgattcgcgggccgtgacgcggggcgactgttttttcgccacccgcggcacgcagtccgacgggcacgacttcatccccgacgccgtcgcaaaaggcgcctcggccgtcgtctgcgagcagttgcctgcggagacggcccacggggtggcctacgtcgtcgtccccgacgccgcaggagcgctggccgacatggccgcagccttctacggccacccgagccgcgaactaaaactcgtgggcatcaccggcaccaacggcaagaccacgaccgcaacattgctctacgacctggtgcgggcactgggctacaaggccgggctggtctcgacggtcgtctacaaggtcggcgaacgcatcgtcgaggcgacccacaccacgcccgaccccgtgcggctgaacgccatgatgcgcgagatggccgacgaagagtgcgaatactgcttcatagagtgttcgtcgcatgccattgtgcagcaacgcacgcgggggctgcatttcgcaggcggcatcttctcgaacatcacccacgaccacctcgactaccacaagaccttcgccgaatacatccgcgccaaaaaactcttcttcgactccctcgccaaggatgccttcgccctgacgaacgccgacgacaagaacggccgcgtcatggtgcaaaacaccgcagccgggatacacacctattcactgcgcacgatggccgatttccgctgcaagatcgtcgagatgcacgtcaacggcatgctgctgcgcatcgacgggcaggaagtatgggttgggctcgtaggacgcttcaacgcctataacctgctggccgtctacggcgccgcggtgctgctgggactcgaccgcgccgaagtgctgcgcgcgatgagcatgctccatgccgtgagcgggcgcttcgaattcgtgcgggcggagaatggaaccacggccatcgtcgactatgcgcatacgcccgacgcactggaaaacgtcatccagaccatccaggagatccgcaccccgacgcaacaattgatcgtcgtctgcggctgcggcggcgaccgcgaccgcaccaaacggcccgagatggcgcagatcgcggtgaaatacgccgatacggccatcttcacctcggacaacccgcgccacgagtcgcccggggcgatcctcgacgagatggccgccggcctcgaccccggcgcccggttcctgcgcatcgtcgaccgtgccgaggccatccgcaccgccgcaatgctctcccggccgggcgacatcctgctcatcgcgggcaaagggcacgaaacctatcagatcatcggcgacgtaaaacaccacttcgacgacaaggaggaggtcggcaaagccttcggcacactcagaaactaaaaacccgacatacgacatgttctatcacattttcaagtatttaggcgaatattacgacatcccgggctcgggtatgttccagtatatttcgttccgcgcggcggcggccatcatcctcgcgctgctgatcgtcatcatcttcggccgcaagatcatcgacttcctgcgccgcaagcagatcggcgaggacatccgcgacctcgggctcgagggacagctccagaaacgcggcacccccacgatgggcggcgtcatcatcctgctggcgatcctcgtcccgatcctgctcttcgggcggctcgacaacatctacatccagctgatgatcgtctcaaccgtctggctagggctgatcggcgggctggacgactacatcaaggtcttccgccacaacaaggaggggctcaagggccgcttcaagatcgtgggccaggtcgggctgggcatcatcgtcggcacgacgatgtggctttcgccccagatcatcgtccgcgagaaggtcacgcagcccgtgcagaccgtctatctgaaccccgacggatcggtgatcgaaagcgtgcagcggaacgtcgtcctgagctcggaaagcaccaagaccaccaaaaccaccatccccttcgtcaagaacaacgaattcgactacggatggctcacgggcgaggacagcgccacgacctggctgctctacgtgctggtggcgatcttcgtcgtcacggccgtctcgaacggcgccaacctcaccgacggcctcgacgggctggccacgggcgtctccgtcccgatcgtggccgtactcggcgtgctggcttacctctcgggacatatcgtctacgccgactacctcaacatcatgtatatccccgacagcggagagctggtcgtcttcgcggcggccttcgcgggcgcgctggtcggcttcctgtggtacaactccttcccagcgcagatcttcatgggggacaccggctccctgtcgatcggcggcatcatcgccgtcttcgccctctgcatccgcaaagaactgctgctgccgctgctgtgcggcgtgttcctggtcgagagtttctcggtgatgatgcaggtcggctacttcaaatacaccaaacgcaaatacggcgaagggcagcgcctgttgctgatggcccccgtacaccatcatttccagaaaaaagggcagttcgaaaccaagatcgtgctccgcttctggatcatctcgctgctgctggccgccatcaccctggtaacgttaaagatccggtaatcatgaaaaagatagcagtcctgggcggaggcatcagcggttacggctccgcgatcctcgccaaaaagaaagggttcgacgtattcctctccgatatggggaagatcgccgaccgctacaaagccaagctagacgagtggcaggttccctacgaggaaggcggccacaccgaggaacgcatccttgcggcacacgaggtcgtcaagtcgccagggatccccgaaacggcccccatagtgcggaaaatccgtgcggcaggcattcccgtcatttcggaaatggagttcgcgggccgttacctgggccggtcgaaatgcatctgcatcaccggctcgaacggcaagaccactaccacgtcgctcgtctacaagatcatgcgcgacgccgggatgaacgccgccctgggcggcaacatcggcgagagtttcgcctactcggtggccacgggcaactacgactggtacgtgctggagctcagctctttccagttggacggcatgtataaattccgcgcccatatcggcgtgctgatgaacatcacgcccgaccacctcgaccgctacggacactgtttccaaaactatgtcgattcgaaaatgcgcatcacgcagaaccagaactcgcgcgattatttcgtctattcgggcgacgacgaggtgatctggcagcagcttcccaggtacgacctgcgcatgaagcaacttcccttcgccgcaaagaatgccgtggcgagcggtgccggcgacgccttcctctgcaacggcaaattcacggcggccgtcgggaaggcctcggtcgagatcgacacggccaagatgcagctcaaagggctgcacaatgcctataacgccatggccgcggctcttgcaacccttgcggcaggcgtcgcgccggcctcgatccgccgctcgatctacggcttcgcccccgtctgccaccgtctcgaacccgtccgggaaagcggcggcgtactgtggatcaacgattccaaggccaccaatgtcgactcggtatactatgcgctcgaaagcatgacgcgccccgtggtatggatcgccgggggcacggacaaaggcaacgactacgaaccgctgaaggctttcgcccgtacgaaggtacatacgctcgtctgcatgggcgcggacaacaccaagttgatcgaagagttcacgggtgtggtgcccgatgtggtatccaccggctcgctcgacgccgcgatggaggccgccaaagccgccgcacagcccggtgacgcagtgctgctctcgcccgcctgcgcgagtttcgacctcttcaaaaactacgaaaaccgcggcgagctgttcaaggcgtgggtaaacgaaaaggcatagcacgatgaagctcggcgaacggaaatacacgcaggacgaagggccggcgcaggagccctggacggaagcgcccggaaaatccccccgcgcagcggacgggaagaccggggcgcaggacgcgccccgacgccgcggcgtgcgcggcaccgataccggggagagcgcctgcgaaacccccgaagcccccgaaaaacacaagttccggctctttaccggcgaccgcgtcctgtggatcatcgtcgcggcgctggcggtgatttccgtgctggtggtctactcgtcgacggccaagatggcctacgacgcccacacggcgcgtaccacagcccatttcctgcgccagcaactcatcatcctcgtcgtcagcctcatcatcatggtcgccgtgcagaagatcaactgccggatttacaacctgttctcccgccccgtctatttcctttcgatcgcactcaccgtcgccgtctatttcatcggcgccacgaccaacggcgccgcccgctggatacccctcgggccgttccagttccagccctccgaggcgctgaaggtcgccacggtactgttcctggcccggcaactggccggacggcagtcgaaaatcgacaaaatacgcatcgtcccgtcgctcaaattctggacgtggcgttcgtcgcgcgaacagcgccgcatctggcgcgaggggacatggccgatcctgatgcccgtcgtggtctcgtgcgcggtgatcttcccggcccacacctcctcggccgtactggttttcatggcctcgtgggtcatgatgctcatcgggcgcgtccgcctgggcgaactggtgaaactcatcgggctggcctgcatcggcatcgtcttcatcatgacgctcaacctcgggcgcagcgagacggccgaagggcgcgtctcgacatggatccacctctggacgcgctcgcagaccgaaaaaccgatcgagcacctcaccgacaccgagcggtcgatgatcgccatccacaacggcggggtcttcggcgaaggcgccggacagagcgccatgcgcgtcgagatgatccatcccgaaagcgactacgcctacgccttcttcgtcgaggaatacggcatcgtactggctctggccttgctgatgctctacctgtggatattcttccggggcatcgagatattccgccgctgcgggacggcattcccggggctgctggtactggggctcgccctgctgataacctgccaggcgctgctgcatatcatggtgaccgtcaacctgatccccgaaacgggacagacgctgccgctgatctcgcgcggcggctcgtcgaccatcttcaccaccatcgcgctgggcatgatcctcagcgtcagccgccagaacgacgaacagtcgcacgatacgccccgcagcgaatccatttacgaaaaataacacggccatggacgacataagactcgacaaatacctttgggcggtgcgggtgttcaaaacccgcagcgacgccgcggatgccatccgcaacaacaaagtcacggtaaacggctccgccgccaaaccctcgcgcgaagtgaagatcggcgacgtgatcgccgtgcgcaagatgcaggtgacctactcctaccgggtgctcgacttcgtgtcgagccgccagccggccaagaatgtccccctgtactgcctcaacatcaccccgcaggaggagctggacaagctcagcatcccgcgcgaaactatcttcgtcttccgcgaccgcggtacgggacgcccgaccaaaaaggagcgccgcgaactggacgggctgatggacgaaatctactacgacggggacgagtaggccagcatgtcctgcgcctccccatacgaactcccgaccttcgcggcggcgtccgcagcagcctcgttctcgcggccttgcgtgcaggcaagaagccccgaaccgtccggtcggaatttgcgcgcatccgcggcacccataacctgcggcgtggttttcgatggcaggatcggcaaacagttgaaaatccccacgggataaaacgccaaaacggacggatcatcatgcaagcacgatatccgtccgtttttatttcgagcctatcggctcttttcaactattcgcctatttcttgttgaaaaaattcatcgtgcgttccagcccgatcgtcgtgaacgaaaggatcgcgtcgccgaacaccttgagccgctcgggcagcgccttgcgctccttgtccgaccactcccccagcacatagtcgacctggtggcccctggggaaatccccgcccacgccgaagcgcatccgggcgtagtcctccgttcccagcagttcggcgatattcttcagcccgttatgccccccggcactgccccggggacgcatacgcagcgtgccgaacggcagcgcgatgtcgtccgatacgaccagcagattttccggggcgatcttctcggcctccatccagtaacggacggctttgcccgaaaggttcatgtaggtcgagggcttcagcaggatcagcgtacgccccttatgcttcagctcggccacatcgccgtaacgcgccgtcgtaaaaacagcgttggacgcctcggcgagggcgtccaacactttgaatccgatgttgtgccgggttccggcatattcggcgccgatatttcccagcccaacaataaggtatttcatacgctaccaattaggcttgtgccgccgcaccgcgcgatgcacgggttacgcgcactgcgcagacggccgtcgaagccggagtgacgaatttcaggttctcgaatgccaggtcgcctacgaagatggtcttgccgacacccagttcggttacgtccacgaccagttcgtcgggcaggttctcgaccagcgcgctcacgacgagcttgcgggccgacagcgtcagcttaccgccgaccttcacaccttcggcgttacccgtcaggcgtaccggaatggcgatggatacgggtttaccctcggcaatgcgatagaaatcaaggtggaggatctgctcgcggacggggtggaactgcgcctcacgcagcacggcctgctctttcttgccgtcgaaatcgaactcgacgatgtaggagttgggggtgtagatcagggccttgatctcgcgggggtctaccgagaaggaaaccgactcgccgttgcccgacagtacgcagggtaccataccctcgcggcgtacggccttggccgctttcttgccgtactcatcacgcttaacggcttttacagagatagttttcataatacgtttgttttttaatgtgttaccaccggcggttctcagcccggccacgcaagccgcgccccaattccgcctgtttcggatcgcaaagataaggtaaaatatcaagaatcgaaaatcaaccgtaaaaaattcgtttccgggcaaaaaaatttcggtttgggatttaacttttgcaactttaacgcgtcttacagacaaaccctcatggaagcgacccgcgacatacccgcagaagaactctcggcgctacgcgatcccgccacccggcgcggggcgttcgaccgtctggtcgggacatacctgcggccgctttactggcacgcacgacggctggtcgtcgtccacgaagatgccgaggatgtggtacaggaaaccttcatccgcgcctacgacaagatcggcaccttccggggcggagccggggaactgggggcatggctctaccgcatcgccacgaacaccgcactgacgatgctgcggcggcgcaggccggggctcttctcctcgctcgacgacgtaagccgcatcctggcaagccgcgtggcggaggagtgcggcgaggatgccgaccggacgttggtacgtttccagcaggcgatcctggagttgccgctcaagcaacggctggtcttcaacctccgctactacgaccggatgccctacggacagatcgcccgcgtgctggggcagcgcgaagagacgctcaaggtcaattaccaccatgcggtacagaaactgaaagagaaactaacacgggaactatgaaccacgaattcggaaatatcggcaggcggctgccttacgacctgcctgagcatcgcctcgaagcgttgcacgaacgcatcctgcgcaatacggcggcacggcccgcacccgctgcccgcacccgccggctttacctggcggcaggggtgagtgtcgcggcagccctcctggcaacgggcatcctcctctccggacacctcagccaccgcgccgaggccccgctgccggacatcgagcagatgctcgccacgaccccgaccgaaaccctgcaacaggctgcggcggagaactacgacgacatactctacaaccagcaactttaaaaatccatgcgctatgaaacaactcctcacttttctttgcgcgctcctcttcgccctcgcaggcaaggccgcgcccgccggtgacgaactgaaacagcttctggccgaagcccgggctatcgtcaacacggccggcaacgcggccgaccgggaggtctcccgggccttgtccgaagcgcgccgcgccgtaaacgccaccgaccgccagatcgaccgtgccatggccgaggcccgcagggccgtcggcgcctccgaccgcgagatcgaccgcgccattgccgaagcgcgcgccgccatcgacgccgccgaaacggccgccgtcgccaaccagtcgatcgaagagctgaacaaggccgcccgcgagcaggtcgtgcgcgaactggggcttacctcgcgccagcgcaaggagttcgaaccgctctacaaagcctaccgcgaggcgctcgacaaggccgtcaataccccggatgcgggaacggacgaggccgctcaacggcagggactcaaaaccaagctctcgaacatcgccgccacggcgcaggttaaacgcgactacgtggacaaattcgccgctgtgctcaccgccgagcagatccgccgcctctacaacacggagggcgaaatcggcaccaacatcaaacgtgccgccgtcgaccgccgccgcaaccagaacacgcggctgaaaggcagcgggcgcatggtgacgcaggactggggcaaggcgggcgactacacgggcatttcggccgcggcgttcttcgacgtcacggtcagccccacggcccgaaccatcagcgtgacggccgacgacaatgtgatcgactacctggtgctcgagcgcgacggcgggacgctgaaattccgcgtcaacgccaacaatacggagaacatttcggtttcggtcgtcgttcccgcatcggccgccctgcgccagatatcggccggctcctacggcaaggtgacctgcaagctgccgttgaaagggccctcggtcgcggtttccgtttcgagctacggatcggtcatcgccgacatcgacaccccgggtaccgcccagctcagcgtgtcgagctacggcaaattctcgggctcggtacgctgcaacgactgcgagctgcgggtttcgagctatgggtcggcacaggcgcccgtcgactgccgcaacaactgccaagtcacagtcgggagctacgccaagttctcgaacgacatcaaagcttccgtcctgacgctcaagatcagcagcggcgccagtgtcagcagtacgctgatctcggatgcactgacgctgagcgtcgacagctacgccaagttctccggcgcagtgacggtgaacagccggcaggcgaaactgaccgtcagcagcggcggctcgttcaacggcacgttcagcgggaattcgctcgaggcggaagtcggcagttacggcaagatcaacctgaaagggtcggcacaggtcgccagcgccgcggtaagggtatcatccggagctgtgttcagcgcccccgagctgcgggtcgccgactatgacctgaccgtatcgaactatgccaaggccgacgtgtggtgctcgggcaccctgcggataaacgcttcgacagccgcccggataacgtacgacggcccttgcagggtcgaatcgctcaccgacaacatacggcgcagaaagtaaatacaaacaaccataagcgtatttacgggaaagggacggaatccggtgcggatccgtccctttcgggtttgcagcagtgcattgtgctattcgatgccgcggatatgcttctcccatttccaggctgccgcgagcgtctcgtcgagcgagcgctcggcccgccagcccagttcgttgttggcatacgacgggtcggcccagatggccacgatgtcgcccgcacggcggccgacgatcttatagttgagtttcagattgttcacctcttcgaacttgcgaaccagctccagcaccgaaaccccgcgccccgtgccgatgttgaagacctcgtaccgtgccttgttcctgtcctcgatcatgcgccggatcgccgccacatgcgccttcgccagatctaccacgtcgatatagtcgcggatgttcgagccgtcgggcgtcgggtagtcgtccccgaacaccgacaggcattcgcggatgcctgcggcagtctgcgtgatgtaaggcaccaggttctgcggcacgccgcgcggcagctcgccgatcagcgccgacgggtgcgccccgatcgggttgaaataacgcagcgcaatgcctttcagcccctcgtaggcggccagcgagtcgcgcaggatatcctcgcacatctgcttggtgttgccgtagggcgacgtggcgggcttgcggggcgtctgctccgtgacgggcagcacgtcggcctcaccgtagacggtgcacgacgacgagaagacgatgttctgccgcccgtactcgcgcatcaggccgatgacgttcatgaacgacatgaggttgttgcggtaatattccaacggtttgctcaccgattcgcccacggccttcgacgctgcgaagtggattaccgaatcgaagtcgtatttttcgaacaccctggcaaaggcgtcgcggtcgcagcagtcggccttttcgaacgggacgtcgacgcccgtgatcctgcgcacgccctcgactgcatccatgtcgctgttcgagagattgtcgacgatcaccacgtcgtaccccgcaccgatcaattccacggcggtatgcgaaccgatataaccggcgccgccgctgaccaaaacacacgattttttcataagttgacggtttttattcgaactacaaatatatcaaaaaaatacgctcgtccgccaattagccccgaaaacctcggccgcctccggaaaatcctttcccggagggcttccggcctgtcccgcggccgcggtcgggacatgcggcgggacgccgaacccggggatcgtccgaaggccagccgggggcgggggaaagtccgtcccggccacggagctaacaaattgtaaccgcgacatggaaaaaagcacgggagcagtggctattttcaaaaattaatcgtatatttgctaacagattgacacctcacacaccggaaattcatcaaaacattaacggatatgtacggaaaaatcaaagaacacctgcagcaagaacttgctgaaatcaaggctgcagggctctacaagagcgaacgggtcattacttcgccgcaacgtgcggagatcgaagttgcaggtcgtaaggtgctaaacttctgcgccaacaactaccttgggctttcggacaacccgcgcctggtcgaggcggcgaaaaaagccatggacagccgcggctacggcatgtcgtcggtgcgcttcatctgcggctgccaggacatccacaaggagctcgaaaaggccattgccgactatttcggcacggaggacacgattctctacgccgcctgtttcgatgccaacgggggtgtcttcgaaccgctcttcggcgagcaggacgccatcatctccgacgccctgaaccacgcctcgatcatcgacggcgtgcgtctctgcaaagccgtacgttaccgttacgccaatgccgacatggccgacctggaggagtgcctcaagaaggcgcaggcacagcgtttccgcatcatctgcaccgacggcgtgttttcgatggacggcaatgccgccccgctcgacgaaatctgcgccctggccgagaaatacgacgctctggtcatggtcgacgagtgccactcggcaggcgtgctgggtaaaaccggccgcggcatcaccgaactctacgaccgccgcggccaggtcgacatcctgacgggcacgctgggcaaggccttcggcggcgccgtaggcggcttcaccaccggccgcagggagatcatcgacatgctgcgccagcgttcgcgcccctacctcttctccaactcgctgccccccgccgtcgtaggtgccgggatcgagatgttccggatgctcgccgagagcaatgaactgcacgaccggctggtggccaatgtcgaacatttccgcgaggggatgatggccgcaggcttcgacatcaaacccacccagtcggccatctgcgccgtgatgctctacgacgccaagctgtcgcaggacttcgccgccaggctgcaggacgagggcgtattcgtcacgggattctactatcccgtcgtgccgaaaggccaggcccgcatccgcgtgcaggtatcggcaggccataccaccgaccagctggatcgttgcatcgcagccttcaccaaggtcggcaaagaactgaatgtcatcaaataaccaatcctcatatgcctaagacctcattagacgcaatcgaccgcaagatcctcaaatacctgatcaagaatgcgcgcatgccttttctcgagatcgcccgcgaatgcggcatctcgggcgctgcgatccaccagcgcatccgcaagctcgacgattcgggcgtgatcctgggcagccgcctgatcgtagaccccaagatgatgggcttcgacgtctgcgcccacatcagcatcacgctcaaagacccgcagctgctcaagcagaccgtggagcagctcaaggaaatccccgaaatcgtggaggcgcatttcatcaccggatcgggcaacatcctcgtgaaactctactgcgtggacaacgagcacctcatgcgtacgattttcgacggtatcctgcgtatccagggcgtcgcctcgaccgagacgcagatctcgttgcaggaggcgttccagcgccaggtgaacatcgacttcatcgaggagtagtccgcacgacgcccctttcgcaaaggcggaggccggaaatcccggtttccgcctttgtgtccgtacatgccggggcacaggccgctgtccccggccccggacacacaaagaaagcaccccgcccataaggcggggtaccccggcaaacaattgtttaactgatgattatcccgcaagtttacttagcggaatccgaagcttccgatgcggaggaggagttgccctcacttgtgcttgtactctcaaccttattctcctccttggctgattctccggcagtcgaatcagtcttttccgcatcgccggactccgatttctcctgttcatcggtagccggggactccgttgcgggagccgtagcttcggtcgccgcggaggcgtccttcttctcgggctgctgtgcgcatgcgaatgcgcccccagccatcagcatcaaagctgccatcgttacaattgtctttttcatagctcttaatgatttaaggttccacttcatttcttcaggttcgtaatttgtcccgtcgacctttctgactttggaaagtccaagaggcgtgccatgcggacagaaaacgaaaaaccgctgaattacagcggttaacaaaacgtgccacaatcggcggtatgtggaaaagtgtggaatcgcgccacaggtatgtggaaaaattccacacgcaggcgcatcactcgatcccgtataggtgcaatttgttgtaaagggttttgcggtcgatgccgagcagtttggcggcctgcgacttgttccccccggccagggccagggcacggcgtatctgctcctcctcgccggccgggttgcgcaatggcaccgcagccgcaccggaaaccccggcgatttcggccggcagttcgcggcaggagatataatcgccccggcagagcagtgtcgccgacatcaccgtgtttttcatctgccgcaggtttcccggccagtcgtaacgcaccatggccgcagcggcttcgccgtcgaaaccgacgatatgcttgtccaactggcggttggcctggtcgaggaaaaaatcggcatacagcatgatatcctcgcgcatctgcctcacttcgggcatacggagcgtaaattcgttgatccggtggtagaggtcggcccggaacgtcccgcgcgcgatcgccgcttcgaggtcttcgttggtcgctgcgaccagccggatgtcgaccgcaacttcacggttactgcccacaggacggatacggcgctcctgcaaggcccgcaacaattgcacctgggtttcataggtaaggttccccacctcgtccagaaagagcgtgccgccgctggccgcttcgaaggcgcccgtcttatcgccgacagcccccgtgaacgatcccttgacatggccgaaaaactccgaagcagccaggtcgcgcggaatggcgccgcaatcgaccgctacgaacggctttccggcacgcttgctctggcggtggatcagctgcgccacatgctccttgcccgtgccgctggcaccgttcaccaataccgacatgttcgtcggcgcgacgagccgcacatattcgtagagctgccgcgcggcatcgctctgcccctcgatatagttgggcatatccccgcccgcagcccgggaagtctccggcgccttttccggcgttaccggggggacatcgcccacgggcgccggggcatcaagcgcctcgcggatctttttcagcaattcgtcgggattgacgggcttggcgacgtagtcgcgggcgccgagtttcatgcagcgcacggcgttctggatctcggcatagctcgtcattacgatcacgggcacttcgatccgctgccccgacatccactgcaaaagggcgattccgtcctcgtcgggcaaccgcatatcgctcagcacgagcgagaagcctccttccgcaagagccgtccgggctgccgccgcactggctgcggtctgtgtcccgaacccttttttcgagagccaggtcttgagcatcaggccgaaggtgatgtcgtcgtctacgatcagaatccgttccatattcacgacaaagatacctttttttgcgcttccgcgataatcgcacggatattttctgccgccgtgcgtacctcccggcataacgtgtcggtcagggggccttcccagctttccgccgtccgcagcgccgccgccacctgcacggccccgagcatcgtgaagatcggcgtcatcttgtgcgccacggctttcagtgccgccgtatcgccttcgtccaacgcccgctccagcagggcacagttggccgcgccctgctctgcgaaggattccagaattccccgtgccgccgccgtgtcgtcacccgcataggccgtcagagcgctgaaatccactccgtccgcctgttccgccccggccgcggcaaccccgcacccgacgggcgccaccgcggcatccgcgccgcagacggtgttcagcacggcaaccagttcattcgccgtaaacggcttgcgcaggcatcccgcgaacccgcgtgccgagaaatccccggcatccatctccccgcgcgccgaaacggccaccacgggaattgcagagtcgaccccgcgcaccgcggccaatacgctaaacccgtcggccgacggcatctgtatatcggtaaaaacagcgtcgaacaccccttcggccaccagtttggcggcatattcgggatactggcagcactcggcagccaccccggcctggcggcacatcccggcagtcatctccagttgcagcgggtcgtcgtcgatcagcagtaccttcaagtccgggcgggcggccgtgcgggcaggctgctgcgggccgtcgggtttcttcccgctgctgcggcctaccggtaccgagacgatgaacttactgccctcgcccaggcggctttcgagcgagatgctgccgccgagcagttttaccagacggtcgacgatcgaaagccccagcccgaacccgtcgacgccctgcgccgaacgcaggcgcacgaactcctggaaaatgcgttccttctcctcgcggccgatgccccgcccggtgtcgcgcacggagaataccagccgtccgtccacgacgtcggcccggatcgtcacactgccctcgtccgtaaatttcagcgcattggatatcaggttgtcggcaatttggcggatccggaaaggatcgcccgtcacctcgtccccggcccccggcccggcatcgagcaccagggcgatgccctttgcctgggccatggccgcaaacccctcgcggatcgtctcgaacagttgtgccgggcagaacgccacgttgtcgacgtcgaccttgttgatatcgagccggtagaagtccagcaggctgttgaccagcgccagcaggtgttccgacgactccttcatattgtgcaggtaaagtccttcgcgtttgcccgtggtgaggcgcgaaagcaggtcgatataccccatcaccgaccccagcggcgccttgatgtcgtgcgtaatggccagcatcagcttctcacgcgccgccagcagcgcctcgttgtcgcggttggcccgctcgagcgccctccggtagcgggtgctgcggttgacatcccgcagcaggatacccacgaacagcagcatcagcacgacggcgacgatggcgataccacccagcacgtacgacgaccggcggcggatagcctccgtctggtcgatcttgcccagcaggaacgccgtatcctcggcttcgaaatccatgatgaggcggtagatcttcgtattcaccagttcgttgctgtagcggaggcgcatcccttcgtcccacgcccggtcgtaaatgccgatgcggtcgctggtcacccgatcctgcaacgtcctgaggacgatggcgatcgtatccttcacggccgtcgcggggagtgaatcgacgacccgctcaaggtgggagatcacgatgctcgaatcctctttgggaggactgaacaggtcggcgaaacggcggaagaaattgcgcttgcgccgcggcaccgccacggacagcgtatcctgcaccaccgtacgcaccgacacgctgtcgcgcagaacccccacgctgtccacactgtccgccgggccgatcagctcgcggatattcttgtccagcaggctggccgtagccgccgaacggatcgtccgccgcaggttcatcgtccgccgctccttgtcgcccaacagcctcacgatgctgtccaggcgcatcgtctggagcgaatcctgctccccggtcaggttgcgcaacgagtcgatatagccgcgtacggtgcgcaattcgcgtttataccgcgcctcgtaagacttgtatccggcgatcatcagctggccgtaactctcggcctgatagaggtggtagagggtttgtcccacgacattgcgcttggtgtgcagcagcgaataactgccgtcggaggtcgaaaaacgcaccaccgcacggtaaacatacccgactgaaaggacgcagacggcaatcaggatgacatagcccgcgacgatcttggttttgacgaatttcgactctttcatacccccaaagatagtaaaaaccgggaaaatcccggcacccgccgatttcgctcccgcacgcccgggcggcacggtgcggccgcccatccgctccgcgacgtcccgcgcacaacaccgatcccggacaagccgctcccgcatgaggccggacagtccggatccataaaaacaaaaccgggccgcacgacaacgtacggcccgattattccgcgtttcgcggtgcggactaatacttataccgcatccacttgtacagctccttgaacgtcggctttttgccgtacatgaagatacccacgcgatagatcttcgccgcaaaccacaccatcgccgtaaacgaggcgtagaggatcaccagcgagaggattatctcccacagggggatgccgtaagggatacgcgccatcatcaccacgggcgacgtgaaggggatcatcgagaaccagaaggccatctgcgagttggggtcgttcacgaccgatatcatcaccagcagggcgaggatgatcggaatcgtgatcggcgtctgcaactgctgcgcatcctggatgctgtccacggccgaacccaccgcggcgaacatcgccgaatagaacaggtaaccgccgaagacgaacagcagcaggtaggcgaagatgcggaggataaagccgaagtccgtaacggccgctatcacctgcaacatctccgggttcacgtcgatcgcagccgctgcgccgggaaccccctgttgcatggcctgcacgccctccatcatttcgggcggcatcatctgcgccaccgcaagcgcccctacgacgcacagcgcgccccagatcagcacctgcacgacggcaaccgacgccacgccgagtatcttgcccagcatcaggtcgaagggcctcaccgacgaaaccatcacctccagcacgcggctgttcttctcctcgatcacggactgcataaccatcgaaccgtagatcagcaggaacatgtaaaggatcatgcccagcacgaagcccgttccggtggcgaccaccgacgatttggcgtgcgcctcctcttcctgcgactcgtcgttgcggaaagtctgcataccgacgcgggtcttcacctcctgaagtatctgcgacaggttttcgatgttgtatgacttgagtttctcggcctcgatgatatcctcgatctgccccgtgatgttgctttcgaccgacagcgacgacgacgaattggcatacagtttcacgttgttggggttggtgaggatgtccgaaccgatgtagagcacgccgaacttgtcggtcagctccttacgcgcggcctcggtcgaaaggtcggtggactcgaatatcagctccttgccgctttgcagcctgggggctatcagcccgctctcgtcgatcacggcgatatgtttctcgtcgccgcccgaatacttcatgatgagcatcggggcgaacatcaggccgaccatcagcagcggcatcagcagcgtggtgatgatgaaggattttttacggacgcgctcgttgaattcgcgtcctatgatgatacctacttgtgacatggttttacttgtttttatgagttttgttcccgaagacattgatcagctgcgccgcgacgagcagccctacgcagaggtagacccacggcgcaacccgctccccggcacagacgtcgtaaaagaggatgcccagtgccgcgacggcgaagacggagctgacgaccttgctgttcatgaccggctaaaggttcccgctgacggcgcggatgaatatgtcgttcatcgacgggatgatctcctggaacgagcgcagctcgacggcgtcgttcacggcggcgatcactgcgcgcacctcctcgtcgcgctcgacatggagtttgagcgtagcgtataccgacttgtcctgcgaaccttcgagtatctcgcagcggccttcgacggcacggcgcagcgccgcctcatcgccccggtaggccacttcgaagatgttggccccatggcgccgacggatgtcgtcgacacaccccgagaggatgttgcgcgacttgttgatcagcgtgatgtggtcgcagatctcctccacggacgacatgttgtgcgtcgagaagatgatcgtggagcccttgtcgcgcagggcgaggatctcctccttcaggaggttggcattgatcgggtcgaagcccgagaaaggctcgtcgaagatcagcagttcgggttcatgcagcaccgtgacgatgaactgcaccttctgggccatgcccttcgagagctcctcgatcttcttgtcccaccagtcctggataccgaacttcacgaaccactgcttgagccgcacaacggcttcgcggcgcgaaagccctttcaggcgtgcgaagaaaacggcctgttcgccgaccttcatcttcttgtaaaggccgcgttcctcgggcaggtaaccgatacggtaaacatccgcaggcgtgatctcgcggtcaccgaacaacacgcggccgctgtcgggcgccgtgatgcggttgatgatgcggatcagcgtcgttttgccggccccgttggggccgagcaacccgtagaccgaacctcgggggattgcgagcgatacgtcgtcgagggccttgtgcccggcgtattgcttggtgacatgttctactgtgagtaaatccatggtcgctgagagttatttttagggttgttcggcgacaaatataacaacaaattttgaatatcaaaaaatatttatcgtttttcgatataatcaacacaacaacccgcccggcagggaaacaaaaaagcggcagggattaccctgccgccggcatatcgatcggggcggaacccgcctaccagataaccacgcgctcctcctcgggcatgaacatctccccgtcggtcatactgaacgcatcatagaaatcctgcaggttacgcagcgtggcgttcacgcgccatttgcccagcgagtgtacgtcgagcttcgtaaggcgtgcgatctcctcgtcgcggatattctgcgcccacagcgtagcgtaagccaggtagaaacgctggtcggcagtgaatccgtcgatcggcgcgggctcggtgccgttcagcgagttacggaacgccgtatgggaaacgcgcaggccgccctggtcggcgatgttctcgcccaggctgagggagccgttggccataatcgcaggctggccgtccttggcgggcagcacctcgatcgcgtcgaactgctttacgaggatgtcggtcttggccttgaacgcagcagcgtcctcctccgtccaccagttgttcatgttgccgtccttgtcgaagttgcggccctggtcgtcgaacccgtgggtcatctcgtggccgatcaccacgccgatggcaccgtagttcacggcgtcgtcagcctcggggttgtagaacggcggctggaggatggctgccgggaagcagatctcgttggtcgtcgggttgtagtaggcgttcaccgtctggggcgacatgtgccactcgtccttatcgacaggcttgccgagcttcgaaatattgtcggccgtataccagaggctggcattcacgatgttctcgaaatagctcttcgaggggtcgatcgccagcgtcgaatagtccttccacttgtccgggtaaccgatcttcaccgtgaaggccgccagtttttcctgagccttggccttcgtggcgtccgacatccagtccagcgccgcgatatgctgcccgagcgccgtctgcaggttcttcaccagcccgagcatacgctccttgtcctttgcggggaaatatttggcgacatacatctcgcccacggcctcggaaaggatgccgttgggcaccgacatggctcgcttccagcggggtttcatctcctgctggccggccatcgccttgccgtagaaatcgaacgatgcctgctggaaatcgtcgctcaggtacgacgcggcatcgtccaggtactgcgccgcgaggtagtaacggatatcctccagcggggcgttcttcatcaggtcgttggcgttggcgatcgacgatttcgtcgtcacgatgatcgtgtcgaagtcgccgatgcccatggctttgtagtaagcgggccagtcgatggcgtcgtaagtcttctcgaactcggccttcgccgtggggttgtactgtgccggtatgtcgcgcagctcggtgttcgaccacgacttctcggccagtttcgtctcgatgttcatcacaccggccacggccttctcgatgtcagcctcggggatgcctgcaagacggaagagcttgcccagatactccttgtaggccgtccggatattctcgttctcggggtcgaggtagtaatcgcggtcgcccatcgtgaggcccgactgcgagatataaagggcattgatatcgctgttcatcaagtcagcctgcacacccacggaaaagaaggggttggcgatcgccgtgtggagtccggcaatggcaccggtcagctgtgcacggtcgccgatagcgaggatctccccgacggcgtccttcaccggagctgcgccctcggcgttcaggcgtaccgaatcgagccccatcttatagaggtcggagatcttctgctcgatgctgccgggctcggccttcatcttggtcatctccgagaaaagctcgttgatacgcttctcgttgttatcacgcaggatatcgaacgaaccgtagcgcgaatattccggtttgagggggttgttcttctgccagccgcccgtggcgtactcgtagaagtcggcattcggggctaccgaaaggtcgaagttggccaggtcgatggcgggggttttggaggtattctgacaacttgccatacaagctattgttgcagcgaaaagaatgatttttttcattgtgttcgggtatttagtgacgacaggggtgtccgaccatgccggaacaccccttgtctttatttcggatctggatcggaatgtcggcttatttgcggatcgccgccacacccggaagcaccttgccttccatgtattcgagcagggcgccgccgccggtcgaaacatacgaaaccttgtccgccaggccgaacttgttgatgcacgccaccgaatcgccgccgccgatgagcgagtaggcacccttcgaggtagcctcggcgatagcctcggccacggcgcgcgaaccggttgcgaacttgtcgatctcgaacacgcccacggggccgttccagaggatcgtcttgcacttgaggatctcctcgcggaacaccttcttgccttcctcggcgatgtcgacgccttcccagccgtcgggaatattgttggcgggagccacatcggtgttggcatcggccgagaatgcgtcggcgatcagcgcgtcgggcgacatcacgaccttcacacccttctgcttggctttggccaggatatcgagtgccgtctggaactggtcgggctcacaaatcgaattgccgaccttaccgccctccgcagccgcgaaggtataggtcataccgccgcccaggatgaggacgtccaccttctccaggagattctcgatgatggtgatcttggtcgagaccttcgaaccgcccaggatggcgcagaacgggcgctgcgggttgagcatgatgccgtcgatggccttcagctcgttctccatcacatagccgaacatcttgtcgttggggaaataatcggcgatcagcgccgtcgaagcgtgtgcgcggtgcgccgtaccgaacgcatcgttgatgtagcaatcggcatacgaagcgagccgcttgacgaactctttctgcgggccctctttgagcgccttcttggcagccttcttctcctcgtcggtagcgtcttcggccagaccgcggggcttgccctcctcctcggcatagaaacgcaggttttcgagcagcatcacctcgccgggcttgaggtttgcagccatctcggcggccttctcgcccatgcagtcgccggcaaacatcaccttcacgcccaggcgtttctcgatggcggggacgatctgctccagcgagaacttgggatcgggattcttcttgggacgccccaggtgcgacatcaggatgaccgagccgcccttttcgagcaccttcttgatggtggggatcgccgcacggatgcgggtatcgtccgttacctcgcccttctcgttgaggggcacgttgaaatccacgcggatgatcgcgcgcttgcctttgaaatcgtaattgtcgattgcgaacatagctctttgattttgaattattttgttgaattgatctttcaaatacgcattaccggggcaaatttatgaaaataatttaaaaaagtgttattccgataacagaaaaaataatgcgcccggcgccacggcacgctaatagaacgtccccttgggcgcgaagatcgcgtacccgaaattgaacgtcaggtacatgttcttccagttgcgcaggtcgtatttggtcagggccaggctgaccgggccgatcggcgtatggtagaccagcgacgcctcggcgatatagtgccagcgcttatcttccaccgggcctgacaccccgggtacgaaactgcgtttctcgcggaacatggcgtagaaacccgtgcgcaggaagaagttgggcatcaggtcgaaagtcggcatcacgccgcccgccgcgaaccgcttgccccggaagtcgggcatgtaaatcatctgcgcgtgaggcaccggctcgtaagccggcatcgacatcaccgtggccccctcggtcgtgaactcgggatggttcgtgatcacgccgtcgacgttcagccccagcgaaaaccagctgcagcccggcatgtcgaaatacttgtcccacgtaagccgcgccccgacccactggcgggacgtccgcgacaggaacttttcggcatcgaacggctcgtatttatcgcgccccgtgacgaagatgcccgacagtttcaggtcggaaccccggcggggatagaggaacttgtcgagcgtattacgcgccagctcggccttgatcccgaagaacgaatagcgcgaatggtcggtatcgtcggcgaaaagctcgtcggaatcgtaccggtaattgacatgcccgccgttggcgcggatcaggaagacgccgcggtgggcgaggggcattccggcggccaccgagaagaaactttcgctgttcttgacctgccgcgtgttgtcgattttggtgatgttgccgaatgaaccgtggcggaaattccgcacggcgaaattgtaggagtaatccaggaacacgggtttccacatgtagaaatccgtgcgccctccgatcgtaccccacgtatagatcggcccgaggtagaggtcggcgcccaactgctgccccacacggccgatcgtctggtaattgacgccgatgtaggcctggttgaaggccgtcgaggagacgttgccgccgatcgtgatcttgaagttgggtttggtatggaactttgcccggaacgaatagcgctccgtcacggtgtcgtatgtcacgtgcgggaaatccatcgtgaaatcgccgtccgcaagcaccgcgtagaggttgtcgcgcaattcggaaaaacccatcgggcgctggcgcccgggggttcggcggtctaccttcacgaagtcgcggatataggcctcgggcgccgaggagagcccttcgagcttatagtcgttgaagaccagcggcgggcatttggcgcggaactcctcgcgccgctcggcatagcgccggggtgaccagcgttcggaaacccgctccaggatctgcggcatgacggccatcgcatcttcataaccggcatccatcacggccacggcgctgtcgaaatcgagcatgttgacatccacggcacggcgaaccgtgacgctgcgccctttgggcaggtcgtaatccgtatcgtgcatcgccagcatgaaagcctggtcgaggatgttgatgtcctcgcccggcggggtattgcccgccgtgcagatactgcccacgatcaggtcgggacggaaccccacgtcgagcggacgccacgggaagttgtcgtaaataccgccgtcgtagagcagcatcgaatcgactttcatcggtttgaacaccagcgggatggacatcgacgagcgcacggcttcgcacaggtcgccgttgcgcatcaccaccggctcgcgggcgttcatatcgctcgacacgcagaggaaaggcaccatcagacggtcgaagtcgccgccggcagccgccgaggccggcgcgaacagctccgtaagcgccatctcgatcggcgtcgaagaaatcaggttcgtcacacggaaacgcttgcccgaattacccaggttcaggcgcacgctgataaacgacgggttgtggccgatctgctggtagtagggggtatagcgggggtcgatacgccccgacacccactccttgaccacgcccgaagcgacgatctcccgcatctgggcaggggagtagcccgcggcatacatggccgcgatgatcgagcccatcgaggtgcccgccacgtaatcgatcggcacgccgttctcctcgagggcttcgagcacgcctatatggtagagtccctttgcgccgccgccgctcatcacgacgcccaccgagcggggacgtgcagtcccgtcgtcggggttctgcgccccggcgaccgtcgcagcgagcaacagcaccgagataaatgagagggttttacgcaacatatctcaatttttttataactttgcacgttatacttaacgtaataagacgggtaaaaatacggaaaaagcgtaaacaatcaaaatatgaccgacaaaatcaatgaacttctccgacgtgtcgaagagttcaaaccgaaggcagcggccgagatcgaggagttccgcatcaaagtgctcggcaagaagggcgaactgaacgccctgatggaagagttcaagacggtggccccggagctcaagcgcgaaatggggcagcagctcaacaaactcaaggtcacggccctcgaccgcataaacgccctgcgcgagcaacttcaggacgcaatcgccgacgacggcgctgcgaccgaagacatgacccgtcccggttcggccgagcagttggggtcgcgccacccgatctcgatcgtcaagaaccagatcgtcgaggtcttctcgcggctgggctacaccgtcgccgacgggcccgagatcgaggatgactggcacgttttctcggcgctcaacttcccgcccgaacatccggcgcgcgacatgcaggacacgttcttcatcgaaaaggatcccgacatcctgctgcgcacgcatacctcgtcgatccaggtacgcaccatggagcgccagaaaccgcccatccgcgtcatctgccccggccgcgtgttccgcaacgaagccatttcgtaccgcgcgcactgcatcttccaccagatcgagggcctctacattgacgaaggggtgtcgttcgccgacatgaaacagtcgctgctctacttcgccaaggaggtcttcggcgagcaggccgtcatccgcatgcgcccgtcgtatttccccttcaccgaaccttcggccgaggtcgacgtatcgtgcaacctctgcgggggcaagggctgcccggtgtgcaagggtaccggctggctcgaaatcatgggctgcggcatggtagaccccaacgtactccaggcaaacggcatagaccccgaaaaatactcgggcttcgccttcggcatgggtattgaacgcatcgcaatgctcaaatacggcgtgaaagacctgcgcctctatttcgagaacgacgtgcgtttcctccaccagttcgacacggcactctaaaacaccgggcccatgaaacgtctgacagcgatcacggtactgtgcgtgctcttcctttcggccttcgccgccgggaaaggccccgccggcgtgcccggctatcccgattcgctgcgcagcgtatggctgtataccgaaggcatcaaacagaatgccattgcccgagacaccgtccgggcgcgggaattcttcgccgaggccatccgcaacgactcgaccttcgcaccggcctattacgaaatggccgccaacggcatgtattccacgcccgacgaggcggtggatctggcacgcacggccttccggctcgacaccgccaacaagtggtaccaccagttcctcgggcaggcactcatctatgcccgccgttacgacgaggcgctggccgtctaccgccgcctgcgcagcgacgagccgcagaaccccgacaactaccggattctggccgccctctacgagcaggcgcagcagcccttctcggccatcgccacgctcgactcggccgaagtgcgcttcggccgcatcccggtgctgagcaccatgaaacggcagctgctggtcgctacgcgccagatggacaaggccgtcgaagaggccgaggccatggtcgaagcggtgccttacgaggccgaacaccacgtcgtgctggccgacctctacggcattctgggcaaggattcgctggccaaggccgaatacgaccgggcattgcagatcgactcgaccgacgtgggaacgctcatgtcgctggccgatttctacaacggccgccacgattaccgggcggtgctggacgttacgcagcggcttttcgagtcggacaaaatgccgctcgacacgaagatcaagcgtttcgggatcttcacctccgacatgcgtttctaccgcgaatattacccccagctcaatacgctggcctcgacgcttgccgtccgctacccgcaggacaggcgcgtcgtggaactttatgccaaacacctgatcgcctcgggcgagctggaacaggcgctcgcgctctacaaactccacctcgacgaccagccgcccgtcgaggagtatttccgttcggtgatcgacatcgagagctatcttcagcatcccgattcggtgaaccgctatatcgggcgcgccctggagctctttcccggacaggtcgatttccacctctcgaaagggcatacgctgaattattccaaacaatatccccaggcgatcaaagcctacaaacaatcgctgggctatgcccggacagattcgctgcgcagcgtgatctggggatttatcggcgacacctggcaccagaaagccaccgccggcgaacaggacatcgacgacgatttcgcccgggctgtccgaaaaggttcgttccgggcggatatgaagcagtgctacaaagcctacgaccacagcctgcgctacgatccggataacgccatggtactcaacaactacgcctatttcctctcgctcgaagggcgtgaactcgaaaaggcgctcacgatgtcgagccgcgccatcgccctcacggacaacaaccccacctacctggacacccatgcctgggtgctcttcaagctgggacgcacggccgaggccaagaaggtgatgcagcaggccatcgccctcgacgggcaggagagtgcggcgctgctggttcattacggggatatccttcatgccatgggcgaacagttcatggccgaaatatactggcgcaagggactcgaaaagggctacgacgccgaccagatcacccgccgcatggaacagggcaaagccgaaaaagagtgaccgtgatgaagcccgcccgcatactgaccctccttttcctgttcgccgcctttaccgctgcggcgcaggggggccgcgatgccatcgaagagcagaaacgggtcatcgccgccctggaaaagaggattgccgacgaggaacgcgcgatctcgaagatacaggaaggccgcgccgccaccgaggaacgggttcgccgcctggcgcgccagctcgactcccgcaaccaactgctcgaagagaccgagaagcaggtgcgcctgctgcgcaaggagatatcccgtacggacagcgtcgccggcgatctcagctcggccctggaacgcaaccgtacgcagtatgccgagatggtacgcgaggcctaccgcaactataagcacaacaattacctgacctacattttctcgtcgcgcgacttcgccgacgtcgcgaaaaagatcaccaacctgcgcgaggtggcttcgatgcgcgaacgcaaactgcacgacatcgccgcactttcggaacaggtcgcccgcgagaaggagctgctcgaccgtcgcaaacgctcgttggattcggtgacgcagaacctcaccgcccagaaacagaagctccagcgcgattcgcgcaacgcccgggccaatatccgccaaatgtcgcagaaggagaaacaggccctgcaacgcaaactgtcgcaggaacagcaactcgacgtggccatcagcgagctgcgcaaactcaccaaaggcaataccgagggtgcgtcgttctcgaccaagaccacggggctgaggcttcccgtcacggccggttcggtaaaacgctacaaggaaaacatggccgagatcgccggccccaagggtgcgcacgtcatttcgatctacgacggaaaggtcgtcgaaatcaagcgcaaccgcatcaccaacaaatacgacgttttcgtggctcacggcgaatatataacctcctatgccaacatggggtcgatctgcgtcgaaaaaggccagaaagtggcaagaaacgaacagttgggcaccatcggctcgtcggtcaacatcatgacgatggaaaccgagtacaaactggtattcggcatctacccgccgaaccccggcgagaagctccgcgccgaaaactgtttcaaacggtaaaccccggcgataaacaccgaaccgggaacccttccgaacgataaacaccgacaataaataccggatcgggaatccttccgaacggtaaccccggacacgccacgccgaaaaaccgtttcgggcgaaggataaatcccatcaaatatttttggcaacggcgggcagaaatccccctctaaacctggccacctctcccgtcgaccttttccggatcaaaaaaaacttttccgcagccctgtatctggccagaacggaatacaacagcgggatcccgcaaaaacaggatcccgcttaccaattattccggaaagtcgtcagacctccggcgaatcgaggataatcaccgggtcgcctatgttggcggggatttcgacccaaaaccagttcaggtcgcccggtttgtcggccccatccacgcccacgacatagtagaagagcttgtcccctgccttgaacccggcgccgttgttattgaacttgtgctcggccgtgtccatataaacgcccggcacaccgtcctcgtaatccatcaggatataaccgatcagcgtcttttcgtcatcatacccttcgccgatgacattcaccgtctcggtactcgaataaaaatgcgcacacttgacattggctttgttggcgacatgcaacgtcccctttccgccgactgtctcataggagaattcgacatcgacccacggcgacgtcacgacgaccggctcgtcggctgtcgtcgtcgaagccttcgccggatccgaatcggtatatccggggtcgtctccggccagcgcaacgacttcgaacgtatatgccgtagcgggttttagccccgaaaaagagacttccacggcatcatacgaagcgatctcagccacgacgacctcctgtccaccttcggtcgtcagcagtttataaccgaaagcagcagcatgctccacggccgtccacgaggccgcgaacgacgtgggtttgacgtccttgaagacaatcccgggcgaagcgagtttcacaggctgcggatcgggttcggatcctttgtcgtcatcacatcccgaaaacaacgccacggcaaagaaagccgcaaacgcggtaagcattttgaagattttcattttgagagatttttgggttaatacttcgtgacgaggcaaatataacggtttttccgtatcgttattcgccccgatatatcaataagaaattgtatatcagaacaatatgaaacaaaaaaccaggacatggcggcaatgtatccccgggtcggaaataaaagttacgatccgtaactaaaaccgctccctttctgaaaaaatattttttttaattttccggaatttccctgcggggaaggcagatgcagcttcggaatgccacccggacacggacaacgagaaaaagcccgccgggacgttttcatctgtattatttttgtacttttgcaaagatttacagactgattacggcctcgggccgtccttcaaacatggcaatacgatactataacgacgattgtaccttccggctgccgcagaaacgcctgacggcggcatggctgcgcgaagtggccgaagcggaagggtatgcgctgggcgatgtgagctacattttttgctcggcgcaacggctcctggagatgaaccgccagtggctcgggcacgactatttcaccgacgtcattacgttcgattacagcgaccgcaaaggcgaacgcatcgtttcgggcgacattttcatcgacgtcgagaccgtagccgacaatgcccggcaatacggctgcacgacgctccaggaaatgcgcagagtcatcgtacacggcgtgctgcacctctgcggccagggcgacaagacgccccgcaccaacgcgcagatgcatcgcaaggaggataaataccttaaattctgggagaacccggagaataatacctgaatccatgaaaacacgactgttgattcttcttatcggattactgtccgccggctgcctgggacgcaggacagcgaatgacaacacggataacaacgttacagcagccttgcctgccgccgattccgccgtcgccgaaacggccgtcgccgaaacggccgtcgcccctgtgtgcgattccatccccgaagcaaacccggaagcccggaatttcgaacggcacgggcctttcgtggagaacgacacgacgttcctttaccaatcatcggtttacgatcccgaacacgaccgcacctcgcattgcagggcatatatcgaaatgaaccgggaatcggagtcctaccgcctgctcgccttgtgcacgacacccggttacaacgattggaacagggatagtttcgcgcaataccttgaattactcaaggagcagcatcccgaaccgctcccggtctattcgctgcaagagtgtccccgagcatggattccgatatgttcctaccggggcaagtattacgtggacatgctctactggtatccgatatggatcaccgaatcgctgttcgtccggcaaatgatggacggcccttttccttcgatcatcgacgctttcgagcgcatcgaccccacgcactactgcttccggacaacggcgggttatctggatatacagcaggtagacgtctacatcgtggatcccgtacgcaaaatcgccgttttcgcgttcagcggagaggagccggaaaatccccggtacctcggtctttatgccccgcctgaaacagtccgcgaaatggatcttatcgaatgggatttcacggagtcgcccgacggagacgaaatcgattgggacgagcctgattacgaggccctgatcgccgggaggaacaccggcagcgtcgatctgcagacagaaaacaaaccagaagaatgacactcgactacgatataatcgtcatcggaggcggacatgccggctgtgaagcggcctcggctgccgcacgcctggggtcgcgcacgctgctgctcacgatggacatgtccaaaatggcctccatgtcgtgcaacccggctgtcggtggagtagccaagggacagatagtcagagagatagatgctttgggaggacagatgggacgcattaccgacctcaccgctatccaatttcggatgctcaaccgttcgaagggtgcggccatgtggagtccccgtgcacaatgtgacaaaacccgtttctcggaggagtggcgccatacgctcgaaaacacgctgaacctttacatctggcaggacgccgccaccgaactgctgttcgacacctctgcacctaaaccacgcgtgacgggtgtacggacacgcatgggcatcgaattcgcttgtaaagccgtcatacttaccgccggcacgttcctcgacgggctgatgcactgcggcacatcgcacgccgagggcggcagggcaggagacgccgcttcgcacgggatcacggaatccctgcgcgcaatcggattcgaaaccgggcgtatgaaaaccgggacacccgcacgcctcgatgcccgcacgatcgacttcgaaatactcgaaccgcaatacggagatgaaaacccgaccaaattctccttttcacctgacacacaaccggttaaaaaccaactcccttgttttttggtctacacgtcggccgaggtgcacgacatcctgcgcacagggttcgaccgctcgccgctgttcaacgggacgataacgggaatcggaccgcgctactgcccgagcatcgaagacaaactgcgtacattcgccgacaaagaccagcaccagctcttcctcgaacccgaaggacgcagcaccaacgaatactacctcaacggcttttcttcgtcgctgccctgggaaatacagttggaagcactgcataaaatccggggattcgaagacctgcacatctatcgcccgggctatgccatcgaatacgactatttcccacccacgcaactgcaccattcgctcgaaacaaaactcgtttccgccctttatttcgccgggcaggtcaacgggacgaccggatacgaagaggccgcagcccaggggttgatggcagggatcaatgcacaccggatgctgaaaggggaggaggccgtcgtattgcagcgcgacgaagcctatatcggagtgttgatagacgaccttgtgaccaaaggggtggacgagccctaccgcatgttcacctcgcgtgcagaataccgcatcctgctccggcaggacaatgcggacatccggcttactcctatcggatataaaatcgggcttattacccaaaaaagatatgactatttcgtcaaaaaaaatacgctcgtagaatcgcttatttctttcactcgccaacagagcatcaaagcagccgaaattaacgactatttaaaagcaataaattccgaacctttatcacagggaaggaagctttacgacatactaatgcggaataatgtttcgttcgattcgctgcaagccgtcctgccgaagctccgaaaattcatcgaaacgaaccggatggaggaagaggtgatcgaagaggcagaaatccaaatcaaatataaagggtatattgagcgcgaaaaattcattgcagaaaagctacatcggctcgaaaacatacgaattcccgcggatttcgactttcactcgatgaattccctgactatcgaggcccggcaaaaactatcccgaattcggcctgaaaacatcgggcaagcctctcgcatacccggagtttctcccgcagacgtaaatgttctcttggtaaaattcggaagatagggtagtgttccacgtggaactatcaacccacaaacacctttcaaaataattaaaccacgagattctgtaaagattaacacttccatattcttcccgaacaaccaccaaagaagacatgtttcacgtggaacatatacataaaacccttaaacacaaacaagacaaaaagaggccgctatacagcggcctcttaacaatatattcgtattctacaaaacaatcgtacaccaattatatttatcctcagctcgtccgtactgaatatcctgcaatcgggtatataattccagagaaatcttaccaaccttatcaccataagagtaggttttctccgtctgcatgtcatagatagtgccgataggggagatcacggcagccgttccgcagcctccgcactcctcgaaagaggcaagttcttcgaccggaatttttcggtcttctacctcaagccccatatcgcgggccagctggcggaggctcatattggtgatcgacggaagcaccgaagaggatttcggagtgatatatttgccatccttgatgccgaagaaattgcatgcaccgcactcttcgatgtatttatgctccgcagcgtcgagatacatgatattcgaatagcccattttatgccctttttcacccgacaaaaggctggccgcataatttccgccgactttcacatcgcctgttccacgtggagcagcacgatcctgctctcggtcaatggcaaccaggatcggcttgattccctccttgaaataagcacccacaggtgaacagtagacaatcagcaaagcatcctttgcaggtttgacccccagaccggccgtcgtgccgaacatcaccggacgcagatagagcgaagcccctgttccgtagggaggaatataggcttcattccgccgaactacctcgacgcaggcattgacgaccatttcgacggtcggcagcggaaggcaaagacgttcggccgaagacaggaggcggcgggcattgtcctcgacacggaacaggcggactttcccatcgactccacgaaaggccttgagaccctcgaaaagttcgatgccataatgcaggcacgaagccgacatgtgcatcttgatgtactcgtcgctcgtaacctccatatcactccatttaccatccgtaaaataataacggacgttgacgtcggtcttgtgatagtcgaaccccaaggcactccaatcaatattttccattatagtaaaatttaaaggtttttctaaattatccccacagcaaagtaaaccgggcaaaaacaaaccttgaaccgatcctttcctcgcattatcctacgatagcaccattattcgtatttccgttggggcccagcagcagcagtttccccgaagcatcttcggccatcaggatcatgccctgcgacacgatccctttcagttcgcggggagcgagatttacaagaaccagcgccttgcgccctatcagctcttcgggcgtaaaatattccgctattcccgaaacgatcgtccgctggtccatccccgtgtccaccgtcaatttaagcaatttcttcgtcttggcgaccttttccgccgcaaggatcgtagaaacccggatatccattttctggaaatcgtcgaattgtatcgtatctttctgaggttcaatattttgcaaattttcagcagccaagttagcctctttcgtcgccgcaagcttgtccaactggcgctggatcacgtcgtcctcgatcttctcgaagagcaacgacgcctcgccgatcttatgcccggcagcgatcagatccatagccccgaggcgctcccatccgaatttctccacggcgagcatcttcaggatcttcgacgccgagaaaggcatgaaaggctcgatggcaatcgccgtattggccgtaatctgcaacgcaatgttgagaatcgttttcacgcgcccggaatcggtcttgatgactttccacggctcggtgtccgccagatacttgttgccgatacgcgcaatgttcatggcatccttcagggcttcgcggaaacggtagttctcgatattggcctcgagcgaacccttcacggcagctacctccgcaactgtctgacggtcataatcattcatctctccgcaggcaggaacttctccgccgtaatatttctgcgtaagcaccagcgcacggttgacgaaatttcccagcacagcaaccagctcgttgttgttgcgggcctggaaatccttccatgtaaagtcgttatccttggtttcgggggcattggcacacagcacatagcgcaatacgtcctcctttccggggaactcctccaggtattcatgcagccataccgcccagttgcgtgaggtcgaaatcttatcgccctcgaggtttaagaactcgttggccggcacgttctcgggcagtatataacccccgtgcgccttgagcatcgaggggaagacgatgcagtggaacacgatattgtccttgccgatgaaatgcaccatcttggtgtcttccgacttccagtacttttcccaatcgggggtaaggtctttcgtggcggatatgtaaccgatcggagcgtcgaaccacacatagagcaccttcccttcggcaccctccacgggcacggggatgccccagtcgaggtcacggctcacggcacggggctgcaatccgccgtcgagccagctcttgcactgtccgtaaacattcgtcttccactccttatgcccatcgagtatccactcgcggaggaagccttcgtattgatccagcgggagataccagtgcttcgtctcccttttgaccggaaccgaacccgacacggcgctatgcgggtcgatcagctcgtcgggcgagagggtagacccgcatttctcgcactggtcgccgtaggcacggtcgttcccgcatttgggacaagtaccgacgatataacggtcggcaaggaacgtctgcgcctcctcgtcgtaatactgcatggaggttttctcgatgaatttcccttcgtcgtagagtttgcggaaaaattccgatgcggtcgcggcatgggtcgccgacgatgtccgcgaatagatatcgaacgacattcccaacccctcgaacgactttttgatcaggttatggtaacgatccacgatctgctgcggggtcaccccttccttgcgggccttgatggtgatgggcacgccgtgctcgtccgatccgcagaccgaaatcacgtcgcagcccttcagccgcaggtaacgcgtgtaaatatccgaaggtatataaactcccgccagatggccgatatgcaccgggccgttggcataggggagagccgatgtaacgaggtaacgcttgaactcttttgccatattaaaatatacagtattactaatttctgtcaaaattagtaatttttaggaaaagaaaaagcaaagccccattatttgtttacaaactacaagggcgccccgctgtaagaaaacaaaacggaaaccgcgggaatgaatcggcccgcattaagcagcgggtaaaaatatgccccggcgtagtccggggcatatttcctaattatcggcggtcggaatcgttattcgaacaccagctcgtcgagcagccatcctgcacccgcgtacttgtcgatgatgaacagcacgtagcggatgtcgaccgatatcgtgcgctgcagatcgggctcgaaagccacatcgcccgacatggcttcccagttaccgtcgaaagccagcccgagcagtgcgcccctggcattcatcaccggtgaacccgaattgccgcccgtaatatcgcagtcggcaaggaacgccaccggaagttcgccttcggcattggcataacggccgaaatcgcgcgccgcataaagttccttgagtttttcgggcacggtaaactccgtggggttctgcggattttccttctccattacgcccttgagcgtcgtatagtagttgtattcgatgccgtcggcaggcgaatagggcagcacgcggccataggtcaggcgcagcgtgaagttggcatccgaagcccacgcctttttcgggttttggagcatcagccccgccacgtatttacggcttccctcgtaatatttctccacgatcggcttgcgtgcctgagaaagcgcattatacttctcccacaccgatttcacaaacggggcaatggggtcggcggcatatttatcggcagaaaacgaaccgatcagctcatcgaccttttcctgcgatgtaaagagcgaattatcgaaaatataatccacataggcatccgtatcgccgttgaattccttatccacgatctccgtatagaacgacggcaggtcggtcatgtgctcgcgggcgatcttcagcatgcgcttagccaccttccggtcggtcggggcgttgtaatccttataccaaccggccatcgcctttcgagcctcttcgggatactttatctccgtccgcccgtcgaacatttttgcgggggtcagtatttcgaccgcacgcaggaaagcctcttccagatactggcggttatcgtcgatgccggccagcccctcgatcgcttctcggattttcggcagcgcgtcgatatacccttcctcgggcagcgtattcttctctgcccacgcctggaaggcagcttcctgctgctgcttgcgctccttaacacccagtttgaggatgccgcgagacttgccgatcgaattcttccagtaattcgatgaaacagcatatttcgaagcatactggatacgtaccttgtcgctggcagccatgtcctccttcaggatcgcctggcgctcgccgcggataaagatccggttgggattcgaaacgttcagcatgtcgtcgatctcatacgaagtcatataacgctgcgtggaacccgggaaccccatgatcatggcgaaatccccctccttgtaaccgtcgagcgaaatcttgaggaacttctcagccttgtaaggacggttttcgggcgaataatccgccggcctgttatcctgtccggcatagacgcgaaacaccgagaaatcgcctgtatggcgcggccacatccaattgtcggtatctccgccgaacttgccgatcgacgtagggggcgttcccaccaggcgcacgtcggtatagacctcgattacgaaggcaaaatactggttcccttcgaagaagggcttgacctcgaccaccatgccggggttggcctcctgcaacgaagcggtcaggccggcgatattctccgaggtgatccgttcgtactcctgctgcccggccgtggaaggcacgttgcccagaatatccgcagtcacatcgctgatcgaacggatgaaacgcaccttgagccccggggcaggaatctcctcctgccgcgacatggcccaaaagccgttcttcaggtagtcgtgttcgaccgacgacagggattgtatcgacccgtagccgcagtggtggttggtgaacagcaggccgtcgggcgaaacgatctcgcccgtgcagccgccgccgaaaatgacgaccgcatccttgagcgaagatttattgatgctgtaaatatcctcggccgaaagtttgcatccgcgcgccttcatgtcccggatattcattttctgcagataaggcagcatccacatgccttcgtcggccacagcagtcagcgacacgcaagccgctgcaatcagtaaaaacagtttcttcatatatataaacgattatttgatgttgatcatgttcaggatcgaacgctcggccttgcggcgcacctcttcgtcgagcacgatctccggggcctcccgctcgaggcattcgcagatgttttccagcgtcaccatcttcatgtacttgcagttgttgcagccgcatgtctcgtcgtccgggggcgccgggataaaggtcttgtccggatagcgcctcttcatctcggcgaggatgcccgattcggtgacgacgatgaactcatcggccccgctgcggccgcaatagtcgaggatcgcagccgtcgaccccacgaaatcggccacctcgatgatataggcccggcattcgggatgcacgacgacccgggctgcggggtgctcctttttgagccggagcagtttttcgagcgaaaactcctcgtgaacatggcacgccccgtcccagatcaccatattctcgcggccggtcagcttcctgatgtaagcgcccaggttgcggtcgggcgcgaagatgacggggcggtcggccgggatcgactccacgactttcagggcattcgacgaagtgcagcagatatcggtcagcgccttgaccccgacggtcgtgttgacatacgaaaccaccgtatgccccgggtacctggccttgaaggccgcaaagtcgcgggcgtcgcacgattcggccagcgagcaccccgcctcgggacaaggtatgagcacctttttgccggggcatagcaccttggcggtctcggccatgaaatgcacgccggcgaacaggatgatttccgcatcgaccgactgcgccctgaccgacagcgcgagcgaatcgcccaggaagtcggccacctcctgtacttcgggcagcgtatagtaatgggccagtatgacggcgtgtttcccgcgtttcagttcctcgatccgattccggatttgcgcggagttatcaaccttcattttttatttttactttttaatttaaatttaataagaaataagaatagaaataatagctgttgatactgttcacaagtttccctggaaaatatctttcaacattttattcccatgcttttacctattcttcgttacaaccggttcgtattcaaaggtatgaaattataatcaacaattgtcaaaaaacgttgtcaacatttcgacagccgtttgttgtgaacaatctgttccgttttccggggttcggggctgactataatttcccataactttttttggtttccggaaaatcttgtatatgcccgccctttccggaatttgcaactcttccgaccggaaagttatcattagttatcgccgtttatcaacacgcttcctaacacgatttcatcaccttttcgacaatcttttccgcgattccgcggtaccatttttcgacgcgcggatctatccccgcagcaggcctcccttcgtcggctccttccatgatcgactgtacgataggtatttcccccaggaaatccacgccgtgctcttcggcgaaccggcgtgcaccgcctttgccgaagaggtagtagcggttttcgggcagttcctcgggggtgaaccaggccatgttttcgatgattcccgccacggggatgttgacgttttcgttgcggaacatctccacgccgcgcacgacgtcggccacggcgacctgctggggcgtcgagacgatcaccgcggaatcgatcttcagttccccgatgatcgagaggtgtacgtcgcccgttccggggggcaggtcggccagcaggaagtcgagcgtcccccatttggtctggtggatcatctgtttcagggcgctgacggccatggcgccgcgccatagcagggcgtcggtaggtttgatgaagaacccgatcgacatcagccggatgtccatcggctccgcagggacgatatggtctgcgccctcttcctgcacggcgtcgggcaggtagccttccactccgaacatcttgggctgcgaaggcccgtatatgtcggcgtcgaggatgcctacgcggaatcccatgtttcgcagggcgaccgcgaggttggacgtgacggtcgatttgcctaccccgccctttcccgatgcgacggcaatgaccttggcgatgccgcccgtggtcgtcttcagcttgggttcggggcgcggggcggcgccgccctccttgatgactaccagtaccgtttgaccggggaattcgcgtttgagcagttcctcggcctggtttttgattttcactgcgaacgggtcgcgcgccttggcgaagcggagtacgacggtgatttttccggccgccgaggcgatatgctcgataaaaccgctgctgacgatgtcctgccccgtttcgggatggacgagcgacgcgagcagatgtctgattttttcttccatatttgtgtagtgactttccttgcaaagataacgtatattttacagaataaatataggttacccttcttttttatcgaaaaacgataaattttatttgtttttcatataatttctgtatatttgcgaaagaaaaccggaatcggaacaaaattaggacaaacaaaaaataacttcgttatgaattttatcaaaactttcctggctgccatcctcgcgtttgtcgtggggtcggtactggtagtcttcctttggattttcatcctgctcggcattgccggttcgatggagaaaagcgtggtcgtacactccgagtcgatcctcaagctcgacttttcggaggtgttgaccgatgccccgtcgagcgatcctttcgccggcttcgatttcgcgacgctccagtccacgcgtatgcttccgctgatgaaggcgctgcgtgcgcttgaggcggcgaaggacgatccgcggatcaagggtatttacctgcgtatgaacggcaacggcggagtggcgggttcagccctgctcgaagagctgcgcgaggcaatcgtcgatttcaagcagagcggcaagttcgtcgtcgcctataacgaaacctactcgcaggggcagtattacctcgcttcggcggccgacaagatttacatgcagcccgaaggagggatggactggtcgggcctttcgttcaatttggcgttctacaaggggttgctcgacaagctcgacgtcaaggccgaggttttccgccccacggcctgcaagtacaagagcgccgtcgagccctatatacttcccaaaatgtcggacgctaaccgcgaacagatgcaggaactggtcaattcgatgtggaataccatcgccggttcggtggccgaggcacgcggcatcgacctggaaaccctgaaccgaatcaccgacaaactggaggtctcgctgcccgaggatgccctcgaacacgggttcgtggatagcctgctctacgaagatcagatgaacgacgtctttgccgagctgggcgtgcagtccgattccgacggccaatacaatttcgtcaccctgggcgaatatgcgttgcaggtcagtgccgacctcaagaatatttcggccgaccaggttgctatcgtatacgccgacggtgcgatcgtcgacggcgagggcttcggccgcgagatttacggcaatacgctggctgcgacgctggccggtgtgcgtgccgacgaaaaggtcaaagccgtggtgctgcgcgtgaattccccgggcggcagcgcattggcttcggatgtcatctggcgcgaaatggagctgctcaaggccgagaaacccgtcatcgtctcgatgggttcctatgcggccagcggcggatactatatctcgtgcccggccgatgtcattgtggccgacaaactgaccctgacgggttccatcggcgtcttcggcatgtacctcaataccatcgacgccctgaagaacaagctgggcattacgttcgacgccgtgaagagcaatacctcggcaggcatgggcatgacctcgcctttgacgcctgccgaaagggcttcgatcatgcgcggcgtggataaggtgtacactacgttcacgaacctcgtggcgcaggggcgcaacctgcctgtcgagaaggtgctcgacatcgccggcggccgtgtctggtcgggcgacaacgccctcggcatcggcctgatcgacacgtacggaggcctgaagacggccatcgccatcgctgcggacaaagccgggttgggtgacaatttccgggtgacggaggtgatcgagcaaccgacgggtttcgcggcgttcatctcgtcgctcaacgtcggcatccgcgaagccatgacccgttcggaactgggagtcatgatgaaggaatacaaacaggtgcaggaggcgacttcgcagcaggggatcgtcatgtactatcccttcaaactcgaactgcgctaatccccgtcggatgtcggaacgataaaaagcggcctctgcggaggtcgctttttctgtttgcagggcgggacggactgtgtgtccaaaaacacgtcaatcgtgccggaaaaggggtttgtcagcctttggcagggactttggccgccggcccccccccgccgaatcctgcccgcagcgcatttcatccagcttgcggcctatctcctcgacctgtttcgcgtcgggcgaaatgaccgtcgacccgaacttacgccggtagtcgcccggcggggagccgatgcgttcgcggaaggcgcggttgaaattcgagatgttgtagaacccgcagcgcataccgatctcggcgatcgggtcgtcggtctcgacgatcatctgcgcggcgcgcacgatgcggaagccgttgaggtagttccacaggttctggtgggtgtactttttgaaaaaacggcagaccgaagtcgcggacatgcctacttcttcaccgatgtcttcgagcgaaatcttacgctggtaattgttctccacgaactgtacgatcctgttgatccgggtattgccgtcgggatgcatttcgcagtacggggtgcctatcggcccggtttcgtccggccctgccgtggccaggtcgttgagtatgtccaggaaaagcgatgccgaggcgaatccccgcagcccgggcagttgcagtaacctgtcgcggacgcggtctacgacgctttcggcgaaccagagcccggcgaccggctggctcagcattttccggatggggagcatggattccgtttcgaatatctgccagttgggcatgtcgcggctgaactgtacggcgacggcctcgcaattggtctccgcaaaggcttcgtcgcgtttgtaacagtgcggtacgcgcgggaaaatgatgatcaggtctttttccgtaaaattgtcgaccgattgtccggtgacacgtgtacccttcacgttcagggtcaggctgagcatgtaatcctcgtggaaatgaaggggcggatcggtctgtttgtcaaaccaatactgtgtgatgaacagatcgttgcctggcaacggagtgagatcattcaggacacgtttcatcggataatgaggcttattgtaacaaatatacgaaataattaaggacaaatcaaaaccggggcgggttttgtgggaaggatacgcggccgggatttcccgcacctccgttttccgatccgggacggggcgtaaaggcatcctgcaggtgaaaagtgcggaaaaccttttctcctttcgcatttaatgaatatctttgcggatatggcagtgatcagattgacaaaggagttttcgttcgaggccgcgcatgccctcgacgggtacgacgggccgtgccgtgagattcacgggcattcctatcggttgttcgtgaccgtgaaagggtgccctgcggaggacgacacgaaccccaagtgtgggatggtgatggacttcggtgtcctgaaaggcattgtcaacgaggaggtcgtctcccgtttcgaccatgcgctcgtactgcgggcgacacgccgcgacgctcccctgcgggcggtgctggccgaacgtttcggcaacatcgtcacggtggattaccagccgacgtgcgaaaatatgctcggcgatttcgcggcacgtatcgcacgccgcctgcctcggggagtggagctgcattcgctccgcctgcatgagaccgcaacctcattcgccgagtggttcgccgaggacaaccgctgatttccgcccggcggttccgccggaacgacataccccgccatttttaccggacagcatccggtgcgcaagggataggcgcacggcaaataccgaaagggaattattattgacgcaacattgaatatatgaaaaaactgtttctcgtcgacgcctatgcgttgatcttcaagtattactatgcctttctgggtcgtcccatgcgcaaccgggccggtatgaatacctccgtggtattcggcttcgtaaagttcctgcgcgacatccagaagcgtgagcggcccgacctgctgggcgtggcgttcgaccccaagggaggcagcttccgccgggagatatttcccgagtacaaggccaaccgctccgagacgcccgaggacatcctcctctccgtcccctatgtcaaacgggtgctggaagccatgtgcatcccgatcctcgaagtcgagggttacgaggcagacgacgtgatcggcacgctgtcgcaaaaaggcgtcgaggcgggttacgaggtcttcatggtcacgcccgacaaggactacggccagctggtacgtgacaattgcaagatttacaagcaaaagggcgccgaggggagcatcgagatcgtcgaccgggaggcgatccgcgggaaatacggcatcgacgaccccagcctcgtgcgcgacatcctcgcactgtggggcgatgcttcggacaatatcccgggcgtgccggggatcggcgagaagagcgcctgcaaactcgtgcaggagtgggggacggtggagaatatcctcgacaacgtctcgaagatcaagggcaaacagggcgagaagatcgccgagtggggcgacaagctgcgccttgccaagaccctaaccaccatctgcctcgacgtgcccatcccgttccgcgaagaagacctcacggtctgcgaaccccatatcgacgaactcaaggccctctttgctgaattggatttcaaggcctttatgaacgaccttacgaaccttgcgccccccgaggagcaacccgaaggcccccgccaggaggcgcagacccagcttgcggagatggcacgggccaagtccgccgccgccaaacgcgcggcgctggtcggacagggcaatctcttcggcgacccggtggtcgagatgcccgccgccgaggttcccgtcgccgagcttcaggccgaagccgatgccatgcagttcaagacggcgcagaccacgccccacgattaccgccttgtggagaatgcctcccagttgcgcgaagtggttgccgaggtcgggaaatacggcgaattctgtttcgacaccgagaccacggggttcgatatcttcaacgaccgcatcgtcggcatgtcgctggccgtaaatccgttcgaagcgtggtacattcccttcaaggaggagaatacggcggaatatacgcagatcgtgcggccgctgttcgaagacgaagggattgccaagatcggccaaaacatcaagttcgacctgatggtgctccggcgcctgggactcgatatccggggccgcaagtacgacacgatgatcctgcattacctgctcgatcccgagtcgcgccacaacatgaacgccctgtcggaaaaatacctcaactacaagcctatcgagatcgaaacgctgatcggcaagggttccaagcagctgacgatggatctggtgaacgtcgagcgcgtcaaggagtacgccgccgaagatgccgacgtcaccctgcaactcaaacacgtgctctaccctcaggtcgagaagatcgggctgcaacacctctatttcgaggtcgaggagcccatgatcgccgtgctggccgacatcgagatggcgggcgtgcggatcgactccggggcgctggccgaatactccgtcgaactgagccgcaggctggccgaactggaagccgcgatccgtgccgaagccggcgaatcgacgctcaacatcaactcggcacgccagctgggcgaggtgcttttcgccaagatgcgcatcgccgaaaagcccaagatgaccaagaccaagcagttctgcaccgacgaggattatttgcagaccttcgcccgcaaacaccgcatcgtcgacctgatcctcgaataccggggtgtcaaaaaattgctttcgacctatgtcgaggcgcttccccagctggtcaaccggacgacggggcgtatccatacctccttcaaccaggcggtcacggctaccgggcgcctttcgtccaccaatcccaacttgcagaacatccccgtgcgcgaagagatggggcgccgcatccgcagggcgttcattccctccgattccgaccacctgctgctctcggccgattacagccaggtcgagctgcgcctgatggcgcacctttcgggcgacgaatcgctgatcgcggccttcgcccacggcgaggatatccatgccgcgacggctgccaaacttttcaacaaaaccctcgacgaagtgacctccgaggaacgccgccgtgccaagacggccaatttcggcatcatctacggcatttcggccttcggcctgagccagcggctcgaaatcccgcgtaaggaggccaaggacattatcgacggttatttcgaatcttaccccaaggtcaaggagtatatggacaatgtggtcgccaaggccaaggaggagggattcgtctcgacgatcttcggccgccgccgctatctcaacgacatctcctcgcacaacgccgtggcgcgtggcctggccgagcgcaatgccgtgaacgccccgatccagggatccgcggccgacatcatgaagatcgccatgatcaatgtccaccgccgtttcgcggccgaaggcatccggtcgaaggtgatccttcaggtacacgacgaattggtcgtcgacatgctccgttccgaacaggagcgcgtcgcggccatcgtcaccgaatgtatggaatccgccgccgccctcaaggtgcgcctggtggtcgactacggcgtgggcgacaactggctcgaggcgcattgaccgcgtcctgagtccgtttgcaagatatagtaacggacggcatcggatatgcagactccctgttaatgccttgtatccgttatatccgatgccaccgccgcctccttcttcggtgctgccccggcgcttttgcggacgcttgtcttgctccggcgtcccacggggaggcggcaggaaaaatacaatgttcgcggattttttgttttgatactgaaataaactgacagctatgatcgaacctatttaccagccggccgcgtcgcgttacgaagatggcatgacctaccggcgtgcgggacgcagcggtgtgctgctgcccgccttttcgctcggcatgtggcacaatttcggcagcgggcagaccttctccaatgtgcggcagatggcccattacgcgttcgaccggggaatcgtccatttcgatttggcgaacaactacggccctgcctacggtacggccgaggagaacttcggccgtttgatggagcagtcgttccgaccctaccgcgacgaactcttcatttcgaccaaggcgggttacgacatgtggccggggccctacggcaactggggctcgcgcaaatacctcatggcaagcctcgaccagagcctgcggcgcatgaagctcgattatgtggacatcttctactcgcaccgctacgatcccgagaccccgctcgaagagaccctccaggctttggtcgacatcgtccgcgcaggcaaggcgctctatgtcgggctgtcgcgctacccgctggccgcggcacgtttcgctttccgctacctggcccagcgcgacgtaccctgcctgcttttccaggatcgctacaacctgttcgaccgcgaacccgacacgtcgggcatcctgacgctcaatgccgaggccggggccgggttcgtggccttttcgccgctggcacaggggctgctgaccgaccgttacctgaacggtattccggaaggctcgcgcatggcggcggagggttcgctgcggcgcgacgtgctgacggagaggatgtcggaacggatccgcggcctgcatgaaatcgcccggcagcgcggccagacccttgccgagatggctttggcatggctgctgcgcgacaaacgtgtcacgtcggtcattatcggggcaagctccgtcgcccagatcgaagataacctccgggcgctggagcatgcatccttctccgacgacgaattgtcgcgcctcgacgccctgtcacggtcatagcgccctgcacggatgaaaagagccgcagtccttcgggactgcggctcttcgtgttttatgtctacgtccgggggcggctcaggctcgggggcgaacggttgcttcccgtggagcgcggggtggcacatgcgtccggaagctggatcagcctggcccccgagacgatgctcgtctacacctcgatggaatgaccgggcatttttccctgaaccggaaaaacgaatcccgcctctttcggggaagcgggattctgccttttcggacggggattactcttccgttttttggcctatgtagaagacgtaaccgtagtacgctttgtatttctcgtaatgggcgatctcgtttttctgcatttcggccagcaggagtgccttttcactgtgcctgtattgctccaggaatcccgggatgcgtgcgcttgcatgggcgaagtagttttccgtccagcaatgctcgggcagcgcgaaatgcgccagcggtgcatatccggcctcttcgaggatgcgcagtttccccgacgggctgtcaatgtcggggaaatagtccgagatgaacttcgacgtcaggcgtgcgcccgagagccacgagcactcggtcacggcgattatgccgcccggtttgaggtattgccgccactccctcagcccgcgttcgaacccgatgttgtagatcgagccttcggcccagatcacgtcgaattccccggggctgaagggcagtgcgtccatcgagccctgtatggccgtgacgcggttttccagcccggccttttttatccgggtgcggaattcttccaacagttccggcagcaggtcgacggccgttatcgtacaatccctgttccgggcgatcgtgatggtctgcccgccggtgccgcatccgatgtcggcgatccgcaaccccggcctgtcgggcacgaattccagggcgcggagcgtctgctccacgccgccgggcccctgcctgtcgagttccctgaagaaatcggcgatcatttttaaatcgaaatcgaagatctgtttattttcctgttccatggttgtttgtagttgaggccgcgcgcgggatggattgggaaatcccgtgcatggcgaattttttaaaataagacaaaatgaatatccgcccgggcagaatgcccccgggagggaagaatgggacggaatccgtgctgagggacggattcctacaatgccgaatccaaattaaacatccaatggttttagtcgttgtaaaggtaggtacaatttcccgaaccagcaaatccgtctgggaaagagctcccgggaaaagggaaccccgatcccttttcaggaaccggggcactccacaagaggcgctttcccactctgcatcagaatgatataccgacgcgtatgccgaaattattgaggttgttgaccgagtaagtcaggacgtcgccgctgttggtggcatagctgtaatagagtgccacatggaacccgaaacggtagtcggggcgcgggaagatgctcacgccgatttcgggcgagaggtagaatccccacgtgtcgttgtactgcttgacgacgtagtaataggacgaaagctcggcgtagttggcacccagcttcaggcccgcataaggctggaatacgctgtccgtaagccaggtgtaacggctggtgacgccgaacggcagctggaatacggagtgcttctggttgaccgtgagggccgaaccgttgcccaggtcgagtgtctggcgcgggatcgtttcgaggttggtctggtacgagatgaacgggcccacggcgatggccggcgtgatgaaatagccgccttcgaagttcatgccccagcccgaggctttgtcggccaggctgctgcccaggggcacgcctacctgccagtcgacgttgatgtagctgttcgggaagacctgtgctttgcccgtgcgcgcggcggcgagcaggacgacacagagtgcgatggtttttagaacctggtatttcgatgttttcataatcggacgtgtttttacggttaaattactttttcagataaggcgactggtcgaacgcctgttctacggcgtccaccgtgcgctgcaggttgaggctttccgacgaggtgagcaggccgccgatgtagctgtcccagatgacgggcagtttcttgccgctctgctggtcggcttccagatccagcatctcgatcagcagcgaaccggccgtataaccgtaatatacgcggtagggatagtgccatcccagccagtcgccccagtatccgggcgtccagtagtaggggtaataccaccaccagtagggatagtcgtaacccacgaaataggtcactttctgcacgtagctcaattgcagtccgacattggccgcctccttgtcatcggtgcgggtgtagccggcggcgttcatgcggccggcgaccgtgttgacgatctccagcgcattgtcgtctttccagtattccgtcttgtctgctgcgccgatcagcaggatgctgtcggggaggtagtaggtgtccagcgcaccgaagtcggcttcggtgtcgtaagcggtgtagaccagatagtctttgtggaggcccgatgtcgagggctctttctggcacgcgcaaaacgcaactgcaacgagtgcgtatgcgaggtaacgtaattttttgacggtcatgattttgattttttagtttgctgtctcggagcatgttcaaaattcgttccttccacacccttttcgcgcatggaaacccgatcggggtataaaaaagcggttttgcgatacgggagggtgccagcggagtgttttatggtcgggcacaggaatttactcctgtgtgaaacggcccttaaaggatctctcgatacatcctcgggctgaaagagcgtctttgcgggcttttcctgcgccatttttgaaaggtaatcgcgccgcattgcggcctgaagtcatcctttcgaacgggatcgttgccgtgccggtcgtaatcgttgggggtacggcgccgatttcggccggaaaatggttcgtcattcggaaaatatattacttttgtaactatctatgcataatgatcacaaggtatgagccgatacgataactgctcccgcgaagagcttctccgcaggatcgaagagctcgaagcacaactcgatacgccgaagggttccgggagccggttccgggagcgttatgcctgtaagattctcgattcgatacccgacatgctgaccgtgctcgaccgcgacgggacgctggtcgaactggtttccgcggatgagaccaaccatgtcggggttccgggcggagagctcgccgggcagaacatccgcacgatgctttcgcctgcggcctgccgcaatgtgaagaacaacctcgacaatgtttttgcgacggggtgcggctcttcgtcccaccacgacattacgctcgacggccgaacccgcaactacgaaaaccgtattttcccgctcgacggggagcatgccctctgcatttgccgtgacatcaccgaggccgaagctgccaagcatgaactggagatggtcaaatatgcactgaacaatgtcgacgaggagatctacgcctgcagcctggacggtacgatggaatatgccaacgagcagttcagggtgcggcacgatgtcgaaggcgaccgttcgcaacacaaggtttacgatttctggtcgtacgaaggttcccgtttgcagtgggaagcccggctggcgaaaatacgccgcgataacggctcgcataaatacaccgtccgcttcaagaacgagcagggacgtatcgtggcgtgggacatcgtggcctacatcatctacgactattttcaggagcgcgagatcgtctggttcttcggccgggacgtgacgcagcgcatcgaacacgagaacaaggtcaaggagatgaactccatcctggagtgcatcctcaacaacattccggtctatctgtttgtgaaagacccgggcaacgagttccgctacctctactggaaccgggcgttcgaggaatattcgcggattccggcctccagggcgctcgggcataccgattacgagattttccccagcccgaaggatgcggagcatttccggcaggacgacctgacgctgctgcgtacgggtgaacgccagaccttcatcgaggagtacgtctcggccacgggcgagacccgtatcgtcaatacttccaagtcgctggtgccggtcgaaaaccgccttccgctcatcatcggcgtctcgtgggacatcaccgacatgaagaatgccgaactggagatcgtcgaggcgcgtatccgcgccgaggagtccgaccgtctcaaatctgctttcctggccaacatgagccacgagattcgcacgccgctcaatgccatcgtgggttttgccaagctcatcggcgaggtggaaaccgaggaggagaaacaacagttcatcgatatcatcgacgtcaattccgagctgctgctgcaactgataaacgatatcctcgacatttcgaagatcgaagccgggacgctcgaattccgcttcaggccgatgaacctcaacgacctctgccgctcggagctggaagtccacaaaccccgcgtcaagccgggcgtggaactggtcttcgaggaacgggtcgcgaacgtggagatcgtctgcgaccagaaccgcctggcacaggttatttccaacctgctgaacaacgccggcaagtttaccgaagagggggagatccgcttcgg

SEQ ID NO: 317 - DNA, 71151 bp, Alistipes onderdonkii
  source 1..71151: mol_type = genomic DNA
caggccgccctgcacagcggcgccaacgacatggggtcgatcatgatcgaggagaacgtcgtctcgtcggccggagcacacaaccggttcgacgccgagggcattcgcgaagccatccgcgaagcgggtttcaccccgcgcttgcgcgaccagctgtaccggatgcgggaatatgccccacaagcctgaaatccgcccggacacggctggatagccacaatgcaataaaaacaaaaggaaatgcgataaacgcatttccttttgtttttccggcatatccgggcacagcccgcctaccgatcacggatggactccggcccgggcacgcctactcgattacggctacccagccgccattgcgaaccatgtcgatcttcacgacggtcgaagcatcgactttccgctcacgcttcttgtaatccatggcctgcagatcggcattcacaccgtcctcgaacgaggtcatcgtataactgcgtccggcaggcaggaaatcgagcgcgacctcggtggaatagggccggttgttggtaatgcccccgatgaaccaccggtcgcccttgcgacgcgccacgacgacctgttcgccgcaccgggcacgcagcacgcgcagctcgtcccaggtcgtaggcacagaggcgatgaactccgtgcagggatgttcgcggtaataatagaccgggttgtcggccatcatctgcaacgggctctcgaagacgacataaagcgccagttggtaggcgcgcgtccccgaggccatcgggttcgaacccgtcgaacggttatcctcgggctgagagcagaacatcccgcccggcgtgaagtccatggggccgacggcattgcggatgaaaggcaggtaattgctgttgtcgggtttgcagcggccgccctgctccatgccgagcaccgcctcgtaggtcagcaggttcgggtaggtgcggaaaagacccttgggagtataggagccgtgccagtcgacgaagatatgatgatcggccgcacacttggtcacgcgctcgtaatagttgaccatccactggtcgctacgatccatgaagtcgatcttcacgcccgggatgccccactcttcgagcgtcgtgaaaaggcgttccatgtccttctcgacggcgagccatgtcagccacagcacgatctgcacgttgcgctccttgccgtaggcgatcaggccgggcaggtcgaggtcgggattgggacggaatacgtcggtcgtcgatgccgaccagccttcgtccatgataatatagggaacgccgtatttggctgcgaagtcgatgtagtaacgataggactccgtattgcgcccggcacggaaatcgacccccgacaggcgcatgccgttccaccaatcccagctcaccagtccgggcttcacccactcccagtcggtatcggcagcgggagcggccagcagccacaccagttcgttttcgatcaggtcggcatcctccccggccacgacggcaaggcgccacgggaaaatgcgcgtcccctgcgtcctggcaataaagggctcttcggagagcaccttcaggctgcggtcgccatcggggccgtactccttcggcacgcgcgggaaaagcgattcgaaaccgccccgtccgtcgctcctgacgaacatgcaggggtagtcccgtacatcggactcagccagcaggagcttcttgccccccggcatcccgaccagcacgggcaggtagctcatcttatctgccggggtatattcggccatcgccacgcgggtataaggttcttcgtacatcgaacggaaaccgttcacctcggagagccatgcctcgcttccggcgggcagtcccagccggcactcttcgccgagcacctcgacctcgccgggcagcgaggtgacgaaacggtaggccacgccgtcgtcgaaaaggcggaactccaccgcatagttgccggcaaacctgagttgtacggcattatagcagttccggacgacagcatccttggtcgggttgcggcgttcgagcatctcgtcgaccgagaagcgtttcacgctgtgcaaacggggagcctcgcccagcgtgcggtcgtccagggtcagcgacaacgtacaggcatcgaggactttgtccgcgccgctccagacggtataactgatcttgtcagccacctcgatttccaggcggaggtttccgccgggcgacgtcgcaccgacgatcttggccgtagcggcaccggccacagccaacgcgcagcacaatgccagaagtcgtttcttcataatataataatttaggtcggatacaaagatagcaaaaaaacgacaggagagccgcgatattcccgcggccctcctgaaaaaaaacgaacctgttattttaccgtaatcgagttcagcaggtcgaccttaccctcgttcaccagcttgaggatcagctcgccgaacagcgtgttctgccaagcgaaccacgagcgggtgaaatccgtcgggtcgttcacattgaacgactcgtgcatgaagcccgtcccggcatcggtagtcatcagcatctctacgcagcgcttgatctcggcatcgtcctgcgaggtaaaggccttcatcataatgctcatcggccaggccatgtcgtaaccgatatgcgggccgccgatgccttcgcccgccgaaccgcggaagaagtaggggttcgcctcgctccacacgaagcggcgggtattctggtagatcggatcgttcacgtccatgtcgcccaggtagggcatcgccagcaggctcggcacgttggcgtcgtccatcaggaagcggttgccgtaaccgtcgacctcgaaggcgtagatcgttccgtattcgggatggttgtaggtagcgtatttcttgagtgccgtctccacctcggcagccagctcggtgcactcggcagccagcgcggcctgtccgttgacttcggtcaggatttcggcagccttgcgcagcgaagtcacggcaaagaaattcgaaggcacgagaaagaggaacgtcgtcgcatcgtccgagggacggaataccgaagcgatcagcccgacgggattcaccggattgcccttgcccatgttgcagaccgtatcaagctggcggtcggtcacacgcatgaacgtataggggccgacaccctccttgcgctgctgctcgcggaaggtcttgagtatgttcctgatggccgccatccaatgttcgtcgaacaccgaatcgtcacccgtcaccagccagtattcataggccaggcgcaacggatagcacaacgagtcgatctcccacttgcgttcgtgcagttcggggcgcatctgggtctggtcgctcatccactgatggtcggggttcgggtcgtaggggtcgaggaacgcattggcatagggatcgagctcgatgcacttgaactggcggcggatcacgccggccagcatactgcgcaggtgctcgtccttgttggccagctggaggtagggccacacctgcgcacccgagtcacggagccacatggcatggatgtcaccggtataaaccaccgtatcgtccttgccgttgtcgtccttgcggtagcgcaccgtcgtgtcgagcgtgttggggaaacagttctcgaacatccaggccagcttggcattggagagcacgcccttgatgcgcgcgatctcggcctcgacggcctcggagcggaacagacgctcggcctcggccggacggttggtcggggcatattcttttacgatcttcgctttgggcctggccatccgcgtattgtccataatcataaccgcggcttcggtttccggagcactgctgcggagcgccgaggcgtgtgccgaaaccgtaccggccatgacaagggccgcagcaaggcaagcccgggagatgtttttgtttttcatagtcgtttacagaattactttattaaggttttaagttatcagtacagggttacggggccgcgcaggccgagctccttgttgagccgctgcgcccattcccagcgggcagccgtcggagtatctgcggcacgggccttggcatagttggtcagcactgtggtaacacggatcgtcaggacattcgtgcccttacggagtttgcccgctacgtcgaacgtacgcgcaccataccagcgcacgcccgcaggctcgccgttgacgaaaagttcggtgatgccgttatgcgtaaggccggcatcgagcgtatggtaggccgccggatcttcgacatcgaccgtgcgggtgtattcgatggtgccggcgaagctctgcaaccaggggaacggcaggctgtgcagatccacgaggtcggtcagggagaactcccgggtgctcttatccacatggtgcgtggctctgacatcccagatgccgttgagggcaatggggttcgcactgcggggtgcaggtgcgggcagcatttggccgccgcggtctttctcgaagacgatgaatttcgcctcggcaggcgtcaggcacaactccagcgtaccgtcctgcacgtcgagcatatgccgcacgcccgtctcggcatcccagacccaggcctgcttggccgccacctcggcggggaattcgagccgggtctgcatggaacgttcgatcgaagagttgacgacgaaatagatatccctgtcgcccgacttgtaatagttcatcatcataaaacggtcggggtcggagattttcgcataaggggtcaggccgtattccgcctgcaaggtgcggtaccagccgagcatatccccctgcggggcatcgacacggacaaaacggtcgggccaggtcgccacgacacggtcgatgatcgccttcacacgggcatccttcgccgcggcatcacggaatccgagccccttgtggggcaccttcccgatggcgatcacacgtccgcccgccgccacgaagtcggcgatgcgcgcagcggttcggggttcgaggctctcgacctccatcagcagcagggtcttgtagctgcgcgaaccgaagcggagccggccgcccgcgacggacgactggcagatgaccttctcgctgacatagtcgcagccgttgccgctctgctggacggcctcccagaggtcgttggcataggcgggataggtgacgccgggataggggtcacgctgcatgccgtggatcgaccaaaggtcttcgagcggcggcaggatggcgatgtcggcctgatagacgctgttctgcaaaagagcggagacacgcgccttgtaatccatccacggacgcacataaggccaccacgtattgttctcgttgaaataagtaccgaactgtatccagccgaagaaatccttctggcgggggctgtaattgaagccgtggagcaccgagtggttgacgcccgaaaggttgctgcggtcgcccgtcaccttgacctcctcgagcgtggtctggaagatattgcccacgttggtctgctcttcgcagctcacgatgttgcggttggccagaaacgctcccgaagagacgaacttgttgaccatgctgtaaccgcgtcccgaaaggtattggttgggctccatcacccggccgatgccgtcgtgtatccacgattcgcattcggggatgtcgagatacatcgacgtttcgacgggatggagctggtggccgtaagcctgcacacgcgatttgagcccgttgcggtggcaccagtcgttgtagacgtcgatgaagttttccttgaagagctgcatctgcacgtgccagaaatcgtggcggacacgctcgatcacgtcgcgggtcacctcgggcgagaaactgctgccgtaagcctcgcggacgggttcgcccatggctccggtacgctggaacacatagggcaggaacggatcgagcgagtaacccatacgcttctcgaactcggcgaacatgccgggcgtccagttgttgccttccagctcgaaactgtcgcagaacgccgcgcggatcttccccttgagtttgccgcgggtgaaatgcatcgcatcggaaaatttatcgaggtaacgctccacggccttgccgtcgaggtggttcaccacgggcccgctggcgcccggagcccccaggataacacgcgaatagccgttcagcttcacgaaaaagtagaggacatgttcgccctcggggacatcgaccgtgatggtatcgttgccggcctggtcgtcgtacgaaacgccctcggtgaaatgggcgacatgcttgggcatcaggcggatgaacagaagctccttggtcgggttgctgcggggattggccacttgggcgttggccatgtcgagcacctcgtcgcggccgatggtaaaccggccgcccttgacatcgaccgtaacgggatagagcatctgcacctgctcctcgggcgcaaggtattcggcgccgaagggccagcccgagccgacgatgatgtcgcagaccatgccgcgctcacggcagccgtcggcagccacgttgaccatgcggatccactcgtcgctcagccatgtcagcgcggcacagcctaccgtatcggcggtctggtcggggaactggatggtgttgatctccacgccgccgatcccggccttgtgcatcacgtccagctcgcgcaggatctcctgctcgttcacacgggcgccgttccaccaccagcgcacatagggacgatggcgcgcgtcgggattagcgaatgttttatacaactctttttcggggcggaaagcctttgccacgggcaacttttccgcaaaggcgatccccgcggcgaataccgcggccaatagtatgaagaagatttttcgtttcatcaggttgcaggttttgtgcggtttatttcagtccgacgccggacatgcggccgtacatctcggccatggcaccctgcgtgagcaaccacttctcagcctgtttgtccgcgcccgtaaaatcggtttcgaacagcccgcgcccgtcgcgcgcatgatcccaggcatagtccagactgcgctgcacggcatcgacataggcggcattgccgtcgatgccatagagttcgacgagcccgcgcaccatcacggccgagaaccacacgttgcccttgcggatgatgcggaatgcctcaccgtccgcgggcgtgaattcctcgaagaaatagtcgtagcatgcggcggccgtgcgctgcgcatctttcaggtagctttcatcgcccgtagccttgtaaagcagcgcccccgcctgtaccatctggccgctgttgtaggcaaacttcgcacggccgatattgccgtcgagcgacacgttatcgaaatagagcccgtccccggtgtcgagcaggtgctcctttgtccaggcatagagccctttgccctgctcgaggtagcggccgtcgcccgtcgcggcatagagtttcagcgcataaaccgttcccggagcattggagcaggtattcttcgaatgtttcttctgttcgcaccagtagataccaccgcccagcacgtcgtccgtgccgctctcgatgaatttccagatcatctcggcctgggcgaggtatttcttgtcgcccgtagcctcgtagatatcgcagaagtcgatgcccagccacacgttgtcgtcgtagaaacgatccgacgccggagccgtattgatataggaggcataagccgccggcatccgcgtcgtgtcgaggtactcggccaaccccggcagcacacggccgtcgagcacgctgcgataggaggcatcctcctcgaggatcgtatttacagccgagagcgttcccgagaagggccacaggtaggaatagggattcggacgcgcctggtcttcggaggcgagataacccgctttgtaatcggcattgaacggatagttttcgcgcaagaggcagcggtcggcgacgccatacgaggcatagaccgaatcgagcgtagccttggcacgctcgaggttgcgggcctggctcggcgacgtccggtcacaggcggcaaaagcacatgcggcaactgccgcagcggtgaggaggagtgttttcttcattatctgttatcggttattcgttgggtatcggggtggtataccgcgcctgcttcgtacggagggccttgttgatcccctcgacgaccatcggctccatgagcgtgtagccgtacagggtcggatggcagccgtcccgggagatccgggcgtccaggccgccggagccgttgtccagcgccgcatggtaatccacataggggatcttatgttcggcggcgtactgtctgagcatcgtattgagctccgcgacggctgccgcaggtttgatctcgggacgccacgaaaaccggtcgcagggcagcaccgagcagagcaccacgcggattccgttgaatttggccagttcgcacatcgagacgatgttgccgaagacgttttcgagtttgatggcgccgttgttctgagcgatgtcgttgataccggcaaggatcaccacggccttcgggttcaggtcgatgacgtcgcggcggaaacgcgcgagcatctcggcggtcgtctggccgctgataccccggtcgacgaagccgttgcgggcgaagaagtcgggatcggccccgatccagttatccgtaatggaattgcccatgaagaccacttcgacgggttcacccgccagggcggcattctgccgttcgtaacgcccgtactgcgcccagtcgcggggttgctgggcagagagagaaaacgccgcgaaaacagacagcgacaggagtacgatttttttcatagggcaataaggtttttaggttttccgctaacaaaattaggaaacccggaatgatcggcagtccgtatccatgaagaaatagtacacatccgtgccaaacacaaaatattccggtttttgccacctcccaccgccgggacagaggctccagaggggatttcccggagacaaagataagaaatatgtctgttttcatgcccaaaatggcaatggttagtctgtttttacgaaaaaatttgcataaatttgcacaaccaacataaaatttccacaaaccgcaaccctccatgaaacgaataatctacctggtctgtatacacctgctgtgctgtgcggcggcacaagccagcaacctgcggcagatatcgagccgcgaaggcatatcgaacaacgccatcctctcgctggcacaggataaacacgggtttatctgggtcggttcgtgcgacgggctgaacatgtgggacggcgaacgcatgcgcctcttcccgaacgactggggcgaatacccccccctgtcgggcaacctcatcgaggagatcgccgtgacgacggactcgcttttctggatccgcacgaactacgggctcgacctgttcgatccggacagcaagcacgtcgaaccgcacacctgtttccagggtatgtaccgggtcgtcacccgcaacagcgacgaggtgatcgtcatcacgcaggacaacaaattcagctactacgaccgcacgcgccatgaattcgcccccacaaggccgatgcagcaagggcggtatgccgacatcctggagatggtgctcgacgacgagggcaacctgtggagcttttcacgcaagggtattttctgtatgccggtgaaaattcccgccgacgggcagggggacatccgattcggcgaaacacaacagatagccctgccttcgctcccggaattcgcgttccgcgaaggggacagggtttatttcatcgaccggaaccatgtgttctacgagttcgacatcaaaagccgtcagatcatatatataaaggatatgcgtgaggagctggccgccatgggacaggtgtcgcgcatcatcagcgacgggaacgattacctcgtgtcgttcagcaccaacggcgtcatccgcttgaaaaccaccccgcagaacagtgtaaaatacgcaactgaacatatcaacatcacctgcggcgtcatgacactgctgcgcgatgcccggcaggaaatcgtatggatcggcaccgacgggcagggactttaccagcacacacgcaacgcggtggctttccgttcgatcaccttcaacgacctgccctacaacctttcgaaaccagtgcgtgcgctctacatcgaccacgaacgcagcctgtgggtgggcaccaagggcgaaggattattgcgcatccccaacttctacgacagaaagaccttcgacgcggcccatgtcgaacagaaaaccacggccaacagcgatctgctggacaactcggtctacactttcgccgcaagcagccgcaacctgctgtggatcggcaccgacggcgacgggctgaactactactcctatgccgaccggaggatccaccgcctcggcgtccccgaggagatgcggttcatccacacgctgcgcgagacggcgccggacaccctgtgggtggcttcggtaggctgcggtatattccgcatcacgctcggcggatcgcagacccatcctgaaatccgcgaggtcaagcggctccacttcaacgaggaactggaggtcaaaaaattcttcttcgccctctacgagcagaacgattcgatcatgtggttcggcaaccgcggaggcggggccgtacgctacaacacgcatacgaatacgcaccagatcgccaaattcgaccacaaccgcagcgccatcgtcaacgacatcttcacgatccaccagacccaggacaagagcctctggttcggcacgagcggcggactgatacaggtcgcccgcgacacgacgctcatcccgggcatcaccaacaccgtgcacggcatcctcgacgaccgcaacggcgacctctggctgagcaccaaccgcggactggtgcagtatacaccccacacgggtaacgtagtgacctacggatactcctacggcctgaataccatcgaatacagcgacggggcctacttcaccgatccgcagacagggctgctcttcttcggcggcatcaacgggcttgttaccgtcgaacagaccggcttcgaggaacagtcgttcaacccgccgatcctcttccgcgacgtgcgcctcaacgacggagtgcacaacatcggcaacctgctctctgacaagggcgtgctgacgctgcggcacggacagcgcatttacgagatcacggtatcggcactcgactacgtcaacggcagcaactacacctattacacgcggctggacgggttcagcgaccaatggacgagcacttcgtcgaagctgtccttcgccgacctgccgcccggcacctaccggctcgacgtgcgctaccgcaacaacatcaccggggccacaagtccagtctactcactggaaatacgcctcaaaccggcctggtacgccacatttctggcaaagctgctctacatgctgctggcgctggccgccgtcaccatgaccctgcgctattacctgctccgttaccggcaacgcaaggccgaacaactgcaacgcctcgaaagccggcgcaaagaggaggtctacgaatcgaaaatgcgatttttctcgaacatcacacaggagttgtccatgccgctgacgatgatctcggggccctgccagcagatcattacctaccgtaaatcggactcctatatcctcaaatacgcacagaccatccggcagaacgtgtcaaagctccacgacctgatctacatgctccacgagttccgcggtatccgcacctcgcaaaacgatgagaatgaaaacatcgagctggtacccgtggccgaaatcgcccagggaatcgcggagaccttcagcgaatattccgagcagaacagcatccactgcaagctggacatcgagcgcaacctggcatggccgagcgaccgagaaggactttcgacgatcctcaacacattgttgtccaacgcattcaagcacacaccctacaacggttcggtgaacctgacaatccgcaacgacgacggggaactgttcatatcggccgcgaacgacagcatcggggtcaacctcgacgacatcgaggccattttcgaccgttaccgcgtgctggattatttcgagcgcaagagcgaacgggggctttcgttccagggcgacctgcggctggcgatctgccacagcatcgtgacccgcatgcacggccagatcacggtcgaaagcacccccaatgcccagacgacgttcaccgtgcggctgccgcggctgaaagtaaccgccgagaacacgtccgtgaacgacaacatcgtgccgatcgacacgaactacgggctgccgctgccgaccgtcacgcaacgcgaattcacgttcgacaaaaaccgccggacgatgttcgtggtcaacgacgattcggagatcatgaatttcgtggccgagctgtttgccccggactacaatatcaaaatgcccgacggcctgaacgcgatgatcgaactgctcaaacagatgcaccccgacatcatcatctgcgatgcgctctcggagaaatcggactgcctgtcgctcatcaagttcatcaaggagggcaagctgacctcacatatcccggtgatcctgctctcgacggcacagcaggtcgacgaacgcatcaaaggcgtagaatccggcgccgacatctgcctgacgctgcccttcaacgtcgaatacctgaaggccgtgaccgagcagctgctcaaacgcaaccgctcgctcaaggactattacaaatcgtcgatcagcgccttcgaactctccgacggcaagatgctccaccaggacgacaaggaattcatcgacaagatgctgaagatcatcaacgacaacatttccaacacggaaatctctacgaaattcatcgccgacgagatgggtgtcagcatccgcaacctctaccgccgcctggaaggcatcctgaaccagaccccgaccaccatcatcaaggagtaccggctggccaaggccgagcagctgctcacctcgaccaagctctccatcgacgagatcatttacaaggcggggttcgtcaaccggggcacattcttcaagtgctttgccgccaaatacggctgcacccccaaagtataccgcaaggagaagctctcccagatcaaacaggaggtcgacgaagtgcccgaagagccacaggataaggcataggcaatgttaccggcaatgccggaatctctgcccgaccggagacggcgttcccttccgtcaacccaccaacaaactcaagcccggctactgatgcagccgggcctgaatccctaattataccacttaaaaacttgtaactgtcccatcccgacggaaaaacactcatccggaattttcgagtcatgtaaaattacacatttctgggtttcggcaagtatcaattcatgcaatataagtacaattcaagccacacccctgaaaaaagcaggacgggacaccggaatgtcccgccctgcggagcgatttgccgctgcggccgtttagatcgcacccgcgatcaggaacacggcagccaccgtaaggatggcgtacaactcggggaatgccgcgaggataagcgtcttacccatcacatcgtggccgttgccgattgcggcgataccgttggcacacaccttcgactggtagtatgacgaagcgaggcagaccagacccgtcagcagaccggcgccgaagatggcggccccctgcaacagggtcatcgaatccgtaaggaaccctttgatgatgaagtagcccacgaaaccgtaaaggccctgcgaaccggggatagccgacaggatcatgtagctaccgaaagccccgccgtttttcttcatggcgcctaccgatgccataccggcgatcgaagtaccgatacagctcgctacgcccgaaaggcctaccatcagcgctacgccgagatagcccaaaataattgcagttgttgattccataattttaatttgttttagttgttatttgttttccgaattatctattttctgcaagggctcgaaggaacgcatcgacatttcgaagcccgcgtttttgtagaactcgacgaacgtcagacgcatcgggtgcacgaacgacgaaatggtcgacatgaagagattgatgccgtggccgatcagcaggatcgggatcatgatcagcagccgcacgacgatgcccgaaccttcgggcacgaacccggcggcaagcgcattgaacaccgtggcgaggataccgcccgagaggccgatggcgaacagacggatatatgacaacacgtcggagaggatacccgtaaggttattataggtatcccacaatcccagcccgaaattcagcagcgggttcttgcccggcgaattgaagaacagcatcagcaccgcacccacgccgagcgtcgcatagaacgcgggcgaggaggtggtgtagaacgggatcacccacccggagttgagcatcggcagtccggcggcaaggctcccgcccaaaatgaccagcagccaccccagcgaaccgagcgaatagcggaacccgacggtggaggagatcatgacgatcttgagcaccatgccgaacatgatctgcacgaggccgatggccagcgcgatcgagaagaactggccctggaaatcgaagaaatggatcgacgggaaccattccgacatgctgatgccgaagaacgaaccgcacagcagcccaaagaggatcgtcgacacgccgcacaaggtggcgaaccacgcggcctggcgcatcatgccgggcttgcggttcttggagagcatccaggctcccagcagcgccaggatggcaccgtagccggcgtcgttcaggcagatgccgaagaaaagcacgtagaacggtgcgaagaacggcgtgagatccatcgtgccgtatttcggacgggcatacatgtcgcccaccagttcgaaaacgcgcgcgaaccggttattcttgagcttcacgggcgtatcgtcctcaggcgtagggtctcccttgagataaacgatgttgggatacgcttccagcagggcgtcgaccttgtcggaggtctccttctcggcccagccctccatgacgaccagcgtaccgtcggcggcctgctgcgccgtggctttcacgcgcacgccctgcaagcgctccttcagctgcgcagcgtgtgccgcgagcaacttctccgaagccgccacgcgcgagaattcggcgtcgagagcccgcaattcctgcttcgcctcggcgatacggcgttccgcctcgcggacgtccatcgacggagccttcatctcctgcgcatcgagcgtcacatcctcgcccgtggccgtcacggcaacgaaataggccgtagaatcggtacggttgatcagcgaaagcgtatagcgttccgaccactcgggcccgaacttgtcgtagttgctcttcggggtgaagaaatagcgcagcacgatgccctgcgaagccagcgccttcgtacgctcgggcgagaactcgccccacggacgcagctcgtcggccgatttctccaggcgtccgatctcggcggcgagcgccgtggccttctggtgtgcggcgacatagtgctcataggcctcggcacccgaggcgaagggtttcgcaccggcctcgaaacgtccttccccggcacggaaattccgcaggaagtcggcggccttcgcatgcccctcgatatcgagcagcagttgccggtcttcttccgaaggctcccagcccgtcgtcgtgatgtcgacaaggcccagttcgcgcagcttctcgataaaatcctcactttgggccgcatagagcacaaagtcgtattttgccattttcgctatcataacatcgcgccctccccggcctgttgctgtttggttttcacgatcttctgggccgacttggaaaggttctcctcgtcttccatgaagcgtttgatcttacgtatggcgtcctcgtacccgggtatctgcaccttttcgtacaagttcaccttctgagtggttttacggcgtgcgtgatccagcaactccatcttgcggttatacacttcgaattcgattcccagctgcgccatgcgcttgaggatatcgattccgtcggcgaaccatacgggcgacgagaagaggtcgtagggcttctcctcgaatttcacgtcctgcaagacgggtgtacgcacacccgcgatcttctgtaccgaaagttcgacatcagcgatgcgcaagaggtcacaatcaaactctccccagagcgataccatgtagtcgtactcggccttcagggcatcgagccgacggcggtaatcgcccgcggagtccttcgccttcttcacctcggagcgcagggccgactccttacttttgatcgtagggagcgccttctgccgcattttcagctgtttgccgaggtcgccgagcgaggtcttgttatattgaaatttgattgccatcgtgccttacgcttctttccaatactttttgatgagttcctccttgatcgcaacttcctccttggagaaatatttggcaaagagcccccatgccgtgtcgagcatctcggtgatgccgatattgacgtcgatcgaaaggagtttctccgaatagtcgaacgcgaatttcagcgtacgctcgtcgtagtccgagaggtcgaaaccgttctcgagcttggtcttggcattggcggcatcggcgtacagacgcacacaggcgttcatcacctgcggatggtcttcgcgggtcttcttgccgatcacgagctgcttcagacgcgacagcgaacggaacgggtcgacgatgaccttgcccgtgtcggagtcgttgcgcaggaacaactgcccctcggtgatgtaacccgtgttgtcggggatggcgtgcgtgatgtcgccgcccgacagggtcgtcacggcgatgatcgtgatcgagccgccgttgggcaactgcacggccttctcgtagatcttggccaggtcggaatagagcgagccgggcatcgagtccttcgacgggatctgatccatacggttcgacacgatggccagcgcatcggcatagagcgtcatgtcggtcagcaggacaagcaccttctcgcccttgtccaccgcgaagtactcggcggcggtcagcgccatgtcggggacgagcagccgctccacgggcgggttctcggtcgtgttgacgaacgacacgatacggtcgagcgcaccggcattctcgaacaccgacttgaaatagaggaaatcgtcgttggtgagtcccatgccgcccaggatgatcttgtcggccttggctcgcagcgccacgttggccattacggcgttatagggctggtcggggtcggcgaagaaagggatcttctgccccgtcacgatcgtattgttcaggtcgatgccggcaataccggtggcgatcagctccgaaggctggatacggcggaacgggtttaccgtcgggccgccgatctcgcgcgcctcgccctcgacgatctcaccgccttcgagcggctcgccgtaggcgttgaagaagcgtcccgcgaggttgtccgacacgcgcagcttgggaggttcgccgtggaagaccacttccgagtcggtcgccaatccctcggtacccgcgaaaacctgcaacgtcacgttctcgcccatgattttcaccacctgcgccagcttgccgcctacggtggccagctcgtcgttgccgacgccctgcgcccgcagggtcacggtcgccttggtgatgttatcgattttggtatatattttctgaaaagctcgtgttgtcatggtctaaagcttattttgttttttcactcacatactcctcgatctgcttcaggtagccgttgaacttctccgactgccactgcgaatagttcatctggcggaagaggttgataagacccttgaagaactgcgagcactcttcgaaatcggcgaaggcgaaatccttccggcagatgtcgagcaccattttatacatcatcttctggcgctcgatcggacagttggcatcgatgtcgtcgaaagcgtcctgctggaggatcacgaagtcgatcagctccgacttccagaaacgttcgtggtactccaccggcacgccgtcgtcacccaggatgttgatctggtcgttggcctccttgccgcgctgcacgatggtcttgccggcatacacgaggtctacccagtccttctcgatatgatcgtcgaggtattcgcggatctcggggtactcgagatatttcgagtaggattccagcgggtcgatggccgggtagcgcttcgagtcggcgcgcccctgcgagagggcataaaaacaacgcgccgccttcttggtggattcggtcaccggctccttgaggttaccgcccgcgggcgacaccgtcccaaggaaggtcaccgaaccggtctggccgttggtgagtttcacaaggcccgcacgcgagtagaagttcgagatgatcgccgaaagatccatcgggaaggcgtcctgtccgggaagctcctccagacggttcgacatctcgcgcagcgcctgcgcccagcgcgacgtcgagtcggccatcacgagcaccttgagccccatggcacggtagtattcgccgatcgccatacccgtatacaccgacgcctcacgcgccgcaacgggcatgttcgacgtattgcagacgatgatcgtacgctccatcaggttgtgccccgtccgggggtcgatcaactcggggaactccttgaaaatctccaccacctcgttggcacgctcgccgcacgccaccatgatgatgatatcggcatcggcctgcttcgaaatagcgtgctggagcaccgtcttgccggcgccgaaaggcccggggataaaacccgtaccaccctcggccatcggattgaaggtgtcgatggcacggacgcccgtcaccatcacacgcgaggggcgcggcttctcgacgtagcagcgcacggcctgcttgaccggccatttctgcaccatcgtgatcccgtgctcccggccttcgtcgtcggtcaccacggcaaccgtgtccgtaactttgtatttcccggccgcaacgatgctcttgaccgtataattgccggtcatcgtgaaaggcaccatgatcttgtggctcacccactgctccttgacctcgcccagccacgatgcggccgagaccttgtcgcccgccttcgccagcggggcgaactcccattcggccgagaaatcgaccgggtcggtgatcgaaccgcgcgcgatgaacaggccgtccatcttttcgaggtcgttctgcagaccgtcgtagttgcgcgacaagaggcccggagcgagcgtcacttcgagcatatgcccctcgaactcgaccctgtcgccgatcttcagcccccgggtgctgtcaaaaacctggacataggcgctgtcgcctacgaccttgatgacctcggccatcattttggtatcccccgtatacacgtagcatatctcgttctggcccacggctccgtcggccttgacgattacgatattggagatgataccatttacacgtcctgtagttttcatgaattatcctattgtttattttctatcagccctttgccatccagctcggccatcaaacgctcgaacatctcgcgtccgcgcaccgcatcgagctgcgtccagcgcgccacgatgttgacacgcgacaggtacgacaggatggaattaatgtcgaaatagtcgaacgtcgccagttccacggcttcgttccagcggatcaggtcgatcttgtgctccttctccacgaggttggcctcgtcgttcacggcagcgatcacggcgtcgatgtagggcaactcgccccgcagcccgaaatcggcagccgagctacgctccaactgttcgaccacgtcgcccccgccgacggtcacctcctcgacgggccgccccaccgcacgggccgtcacggcggccgtcacattgcgcaggttgcggtcgaactccgaccatgcgcgcaggaaacggctccgggaacggctgcaagcctcgtagtaggctccgaagagcgcactctcgaagcgcccggccgtatcgacctcctcggcatcctcgccttcggggtcggcaaaggcgcgcaacacgcgggctacgggcgccggcaggcgccggggagtcttcacctcctcttccagctcctcgcgtgtgaagttacccagcggattgtgcgccgagcgccccgcacgcagcgaagcgatattctcacagtcgtaatagccgtacaacagccgcaccgcgtcggcatcggccccgtccaccccttcgaggatctccccgacgatggccttggcatcgaaacccttggtgtcggcatcgagcgaatactccttcagcccggctaccagacaataataattcgtcgtgaacatagcgtcacgccttaaaaagcatgtccgatactttctcacgcaggtattcgcccagcaaggcgtcgaaatcggcatcggagaacgagatgtagtagccgccgtccttggcacctaccttgaacccgctcttcacctcattcgaatagcccacttcgataccggcggcgagcagttcttgggcgctcttgccgaacgccgcgtcgagtttagtacgctccgcctcgggcaacagggctttcaactccactttgcccgcatcggcaccgttccagttcctggccacggcgagcagcatctccttgatgaatgcgggatcgagcgcagcctccttcaccccggccgcagtagccttggccacgatcatcgaagcgatctccgacttgatcttcgcagcggcctgcttgcccgcgagtgcgatctcggtcatcgtgttcttctcgacatcttcggccttgtcacgggccttcttgacgatctcctcggcctgggcgcgggcttcggcgacgatcttcgccgcctcgttcttagcctccccgaccagacggtcggcttcggcacggcctttctccagcccctcgtcgtagagctttttggtcagctcctgaagtttgttttccatagtgttatttagttttgattatcgtttttcaaaatatgcacacaaatatataaaagattatcagaaaactgaggcacaccgcaataatttgtccttttttgacaaaattcaagaacaaaaagaagaagtttcgaagcgaaatgaagtgtcttacggccgggaaacccgccgcacgccgcaggctgtcccgtaaaagcccaccggcgccgtaaaaaaacggacggccccgcgggaaggcggcagccccacaaaaaacggacgccgctcacgcggcatccgccttatctggttcgcacaggggtcactggtgctggggacgcagcaaatcctgcacgactttcacgggcgagaaggtcgtgatgggcacatccacgaagatggtgttccaccgcgacatcgtgccgttccacaaaccgggcaattcctgggcacgcaattcgcggccaccgctcgacttggacgagataaaacccgtcgcagggtcggtataacgccgcaggtcgaacttgcgccccttggaatcccggacgccgcacacgaggtctacgggattgaaatgcgtcgcggccttcatcagcggcaggtcggcaggtgcgatctggctcgactcggcgatctggagcgactgcgtgccgtcggcgttcgaagcccagaacgggccacctcccggttcgccttcgttgcgaaccatgccgcagacacggatcggacggtcgagcacggcgcgcaacagggccgaatcgtagtctgcgggcagtttgacgcacaaacgctgttcaatgaactccacgatcggctccagctcggcgccgcccacctcgagcgctttgagatactcgaaagcccgattctgcaaatccagcaggatgccggccaatacctttttatagcggatcgtatcgccgcgccgcgcatcggtcgtcacgttgtcgatgttcttgatgaacaccaggtcggcgtcgatttcgttcaggttctcgaccagcgcgccgtgccccgccggacggaacagcagcgtgccgtcgtcctgccggaaaggggtgttgtcgggattgacggcaatcgtatcggtcgaaggtttctgcaccgagaacgagatgtcgtaacggatgccgaaacgccgttcgtacacgggaatcttttccgccaggagggtttcgaagcccgcgatgtgctcgggcgacacggtgaaatggatccgggccacgcctctggccgcggcatagaccgcgccctccaccaggtgctcctcgaccgccttgcgcgccccttcgggataggcatggaaggtcaccagccccttgggcttctgcccgtagccgagcccgtcctttacgatggcacgcacggttgccttgtcgtcggcatcgggcggcagcacggccttgagttccggccagaaggcgaagcgcccgatattatccagcaacgtgtcgatgcccttgccgcgcttaccctcgttgacgaactcgaacaactccttgaacatacgggtcgcggcacccgaggctggcacgaatttcacaatgcccaggcggtcggcctcccgttcataacgcgccacggcggcggcagcctccgcgtcgcccacgaccatcaccccgtcgccgggcgatgcggcgcgcacaaccttcaggaaggggaacccgcggcggaaattctccagctggcgctcgaccgcatcgggggtcagcccgtgtttttcgatctgctgtaaatctttttcggtaaacatggttctatcgtctttagtttttcgtcggatcggaattatcttcaaagataacgaaataatttctaactttgcacatcatgatccgagaatttcaccaaaccagcctgcgcggacgcaacagtttcggcgtcgagcagcacgccgcccggctcgccgaattcgagaccgaggaggatctgcacgcgattttcggcggcggaatccccgaccgctggagcgtcctgagcggcggcaacaacatactttttacacgggactacgacgggctgctgctgacccccgtctcgcagcggatcgtcctgctcggcgaagaagagaacacggtacacgtgcgcgccgacgccggggtcgaatgggacgacctggtggagtgggccgtacagcgcggattgtgggggctcgaaaacctctcgctgatcccgggcaaggccggggcggcgcccgtgcagaacatcggcgcctacggttgcgaggcaaaggacgcgatcgagcgggtacacatgttctgtgtggaaaacggcaaatgcatgacgctcgacgccgcgcactgctgtttcggttaccgcgaaagcatcttcaagcacgacctgcggggacgtgtcgtcatcacggcggtcgacatccgcctttcgcgtacgccgcaaccccggctggggtacggcgacgtggagcgtgaggtcgaggcccgcggcggcacgacgctgcgcaacatccgcgaagcgatctgcgccatccgccgtgccaaactacccgacccgaaggtgacgggcaatgcggggagcttcttcaaaaacccggtcgtcgatgaatccgtggcgcaacaattgcgggccagctggcccgacatgccgctctaccccgccgccctttcgggcaaggccaaactcgccgccgggtggctcatcgacaaggcggggctgaaaggctgccgaagcggacgggtcggcatccatgaacgacaggcactggtattggtgaacctgggaggcgccacgggcggcgagatactcgatttcgcccgtatggtacaggcccgcgtacacgaaaagttcggcatagagatagacaccgaagtcaacatattgtaatatggcacttttagaggctttccagaggtatgtcgccgagaatgacctggcgacgcacgacgaccgcatcctgctgaccgtttcggggggcgtggattcgatggtcatgctgtcgcttttcacccgcagcggctattcggtgggcgtggcgcactgcaatttccagctgcggggcgccgagagcgaagaggacgaggtgctggtggaagaggaagcgaagaagtacggcgtggagttttacaacaagcggttcgaaaccacggccgaaatggaacgcacgggcgagtcgatggaaatggcggcacggcgcctgcgctatgcgtggttcgacaccctgagccgcggtcagggctacacggccgtggcgatcgcccaccatgccgacgactcgatcgagacgttcttcatcaacctgctgcgcggcacggggctgcgcgggctgacgggcatctcgacgcaggtgggcaggatcatccgtccgctgatgttcgcctcgcgcaaggagatcctcgaatatgccgtagccaaccgcatcccgttccgcgaggattcgtcgaaccgctcgaccaaatacctgcgcaacaagatccggctcggactgataccccgcatccgggagatcaaccccaagttcacgagcctcatgagccgcaacctggcacgtctgaccgatgcccagctgttcatcaaccacggcatcgaacgtatccgcggcgaggcggtgacttcggcggacgggttcgacacgatccacctcgaccgcatcgacccggcattcccgcaggagttcgtgatttatgaactgctgagttcggcctacgggttcaagggtgacgtcgtcgactcgctctgccattcgctccggcacgatatgacggggcgacgcttctactcgcgcgaacgggtggcctacgtcgaccgcggcaagatcgtcgtggcgccgatcacccccgacgacgcctgcatgacgcaggtggaaaggggcgcacagcggagctactgcggcaattcggtgctctacttcgaatatacggacatcgacacgatcaagaatttcggcgtgccggagcatatcgcccaggtcgacgccgaccgcttgcaattcccgctcacgctgcgccgctggcgcgaaggcgactccttcgtgccgttcggcatgacggggcgcaagaaagtgagcgattttttgatcgacgccaaggtctcgatggccgaaaaacagcggcagttcgtactgctgtcgggcggcgagatcgtatggctcgtcggccgccgcatcgacgaccgctaccgcctgacgcccgacacggagaacgtgctgcgtatcaccaaagaaatcgtctgacatggctaaaagcgcactgaaattcaaggattccgtcgccgcatacgaacaactcgccggccagatcgccgcacggcggttcgtccccatctacctgctcatgggcgaagagagctacttcatcgacgccatcgccgagcagatagccacgaccgtgctgggcgaagccgaacgggctttcaaccagctcaccgtctacggcaaggactccgaggcggggcaggtcatcaacctctgccgccagatgccgatgatgggctcctaccaggtcgtcatcctcaaggaggcgcagcagctgcgcgggctggacaagctctcgctctacacccagaagccatcgccgacgacgatcctcgtaatctgccacaaggagaaaaacgccgacaagcgttcggccttctacaagggttgcgccgccaacggcgcggtgctcgagtcggtgcgtccgcgcgactacgagatcgcctcgtggctccagcgattcatcgccgggaaagggttggccatcgacacgaaggcgctgtcgatgctgaccgaccacctgggcaccgacatttcgaaaatctcgaacgagctgagcaaactggtcgtctcgctgcccgaaggcacgaagcgcatcaccgacgccgacatcgaggccaacatcggcatctcgaaggactacaacaacttcgagctgtgcaaggccgtggcgacccgggacatggcgcgggcgctgatgatcgcggagcatttcgcccgcaaccccaaggacaacccgctgctggtcaccgtactggcgcttttcgggcagttcaaggagatgttcgtcgtgaactacctccgctggctctcgcggcacaagggggtcgcattcccgcccgacacggagctgatgcgcatcctcaagaagagcaacgtctacgtcatcggcgagatcaagcagaacgccgtcaactgggacaaccgcaaggtattcaacatcctcggcctgctgcgcgaatacgacgccaagagcaagggcatgaacgccgggggtgcatcggacggcgaactgctgcgcgaactgctgctcaaaatcttcatgctctgatgcgggaagtctacctataccagaccgtacatgtcctcgacggggagtgcctctgcctgcgggaacacctggccgtactcgaccgctggtcgcgcacgctcttcgggtgcccggggccacacgacgcccgggaggtcgggacggccgtcgcggcggtggccggacgggaagcccccggcagcgaccgttcgaaattcgtacggctcgtcctgccggcatcgggcatcctgcggctggaattcgaaggcgtttcgctctaccgcggctacgatctgcgcagcctgatgcccgaagccgtgacgctgcaatacgaaccgccgctgttcgacgcccccacctcggcacgcgaggccgccgttgagctggcacggcaatacgccgggttgcagggtgcgagcgtcgccgtacgctgcgaccgcaacggaactctcatggcggccgacgaagcggcgctgttcgccatccggggcaagcgggtctacgtcccgccgggcgaaacgagcatcgggcgcagccttgcagtcaggagcatccgcgccgccgggctggaactggccgcttcgcccgtcgggcgcgacgacctgccgcgcatggacgaacttttcttcatcgaccaccggggcgtcaccgccctttcccgctgcgacgggcagccctacatggccatcttcgccgaacgcatcgccggggcgctccgcgggctgtttccgaatatgtagaaacccacccgggagggcacgcgctatcttcgccgcaaaacccggaaaccatgaaaaaataccttttcctttacgccgtcctcacaacggcgctgctggcatacggctatacccgttaccgccacgaaacccgccgcctcacacagaaccagaatgccctggcctcgggcatcgaacactaccgcacccggctgggacaggaggcagcctcggtgcaggcattgcgtctgcgctgcgccgaattcgaacgcctccgcgccggggatgccgacaccatccgccgcctcggcatcaggctccggaggctagaagccgtcgccaaaacagtcaccgccacgagcgtcgacctgcgcgcgcccgtccgcgacaccgtcgtcctgctccgccgggacacgctccgaatccgcgacaccctgaaactgttccgctggcgcgacgcctgggttacggtcgaagggcgtatccgcaccgactcggtcgcctgccgcgtggagagcaccgacaccctgcggcaggtcgtgcaccgcgtcccgcggcgcttcctcttcatccgctggggcacgaaggccctgcgccaggagatcgtatcgtcgaatccgcatacgcggatcatttattcggactatgtaaagttcgaacggtaaattaattcgcattttttaatccggtattcccaaatattattacctttgtccgatatggaaaggtctgctattttccccgggtcgttcgacccgttcacccgcggccatgcggcattggtcgacgaggccctcaacctcttcgaccgcgtagtcatcggcatcggcaacaacacctcgaaacagggtttgctgaccgtcgccaaccgcaaacggctgatcgacgacctctatgccgggaatacgcgtgtcgaagcccggatttacacggggctcacgggcgaattcgccgaggagatgggagcctgcgccattatccgcggcgtgcggaacacaaccgacttcgaatacgaacgcacgatggaggccaccaaccaccggatctaccccgacatcacgaccgtgatgctgttcaccccggcgcccgtggccgacatttcgtcgtcgacggtacgcgaagtgctttcgttcggccgttcggtggaagagttcatgcccgtgggagtagatattaacaaatacctataattattttatgatggaattcacagccgaaatgatcgccggattcctgggcggtgaaatcgtcggcaacaaagaggcgaaagtacacaccgtatcttcgatcgaggaaggcaaggccggctcgctcagctatcttaccaatcccaaatacgaagcctatatttacactaccggagcgtcggtcgtgctggtcaaccgcacgttcgaacccgcgcagccgctttcggcgacgctcatcaaggtcgacgacgcaggcgcctgcgtcctgaaactcctcgaaatgtacaatgccgcaaaaccccgccgcagcggcataagcccgctggcctcggtctgcgccgaagcccaggtgggcgaagggtgctacataggcgacttcgcggtaatcgaggccgacgtaaagatcggcaacggatgccagatctatccgcaggtatacctcggaacgggcgtaagtgtgggagaaggcacgatcctctatccgggggtcaaggtctacgaaggctgccttatcggccgcaactgcatcctgcacgcgggcgccgtgatcggcgccgacggattcggattcatgcccaatgccgcaggcgggttcgacaagatcccccagttgggcaacgtcgtgatcgaagacgacgtggagatcggcgccaatacctgcatcgaccgcgccaaaaccgattcgacggtcatccggcggggcgtgaaactggacaacctgatccagatcggccacaacgtgcaggtcggcgagaacaccgtctcgtcggcacagaccggcatcgcaggcacctcgaaggtgggcagcaactgcttcctcgcggggcaggtgggtattgccgaccatgtcaacatcggcaacaacgtgaagatcggctcgaagagcggcctggacaaggacgtgcccgacggtgagatccgtttcggctacccggcgctgcccggcatgcagtaccaccgttcggcgacggtcttcaaacggctgcccgaactcgaaaaacgcgtgaacgagctggagaagcaactcgcagcatcaaaaaaataaccaataccttcgcattatgaaaaaattatttctattcgcaacagccgcagccgtgctgtgcagttgcagcaaccagcccaaatacatcatcgacggcgacatcgccgggctcgagggaacggtctacctgtaccagggcgacagcctgatcgactcggcagccgtcaaggccggcaagttccagttccggggcaacgccggggcgccggccgtacattacctgctcgactcgcgcgagggacagccgcaggcattcgccatgcagttcatcctcgaaccgggcaatatttcgatcaagagcgacgccgaggacgcacaagtccgccataccaccggaacgccggccaacgacgccagcgacgcctattcggcagccagccgcaccctgatcaaggaataccgcgaccaggctacgaccgacgaacgccgcgaggccatcgaaaaggagttcgagcaactgactcttacgacaatcgacaacaaccgcgacaatttcttcggcgtggtactgatgcccaaccgggcctacgaactttcgggacaggaaaccctggacgaaatcgccaagttctcgcccgagatgcagcagaccaaggaactgaccgagctgaaaacctcggccgaacaaaagctcaagaccgacgtcggccagccctacatcgacatcgtgcagaacaacgccgaaggagagcccgtatcgctcaagtcggtgatcgacaacccggccaacaagtacacgctcgtggacttctgggcttcgtggtgcggcccctgcatgggtgaggttccccacctgaagcagacctacgacaagttccacaaaaaaggcttcgaaatctacggtgtctcgttcgaccgcgaccgcgacaagtggctcgccgccgtcaaggacaacggcatggagtggattcatgtcagcgagctgcaacggtttgacaaccaggcggccaaagactatgcggtacagggcatcccgtcgaatttcctgatcgacgcccagggcaagatcgtagccagaaacctgcgcggcgaagacctctacaagaaagtggaagagctcctcggaaagtagcccgtcccgaataaaaagcccctccgagccgcaaatgccccggaggggcttttcgataaaaccaccccgtcctatgaaaaaaacactccttttcgcatcggccgcagtcctgttatgcggttgcggcaccggatccaaatacgtcgttgaagggcacatcgccgggctcgaaggcaccgtctacatgttcgagggcgacagcctgatcgactcggccgtcgtcgaaggcggcaagttccgcttcgaaggcccggcggacatcaccgcccggcgcaccgtcaccgattcccgcgaaggggatgcacagcggttcgggacgatgtttttccccgaaccggggacggtttcgatcgaggacaaccccaacgccccgaccgggtcgacccgtgtgacgggcaccccggcaaacgatgcaagcaccgctttctgggcgtcggccatgacgctgatggatgaataccaccgggagggcacctccgaaggacgtcgccgggagatcgaagacgaactgggcggactcccccgcaaaacggcggatgccaaccgcgacaatgcgttcggaatcatggccctggaagggatggcccccacgctttcgggccaggagctgctcgaccggatcgccgaattttcgcccgggatgcaaaagtcccgggagttagccgcgctcaggacggttgcggcgcaacgcctcaagaccgacatcggccagccctacatgaacatcatgcagggcgatgccgacgggcagatcgttaccctgacctcggtgatcgacaacccggccaacaaatacacgctcgtggacttctgggcatcgtggtgcggcccctgcatggaggaggttccccatctgaagcaggcttacgacaagttccacggccagggcttcgaaatatacggcgtatcgctggacaacgacaacgacaaatggctcggcgccatccgcgagcacggcatgggctgggtgcaggtcagcgacctcaacggcttcgacaacctcgcggcgaaagactatgccgtgcaaagcatcccgtcgaatttcctgatcgacacccagggccggatcgtcgccaagaacctgcgcggcgaagacctcagcagcaaagtcgccgaattgctcgccgagtaatccgtcctgcacgggatacccgtccgcctccgctcagggccgccggaacggttctttgcaaaaagccgaaacgcccctgcccgaaaacacgagcacggccttacggacatccatcggcccgaacaccatgcaacgccggaaatatattccagcatgcaaattcgggatgcttccgactaccggatcttcatccgctgcggcgagacatcccacatattgaaatatcggaagaagcgcctgtctttattccgaataacaaaaggataacaacctgcttaaaaaaatgcaacatcaggagacataccgcatcatgggcatcgaccccggcaccaattacatggggtacggggtgctggagatcgaggggcgcaacgtccgttccgtcgtactgggagacatcgacctgcacaaactgacagatccctatgccaagctacgttatatcttcgagcgggtcggggcgctgattgaccagtacgccccgcgcgaagtggcactggaatcgcccttcttcggcgaaaacgtgcagtcgatgctcaaactcgggcgggcgcagggcgtggctatggcagctgcgctgagccgcggcctcgccgtttcggaatacgccccgatgcgcatcaagcaaagcatcacggggcgcggttccgccgccaaggaacaggtcgccgccatcgtctgccgtatcctctcgatagatcagccccccagacggctcgatgccacggacggcatggccgtcgccttgtgccaccacttcacaacggccagcccgctcaacacggctctgggcgacgagcgcgtaaaagggctgggcggcggcaaaaaagcagcttcgaaacgcggctcccaaagttgggagaaattcctgaaagaccatcccgaccgggagataaaatagcccccgaattactgaccatgaaaataatcaccgtcctcctgtccgccgcattcctgttatgcaattgcgggggttcgaactacaccgtctcgggccattacggcctcgcaccgggcgattcggttttcctcttcgccagcaacaaatccataatcagctccggcgtaatgactgccgacacaacgttcagactcaagggcaaggtcgccggcaccgacatcgccaccctgagcgaccgcgaccggctcctgacgcctacgcttatctttctggaagcgggcgacatccggctggaaccccgcgaagagggcgtgtatgaagcgacgggcacacctttgaatgacagcctgctgctgctaaacaggaaactggaggcgctccgcaacgaatacatcaaaatgacgccggccactccgcacgaggaagtcgaagccatcttcgcacgctttgaggagattccccgcgcgatgatgaatgccaacctcgacaatatcttcggcctatggctcttctcagcctatgaattcccgaatatgctgcaggacgacacccgacgggcgcagataaggccctgtatgactgcgttctcacccggaatgcaggcgcatacgatcatgcaggaactgcaaaaggaactggcgggattcgaaaacgcgcagatcggccaccgctttacgaacctcacgctgaccgacacgcaaggcgaacccatatcgctctcgtcgctggtggaaccgggacgctgggttttgctcgacttctgggcgacgtggtgcgccccctgctgccacaagatcccccacctgcgcgaggcatacgccgcctacaaagccaaggggtttgaaatttacgccgtctcgctcgacaacgacgaggcaaaatggcggtcgttcacgtcggccaacgacatgccgtggatcaatgtcctgggcatcgacgcagacaaacggagcacggccgccgcagcctatgggatcacgtcgatccccgcgaacttcctgatctcgcccgacggcatcatcatagcgaagaacctgcgcggcggggagctttcgaagaaactcgccgaaatgctggaatagccgcggcaacaaccccctgataatccggatggtgtatacttccggcacaaaatgagacatctttttattaaaaaatttacggaataatttgcgtgtttaggattttcatcctatatttgcacctgcaattcggcaccgtagcttaattgaatagagcatctgactacggatcagaaggttacaggtttgagtcctgtcggtgtcactctcaaaatcaaccacttacagcaatgtaggtggttttttcgtgtcttgttttcagcccgttttccgtcggtttacgcagtttgtgtaaaccaatgtgtaaaccgaattttcccgatgaacacgacaatcgaggcggtactctacacatccaaaacattatccaacggccagcatcccattatgttacgactgacaaagaaccgaaaacgaaagtacatcagcctgcacatttcactcgctccgcaatactgggacgccgaaaagtgtaaaccgcgccgtaactgtcccgacaaagagcgcatcgaagcccttatccaacagaaaacgcaggaactccaaagtcaagtcatggatttcaagaccagcgacaaggaatacacgttgaacacgcttatcgaaaaggcatcccgcaaggtcgtgcgccaaaccgtcggcgaatatctgaacggctacatcgaccgcctgctggccgagaaacgtgtaggcaacgccaaaacctttcaggaactccgcacctcgctgacgaaattctgccgttcgctggacttttattttatagacatcgacgccgagtggctgaaacggtacgaacaatggttgcgggtggaacggcattattccgacaactccatcggcattcgtttccgttcgttgcgagtactctacaacagcgcaatcaccgacggcctaatcaagaaaacggactaccctttcgacacgttcaaagtgagccgattcaaggaagccacagccaaacggtcgctgacaaaagaggatataagacgcattatggattgcgaggtgcggacgctgaccaagtaccccaaaccgttcctgcaactggcaaaggacttgttcctgttcagctacctgtcgtgcggcatcaatctgaccgacattctgcacatccgctatgccgacatcgtggacaggcgactggttttcaaccgtcagaaaacgggtaaactcctgtcgttccaactccaacctgccgccctcgacatcctcgacaagtaccgccaaccgaacgcacatccgcaggattacattttccctgttttaaggcgttctgttcacgttacggcacaacagcagtacggacgggtgcaacggacgaacaagcggataaatcgctatctgaaactaatcggcgagcatctgcacctgcctatcacgctcacgacatacgttgcgcggcactcgttcgcaactgttctgaaaaggtcgggagtttcgacatccatcatttcggaatcgctggggcacagttcggaaaagattacgcaaatctacctcgattcattcgagaactcgcagatagatgcggccatgcaaaacttattgtgaggtggtgacaaggtttgaaaaaaggtctatcttatagcccccgaaaccaagtttgtcactaccttttaagggattatccgattgcatcgggtagtccccttttcttttttctgcggtcgtcagttgcggttgaaagcggaattttgtaaattcgtctttataaagatactcctatgcaagaagaacacaccttttaccccgtaacgaccgaatatttcaccgcttgcctgcccttactggaaaaatatttcggcatcacggcaggctatttcaacaaagaactttcggatgccaaatgtctgatacctcaccgagagggcaatatcgtaaagtacagcattaaagaggattgcaatctggttttgccgtttcgacacctcgaatgccatgacttgttatcgcttatcaactcttacgggacaattaccccaataatagaggaaaccctattgcttgtggcctactgcatccgcgaacggcagatcgacgaaaacgaatacaatgatcttgttcaattttactcttgggacatataccaaagcgaatgggcacacctgttgctttttatggagcaaatggaggcacggacatttcaaggcaacgaacagaccgccatcacaattcgcaccaataatggggaagcggaaaagatttctattccgaacagcgataactggttattccgtctgattaaaaaagaacttgcaagctattttcccgaagtacaaacagccgagaaagcacggcaagatattcaacggcgcaaaccgtctgcgggacgaaaaaaggataatgccatctattcggcagttgcatacggcatttaccgaatgctccatgaagaaaatgccatacccagccagcccgatacgccgaacgaattatgccaactcattcacgactatacacgcttcacgggttgctatcccgatagtaaaggatggagcggcgaatacgacccgaaagtaatccgcgccgaccttgccgcctatctgaaacgagcggctatgaatcaagcaccacgattcagaccgataccattgcagaggcaggttatcatgcaggattttgattttccgctattggactgatcggactatataaccataccatttaagggagccgtttatcgcggttccctttctttttttctgccaaaaatctgccagtgtcatgacatctgccattttgtcataaccaacagatttacaatattttccctgacatattttgcaatattttcgacagcaaaggtaatgaataggtcgatttttaagggctattatttatgtttttgcaaaggctccaaaggtcggatttatgcaggttcaaaagccagaatccgcgaataaagcgtacggttattcgagtgattcggggagtagccgacagcccgaaagaggcggcaacaaaacttaataaaaaagataacgattatgaaaacgcttgcaaacatcaacgacaatattaacatcaaatttaataaaactatgactacaatttcagaaaatgcggaatcgcagcaggtagctgggaaccgcgcagaggagcaggaggagaaaatgaacctccgcattatcaaaatcaagcccgcagggaatgccaaaatgttccgcacgctggcgaaagcgattgcggcaggggctaccaccctgatcgtgaccacccgtgtagacgtggctggatgcggatatgtttggttcggaatccgtaaggggtacaccgaactggatggcaaactcctgctgaacgcccaaatctggaactacctgctggcgttcctgatgggtaaggaattgcccgaagtgacggagtttgaacccgaccgtgaaatctgctgtcagtccgagtggctggtggaagtggccgccgaggtggagaaactgacctccgtcacctccgaggagtacaacgagagcgaggagggcatcggctacctcgccaaaaagtaccactttcccaacggcaaagtcgtgatgcctgccgaggcgatggaggacatcaccgacctgctgaactaaactgctgaacgaggggagcgggtttcgccgctcgctccccaagttttttaactacaaatcaaattattagatgaagattgaatatattacaatagatgcaggccagcggttcgacgccgtaatgcccgaaatacctaccaactcgatcatcaacaagaccgtcacgggatgcggtgcgacctatgccgaaatcaatgcgccccgacactccgtcatcatcgagccgaatgttcccgttatcgagggcaagatgaaaaaacacccgcagatactcggcgtgttcgagggcgtaacgaccgaggacatcatcgactttctgaacacgaactacaacgacggctacctgaaaatcatgaccacgcccgaaagtttccccaaagtccgctcggcaatggtgcagacgcatacggatatgcacggtgaatggttcatgctgttcgacgaatgcgagcgcacgatacaggatgcaggctaccgcggctctatcacgctcccgatggatgattttttccgatgcaaacaaaaggcgatggtttccgcgacgccgatcatcccgtccgatccacgtttcgagcagcagggctttacaatgaagatacttcgcccgacctacgaccacaagccgaaaatgttgctcatacatacgaacaacaccgtcggctgggtgcgtacccttatgggacaggtaaaaggcaaagggcatccgctctgcatctttctaaactcgaccgatacgatccaccgcatgatctgcacctataagatcgagaaacggtgcaaggtcttttgcagttacgagagtgtgaagaaactccgcaagcgggatttttcgcaggcttactcctcgctcgaagaactggacgaaatcaactttttcacgagccgtttcttttcggcggtagacatcgagctgccgacaacagcctgcgtgctgatcgtaaccgacctttcgtttgcggcgcacaccgtcatcgaccccacgaccgaagccgtgcagatcgtcggacgcttccgcaacggcgtggaggatgccgcgcatattttcagcaccaacaaggagatgccctgcaaatcacgggaggagatcgccacgaggttggaggagtgcgaagcggtctacaaacaagtcctgcaaatcgaagcgtcgggggcaggttgcgatacccgtgcgcaggcgttggagggaatggactacaaacggttcatgaacgccgacggaacgcgcaactggttcatgtgggacaacgcctacgacgacgagcggatcaagcggcactacaccgacgccgaactggtgcgggaggagtacgcgaaagcatttcacacggattgcgccgaacatatctatccgttgtcggactgcgaccgactgcaacgcataaatccccgactgaaaatgaaagacctcttccgcgaaatcgtgcggcagttggagatactggaacaaaaccgaacgtggaatgaatattactttctgcgcgaggagattcaaagccaagtgccgatgatggtggatgcctactacgccctcggagcggcagagatcgagcggtgcaactacaacatgaacgcaatcggcaaacagatacaggaaaacgaaagccaacaactgctgacctcggaaaaagtttgcggggaggtgtacgaccgactgaaaacgggcgacaaactacccgtgtgcgccgtcaatcgttttatgaacgatctgattatgcggttcggcatcccctaccgcaaaaaagtgacggcaaagatgatcggaatatatttcgagtacaaagaggtacgcaccaacaaacaacggctcatcgaattgggaaagcggatcatatagcccgtaacgggtgaaaacaggtcggtgacaaacttttgaaaagggtctataaaagtacctttttcggaattcctgtcactcgatcacccactccccacggcgtgtagaccccacccgtttgagcctgcccgacttggcgagtttctgcaaatgatatttcacgccgtcgggtgagattccgacaacctcggccagctccgcccgtgtaatgctgggattgcgggcgatggcttccaaaataatttcttgggtagtctttcgggtaatttcttgggtagtgagcgtttcggcgattacccccaaaataaactcgacgaaaggcgtgcaacctgccttaccgccacttacggcaatcgccttataatactccttttgatacttatatacaatgttttcgatcggcaggtttttgaagataggccgccacctgctcaaaatcaaggtctgccacaatcgccccgtgcgaccgttaccgtccgcgaacggatggataaactcgaattcataatgaaagacgcaacttgcgatcaacgggtgttcatccgtggtgcgcagccactcgaacagatcgtttacgagaaacggcacacgttcggcatcgggcgcataatggataaccgttttccccgacaccacacccgcaccgcctttgcggaaacaaccgatttcgtcgatcaatcccgcttccattgtggcgtgagcctttaacagatcatcgactttacaggggtcgagcgtgtcgagcaattcatacgctttgagggcattgcgcacctcctgcacctcgttaataggagcaacgacgggttttccctccaataccgccgtgacctgctccgtcgaaagcgtgttgccctcgatagccagcgtcccgtgaatcgttttgattcgattgacacgatgcagacgcaaattttcgtgcgcataatagctgccgattgcttcgctgatttgtgcaaccaaattcgtgatcttcggcgtaatggtgtaaggcggtttataggacatggcacacttgcttttcggcaaagatagcgattctttcttttatagggtagttttgggtaaatctatttatcatccattccccatatcgtgcgatttatgccgaaattgtcccgcaacaaaaaggtgacaaactttgtgaaagggtctataaaatatccttttcggaaaaggttgtcactcgcagacaaacaagacctaaataccccgaccgagcggacaatccctatttttcacccctcccccttttcaagtagaaaaccgaatttttacccctccctttaataggattccacataatacaagccgccccttatttatgcccgaaaccatataacagcatagaattatcggaattatatagaatcggaaagctattcttacatggagatatgccgccctgtttagttggttatgaatggagttatctttttacaagtaatggggaataactctaaactttacagaccatgaaaacattaaatgaaagggcgacagaaattctgcaagccttgttagccgtgcgggcttacagaatcgaccacgggaacggagtttacacacgcttacgtgccgcaatgattgggcgcaatggaaagtacaaccttatttcgctggtagaatactacgaagctaaaggtaaatttgcgcagaatacagaaatgaattttgcatttgacacaagtacaaagcagtttatcccgtactattactgcaacaaaactctccgcattgaatcgcatagtgcgtacccgacagaaaacggaatggagaattgcgccgaggaacgacaggctgaccacacaaattttgcaaaccgatggctaatacgcatgaactcgcaacaaccgattatatgaatgcgcaacgagtagtacagaattgtgttttgaagaatcaaagcacggttatcgaggaaatgatacgggcaaaccttatttccgaagaatatctttatccgttcgcggatgatgtcatggaatggtggctgattgattcttggcttgccgaacgactgaaagcgcaaggcgaggttatcatcgaggaatacggttgctactggtggggcaggcaatccagcgggcaggctatttacatggacggcgtaatacaagaaatctgcggagaagattaacccaacttacaactaacaaagtttcgattccatactcccaactattggatagaaactttgttttcaagaactttgcaacaaaatttaacggcaacaccccaacggagagcattgtaattcaaaaacattttctaactttgcattgtcaccgaataggtggcagacatattgattagtgaaagtgtttcgctatattcctcgtcagaaatctggaaaatttcacgtaaacaggaataagcattacaaacgctcttcaccttgtgtagattatatcctttcgatatatctgcccaagtgtggggtgttgcttatttgtttacgggcattccagagcctctgacgaaataggtgaacaactccacactttctttttgcatataacccaccgcagcaggagttgatacggtaagatttgaaacacttgttcaacttaaataatcttactatgaaaaaattatttttatttgtgcttactgcaatgatgatttgcagttgctcgaaaagcgaaacagaagacaaccccaacccaaatccagaatcatccgtaacaggaatgtggctgacccccgacgcattgacctttgaatcaacgggaggatcggaaactgtttggcttaatctcaattatagcggaacttccacaaatgctcaatggaaactgacgggcggcgaatcttggtgtacggcatctaaaacgagtggaggagacaacgaacaaatcactttcgaggtaacagagaataatgatccagatgaacgaaatgcaacgtttacttttacatgtggatcggtttcgactaaacttgtcgtaacgcagaaacaaaaggatgccttgactgttacatcgtccaaaattgaaatggactccaatggaggaattgcgatagttgaagtcaaagccaatatcgactatgaatatgaaataggaaaagactgcaaggattgggtaacactcaaggaaactcgcgcacttcagacaacaatgctttcatttgatgttgcccaaaatacagactttgaaaagcgggaaggaacgattactgtttttagcgacggattgtccgaaaccataactatttatcaagcgggagaagagcctactattgtactgacacaaaataaatacgatgtttcaggtgatggggaaacgataaaggtggaaataaatagcaatgttgattttcaagtaacgattccatctgatgtagattggataaaagaaacatggacacgggctatctcgacacatacaaaatattttaaaatagctactaattcgcctaatcaatctcgaagtgcggagattttatttacaaatacggaatatagcctttcagaaaaaatcatcatcaatcaaaaagcggcatcttatgtaaccgttcatgtcgttcaaaagggaggattatctgatgtactggttgataaagaattaaatcccgaatctattatttccatgaaaataataggggaattagatgccgaggattttttgacaatccagaatatgataaacctaaagaatctcgatcttgaagaagtgaacctaacagagcttccgacaaaggctttttataaaatgaaaaccattgagaatcttatattaccgcatacattaacgatcattaacgacagtgaattttatcaaaattcactgaagtcgataataatttcctcaaatgtggaaacgataggagaatatgcattttacgagtgtccattaaaatccattaacatcccagcgagtgtaaaggcgataaacaaagcggctttcatgaattgttcatcattagcaaccattaccttttcaaaaggttctatgctgacaaaaatatgcggaggaaaaggttttttgagccatggagagaaatattattatggagcatttgcaaattgcacggcattaacttccattgagattcccgcaaatgtagaaatcattgaagaagcggcgtttaaaaattgcacagctctaacgaccgtcacattcgagaataactcaagtttaaaaacgatatgtggagcaacctatgactattcttattacggcggagcattttctgattgcatttcgttgatttccattgaaattcctgcaagcgtagagacgattgaagctgctgcattcaaggggtgttccaagttggcaaccgtaacctttgagaaaggttctcaactgaaaactatcggtggtggctattctaattcttctgattattatggtgctttctcggattgtcctataacctctattgaaattccagcaagcgtagaaacgattgaagcggcggcattcaaggggtgtttggcattagcaaaaattacttttgagaaaggaatcaatctcaaaaaaattagcggcggttattctgaaaatagaaatacagatggctatttttatgggcatggggcatttgcaaaatgcacggcattgacatcaattgaaattcctgcaagtgttgaggtaattgaacctgaagcgttctggggttgttccgctttaataacagtgtcctttgaacacgaatcgcaattaaaaatcattcaaggcagttacgaaaaaatctatgtaggtcacagtcctaacggatataaccgctattatcgtagcggtggtttcagaggacttgcaaatcttacgacattcgatgcctctaattgctcgcaaatagaatcaattgaaccaagtgccttttatcattgttctaaactgcaatcggtcaaggttggtacaatgattccacccacttgcggcattgatgctttctcagaattaaattcatataccatattgacggtaccaaaggaaagcattgaggcatataaacaagcaaatgagtggaagaattttacaaatattacagcattaaattaagctcaatattttatgaaaactcttgatttaatattcttcggactaaagggaaaaataaacgggccaaaggctctaaaagagttggaatcactcggagttataaaaggcaataagatagtttatgatgataatgataaaatcttagaggctaaaatatatgcaataattgacaaatatttcgggcaacactgatttgtaaattgagtgacagactttgtaaaaaggttaatctataagacccttttgcagagtttgtcactttcttattttgtttattccgctaataatcttatctttataaagataaacaacaattaaattttagctaaaatgaacagatacaaacaacctaaaacagaatgaatgaccaaaacatgagaggataaacaagctatatgtaagttggtcgaatggagcaagacagagggaataggcttaattgtcataaagccccaaaatgagatttatcccgaaatgttttactttgttttctcgcccgaaacagcggacataaataaacccgttgaaatcgcacttgtaaagaacaaacaatgaataatcgggtgaaaaagcgaccttgaagagataaacgatataataggaataataatcgccaacgagatgaagatggagggcatgagcgaaacggtaaatttattcgactgccttgtcagagcgaacactatattatttcattacactacgcccgacggacgggacgaggtggtgaaattcccgttagctggattctgcgaaaactatctgatgcagtttgcaaagtagcggcaggaaccgtacggtagtatggaacaggcgcacgtattagaggcaacgaatattactccacaaaaaatggagttatatatactatatatcttaaaaggttaagggcaggccgaaaaaatgcgtttttcctttgacaacgacaagtgacagactaaaaacgaggggctatataattgccctttcaacagagtttgtcactttctctatttatcaaataatcaattaattcacctattgtttaaccagcattgagtttgtcctattgtgtaaaccaacgtgtaaaccgcgccgaacaacagcacgaaaaagagaaattcatcgacaaaatccgcgcccgtaactacctgttaatcaacgtcgccctacatttgcattcgcaattcggcaccgtagcttaattgaatagagcatctgactacggatcagaaggttacaggtttgagtcctgtcggtgtcacgaagagggagcaaagaaagttgctccctctattgttttttagcgagttacatcgctgaaaccaaactctttcggcaatgcaggtagtttttccgtgtctcgtttcaagcctgtttttcctcggttctcaccgtttatgtaaaccaaggtgcaaaccgattggaaaagaaaacccggggataacgccataaataaagcaaaaaatcattaactttatcagaaaaacatcccccaatgaaagaaaccactaaattcgatgatttttcaggcgaaaaagcgatctcgcttgcgaaaacttttgcaaaagacgcctacacgaaagaattaggagtcgtcctgagtgtggcctttagcgatatacgcaatctaccagcattggggtttaaccaggacgagtccatccccctcaaagaatatgtcaagaaatgggtttcacgatacttttcaggatacaatggcaggccgtcgaaacggcatggcaaaaaatcccaaacaaaaccggatcccgccgtaaaattaattctccgaacccgaagagaagatatcgacgacaatttcgcagacactcttgaaaaagggcactccatcatgatgacaatcgaggggatggtcggcaatctgctcgaagaatatctggcgacaattttgcacccgtatggctggtattgctgctggggaagcaccatagacgcggtcgacttttgcaaggaagacggctctttactccaggtgaagacaagcaacaattcggaaaacagttccagcatccgcgtgcggaacggaacagaaataagaatatggttccgaagattcttcaacaaagccaatacgttcaactgggtcgccctaaatgaaataatcggcagggacatattcaacgaagaagattctgaacgaaaattcagggatttcattacccggacgatccgggagaatcccggctgcatctacatccctgaaaagtgccatatcgaagctgttcagatggaattgtggtaaccccaaaaaacaatcgaacctttcgttccggatcggctcgattgttattataacgactatcgcgctcccggcattttaataattcatttcttatccgacaattattttccacaggaaatttgttttaatggaaaatattctacatctttgcatcgttattgatacagaagaactataaaaacggataatgaccatgaaaaaactattattgaccacgatgtgcatgctcggcctggcagcctgcgcaaacggcagcaacaaggaaaacaacactaaaaaagagaataccatgaaaacgatcgcactgaccaaggcggatttcctgaccaaagtcgcaaattacgaaacgaaccctacggagtggaagtacctcggcgacaaaccggcgctcatcgacttctacgcatcgtggtgcggcccctgcaaggcactcgccccggttctggaagagctggctgccgagtacgacgacagcatctacatctacaaggtgaataccgaagaggagcaggagctcgccgccgcgttcggcatccgctcgatcccgacgctgcttttcatccccacctgcggcaagccccagatcgcacagggtgccctgcccaaggcgtcgctcaaggaggccatcgacaaggtactgcttaacaagtagacaggcatggcactcaccgtcgacaatctccgctgcccgcagaaccaccggtgcccgctgctgacgatttgccccgtcggggcgattacgcaatcgggattcggacttccggtaatcgacccgaagaagtgtatcgaatgcggcaaatgcgtcgggcactgcggcaaacaggccatacacaaaccggcaggcaatggagaaactgtgtaagatccgcgagctgcaacgggccgtaaaccggttcgaagcggcactcgaacgctcgcacgggatctgcctgaacgaaggcatggccttatgcagcctttcgaaagccggacgtctctcctgcggggagctgggcgaaatgctggggcttactccgtcgaacacctcgaaggtgctccgctcggtcgaagggaaaggctacgtaaaccgggagttgggcacgaacgataagcggcagatgtacttttcgctgaccgaaaagggccgcgtgcttctgggaagcataaattgtgaagaaatcgaaacgcccgaattactgaaaacactattcggagaatgaatgacgcaaacggggcagctggtctttcgggatcggctgcttttttatacccgctcctgccagtcgtcattgtatggaacgaatggcatattacaatttttctcaaaaacacttatttatataatattttaaatattaaatgtggttttgtgtgatttttcatcattaaaagtggatttttaattaaaaattccttaaatttgtaaaaacagcataactgcacgacctcatggcaaaacgggaattattactcggagacgaagccctcgcactgggggcgctccacgcagggttgtcgggtgtctatgcctatccgggcacgccttcgaccgaaatcaccgaatatatacaaggacatccgctcaccgcccagcggggcatccactgcacatggtcggccaatgagaagacggcgattgaggaggcgctgggcatgtcgtttgccggaaaacgcgccctggtgtgcatgaagcatgtgggcatgaacgtcgccgccgacgccttcgtcaactcggcgatgacgggagccaacggcgggctggtcgtcgtggcggccgacgacccctcgatgcactcgtcccagaacgaacaggattcacgcttctacggcaagttcgcccttgtcccgacgttcgagccctccacgcagcaggaggcctacgagatggtgcaggccgcgttcgatttctcggaaaaataccgcatccccgtactgatgcgccttacgacccgcatggcccactcgcgcgccatggtcgaaccgcgcgaggcacgccccgagaacagcctcgcctatcccgcccggacgcgccaatgggtgctgatgccgggcaattcgcgcgtaagatacgaggcattgctcgccgactatgcccgcttcgaagaggaggcggccgcaagccccttcaaccgttacgccgatgctgaagacaaatcgctgggcatcatcgcctgcggcatcgcctacaactacctcgcggagaactatcccgacggatgcccgcacccggtgctcaaaatatcgcaatacccgctgccgcaggaactcgtgcgccgcatggcgtcggaatgcaaggcgctgctcatcatcgaggagggacaacccgtcgtcgaagaagccctgcgcggcatcctgcctgcgcccgttgagatccgcggccgcatgtcgggcgaactgccccgcaccggggaactgactccggacagcgtacgcacggccctggggctcgccccgcacgcgaccctcgccgccagcggcatcgtcgtcccccgtccgcccgcattgtgccagggttgcggccaccgcgacatgtatacggcactgacagaggtcgccggcgaatatgaaaatgccaaggtattcagcgacatcggctgctacacgctggggtggctctcgccgttccatgccatcgacacctgcgtcgacatgggcgcctcgatcaccatggccaaaggcgcagccgacgccggacagcaccccgccctggccgtcatcggcgactctaccttcacccactcggggatgaccgggctgctggacgccgtgaacgaggggacgaacatcacggtcgtcatttcggacaacctcaccacaggcatgaccggaggccaggattcggccggcacgggacgcctcgaacagatatgcgccggcctgggcgtcgaccccgcccacatccgcgtcgtagtgccgctgccccgaacccgcgaagagatgaaggccatgctccgcgaagagatcgcttacgacggcgtttcggtcatcatcccccgccgtgaatgcatacagaccgccaaacggcacaacgcaaccaaacagaaacaatagcgacacgcccgtcgcggcgaccacccggcggcaaaaccctaaaaacaggcaaaccatgaaacgcgacatcatactctcgggcgtagggggacaaggcatcctctcgatcgccaccgtcatcggcagggctgccctcgaccaggggctgcacatcaagcaggccgaagtccacggcatgagccagcggggcggcgacgtgcagtcgaacctgcgcatctcgtcggataaaatcgcctccgacctcattccgcgaggtgccgccgacctgatcatctcgctcgaaccgatggaagcactccgctacctgccgtggctttcgaccgggggctgggtcatcaccaacaccgccccgctggtcaacatccccgactatcccgatgccgatacgctcgggcgggagatagcctccctgccgcacagcgtggcgctcgacgtggatgccatcgcccgccaggccgcatcgccccgtgccgccaacatcgtgctgctgggcgccgcagcaccgttcctgggcatcgcacccgaaaaactcgaagcgggcatacgcgccattttcgcccgcaagggcgacgccatcgtcgacacgaacctcgcggcattccgcgcaggctacgcatacgcacaaaaacagaccgcacaatgggaaggctgccgatagaccgctccgtgctcgactccgcgctggagcgcatggacattgcggacatcgcccaggcgacgatccgccagtcgggcgacatagcccgcatcatggaaacgcagacggggatggaattcctgcacctcgaaatgggcgtgccggggcttccgcccgaaaaggcgggggtcgaagccgaatgccgggccctgcaatcgggcgtggcatcgcagtaccccaacatgttcggcatccccgaactcaaacaacagacttcgcgtttcatccgcgcgttcctcgacgtcggggtcgcaccgcagggctgcatcccgacggtcgggtcgatgcagggcagtttcacggctttcctgctctgctcgcagctcgcgcccgggaaggatacgatcctcttcatcgaccccggattccccgtgcagcgcaaccaggtgcagatcctcgatatccccagcgcatcgttcgacatctatgaataccgcgccgaaaaactgggcccgaagctggaaagctacctcgcacagggcaacatcgccgccatcgtctattcgaaccccaacaatccggcgtggatatgcctcaccgaggatgagctgcgtacgatcggcgagctggctacccgatacgacgccatcgtcatcgaagacctcgcctacctttgcatggacttccgcaaacccctgggacgccccttcgaagcgccctaccaggccaccgtggccagatacacggacaactacatcctgatgatctccggctcgaagatattcagctacgccggccagcgcatcgccatcgcggccatctccgacaaactctacccgcggcactaccccgcgctcaaacagcgctacggcatggggcgcttgggcgacgcctatgtcctgacgttcctctatgccgcctcgtcgggcacgagccactcggcgcagcacgccctggcggcgatgttccgcgctgcggccgacgggcagctcgatttcgtgggcgaaacctcggaatacgcccggcgcgcccgcctcaccaaggagattttccggcgccacggcttccgcatcgtctacgacaaggatcaggacgaaaccgtcagcgacggattcttctacaccgtcggctacggcggtctctccagcgcggagctgctgagcgaactgctcctctacggcatctgcgccatatcgctcacatcgaccggcagccgccagccgggcatccgggtctgcgtttcgcaactgaaccgccccgagcagttcgagctgctcgaaacacgcctaaccgccttcgggcaaaaccaccgataagcctatgcgattcacgacagccgccgaagccgtaaagctcatctgcccgcacagcagcgtctacattcagggcagcacctcgatccccgaagtgctcgtccgcgccatgaccgaccgcgccgccgagctcaccgatgtcacgctctactccggattcgccgtcgggagggcagacgccccctattgcagccccgaatacaaggatacgttcctggtcaacagcctgttcgtggccaataacatccgccgctggctggcccagggctacggacagtcgaccccggccttcctgggcgaaatcccagggctgttccgcgacgggacgctgcccgtcgacgtggcaatcctcaacctctcgcgccccaacgaggagggctactgctcgttcggcgtctcggccgacctggccgtttcggccgtggaatgcgccaggacagtcatcgcgcaggtcaacacggccatgccgttctcctacggcgacgccgtgatccacctctcgcgcgtcgccgcggccgtcgaggtcgacgacccgctggtcgaagtgccctcggcgacccccaccgacatcgaacgcaggatcggcaaccacatcgccgaactgatccccgacggggcgacgttgcagatcggcgtgggcgggatccccaacgccgtgctggccgcgctcacgggccacaaacacctcgggctgcataccgaggcgatgaccgacggcgtgctgccgctgctcaaaagcggcgtgatcgacaactcgctcaaacgggtcatgccgggtgtaacggtcgcctcgctggcgctgggatcgcgccggctgtacgattacatggactaccgcaaagacctcgtgatgaaggatgtggcatggacgaacgacccgttccgcatccgcgagaacccgcgcgtgatggcgatcaactcggccgtcgaggtagacctcacggggcaggtttgcgccgactcggttggcgagcgcatcatttcgggcgtaggcgggcagcacgatttcatgtacggaggggccctgtcggagggcggcaaaaccttcatcgccatcccgtcgactacccccaagggcgaatcgaagatcaaggcgctgctgacgcccggcgcaggcgtcgtgacgacccgccacatggtgcagcacatcgtgaccgaatacggcgttgcgcatctgcgcggccgtaacctcgcccagcgggcgcgggcactgatcgccgtcgcccacccctcggtgcgcgaagaactggaaaaagccgcctgcgaacgcttcggctactccttcctgaggctcaaatagaagcgccccgatcaaacgggacgcttatcggaggcatctacccagcccctataccaggcattgctgccggacaacggggatctgagatcaaatccgtgtggccgggcacacactctccaccctccgcaaacaagcagacctgccatatggcaggtctgcttgacacgtcgggatgccgcggttaccaccggcacaccggattattttgcgaacttcatttcgtcgagcaaccacccggcgtcggcatacttgtcgatcacccacatcacatagcggatatccacgcacaccgtgcgcgccagttcgggatggaaccacacgtcgccggccatcgactcgcggttgccgtcgaacgcaagcccgataagatgccccttgccgtcgagcacggggctgcccgaattgcctcccgtaatgtcgttgtcggtcaggaaattgacatagagcgtatcgttctcgccccagcgtccccagtcccgtttggcgatcagccgccgcatacggtcgtcgacgcggtattcgtattcatcggggttgtacttctccatataccccgcgatcgtcgaacgcgaatcgtaatgcacgccgtccgaagggttcaggggttgcacgctaccgtaggtcaggcgcatggtcgagttagcgttgggatactgcgccagcccttccgaagcacggaaatcgtaaagcacgtcggcatagcggctctcgcttcgcccgacacgcgcacggccgcgcttctcggccttgtccacaccgcccgtaaaacgttgtactgtgaccgattcggtaagcgcaaccatggggtcgcggcgtatttcggcaaccgaccggttcttcgagaaataggcgtcgtaacgcgcaggatcgctgcaaaacgaggcatcgaacgccgcacgcgccatgcggtcggcattgcctcccgccttgtcgtacatcgcctgcaactgcgcaccccacatctcgcgtggcacgttggccgtgaagttcactaccatccgcgccaacaggtcgcggtcggtcgcggcatcgtagttacggctcaggcggccgctcccggccacgacgctccgggcatccttcgaatccacgatcagcgagtcctgcttcagccgttcgagcttgcccaggtacgacgacacgcggttggccacgagcagcgcctcgctggggccgagccatgcctcgcggaaataattgaggttgcgctcggcgccctgccgcgccttataaccgcgcgcgagctcttcgagcaacgtcccgtcctcggccttgcgggccgaatcggcctcgatccagcgctgcaggcgttcctcctcggcctcacggatcgccacgacatcgaagcggcgcaggcatttgttctcccacttggcgtagtcggcgtagttgctcaggccgaaataggcatccgaatactccatgcgcacccgcggatcgcgttccatatggcgtttgagaatatccatccggtcatggcggttggccacgacgatcgggttgcggacacactgtttctcagccaccgcgaacgacgacgcatagcggttcgtacgccccgggaatccgatcaccatcgcaaaatcgccgtcatgcacgccgcccgtggcgacctgcaacacgcggcggggtttgagcggcacattgtcggcggaataggccgcagggcgcccctcccggtcggcatagacgcggtaaagcgcgaaatcgcccttgtgctggggccagccccagttgtcgtaatcgccgccgaaggcaccgatcgacgcaggcggcgtacccaccagccgcacatccttgtagatgtcgtagtagaacatcaggtacattttgccgccccacatcgagtagcacgacacctcgcactccgtttcccgaccgtagcgcccttccagttcggcatagaggcggcgcggagccatcatgccccatttcccggcggctttcatctcctccttgagcgcattggcctcgtcggtcacgtcgaccaccttgcgcacgaaccacacggtcttgccggggacgggaatctcctcatcgcgcgtgcgtgcccagaatcccgtttcgagcaggttgcattcgggcgtcgacagggcgcagatgtcgctgtaagccacatggtggttggtaatcatcagcccctggtcggaaatcatgctgcccgtccccataccgccgtcgactgccaccacggcatcggccagcgcagccgatttctcgttgtaaatctccttatccttgattttcagtccccgggccttcatctgcggataaatctccgccagccggtgcatcagccacatgccctcgtcggccctcgcggtctgcatacagagcagcacaacggccagacaggctatccatcttctcatatctttcattcttataaacgggagggcaccgtcgccgacgccctcccgttgagtttagggttactcttcgacggtcttaccctcggtcgtgaacttcagccgcgggtcggcctccttgaaggtgccgtcagccatgcgcagcgtccatttttcggcctggaaaacctctttccacagcttcgcgtcgtcccacatcgacttcacatagcggatgcgcatcacgggcttcatatcccgcaggacgaaatccacggacacgatgccgtccgtacacgaaaggaagctcttgaaataggggaacgcattgcggatcggcatcttctcgataccggggaataccatctcgtagaccgccttggggaactgctcgtcgtccccccacttctcctggttggcaacgaacctgcccgcgagcttctccacatcgcggaacatgatctgcgcaaactcctcgcgcgaaacctgtccggcgaccgcatagcttttaagcaccgtatgcatcgggatcaccttctcgctctccttggtcgggatgaccagttccttggcgtcgatcgcctccccgaacattttttcggtaataccggcggccggatcgacgtagaccgtcacatccaccggacaggcgaactccgacgtgaagccgtagactccctcgatcttctggagcaccatgccgaaatagatcatatccatccggtcgtggagcccttcgacgccgagcttcaccacgtcgagcatcggcacctgctcgcccggcatggcatatttgcgcagcgtcggcgcaaagatcgcagcctgtatcttcagcgtatcggtggcagccggatcgtaaagcacctcgacgccatggcggcgtacgaaggtcttgacgccgtatacgccctgcacggcctgcatcttggccgaaaaagccttcgacgaaccgaagcacttgatcgtctgcaagccctccatctcgaacgtctgcaggttctcgaccttctcgtagtcgccccacttctcgtcgatcgtcggcagttccatggtggaacccagccatatggccaggaagaagagcaccacggccagcaacccgggcacccagcgcagcgaacggcggccgttgacctgcaaggcatccttggcacacgcaccgatgcagttgccacacaacgtacagtcgacatgcttcaccttcacatagtcatggatcggaagctggtagggacatttcttttcgcacagtccgcaattattgcaggtgttcaagtcccgcttgatatacatcagggggaaggtgcaactgcgcatcttggcgatctcgacgatataggcggcaagacatgcgccgccgatcgtccatacccatgcgttcgcaacgcccagcgcaccgagcgcccagccgccgagggcggcgatcacgaacagcagcgtgaatttgaaaatgttgctggcagctcccagcggacagatatacttgcaccagaacatcttcaccacgaagccgcccaggagcagcagcgcaaggctcgtgagcgacatccaaagcacgatttcgcccttgaaacccgtagccacggcatagaacgggtcgagtttcttgcagaacagctcgctcgacgagagcgtgaaatagaggatcgtgaagagcagcacgtacttcaccacgcgcagcagcttgtcgacgatgctgcccgaagggacatcgacctgcaggtgcagttttttcccggcacgccccatccactcgccgacggtgcccagcggacagaggtatccgcaaaaaagtttgctgaacagaatcactcccacggcgagcacgaggcccatcatgatctggagcatcgacatcgagcaggccagcgagttgttcaccacataggtgccgaaagcctgcaacccgccaaaaggacaatatgcctcgacatcgacgggtttgtcgctcaatttggcccaaagcaccgtgcccgcaatggcggccagtacgccccattgcagcaggtgcttcagataattaggtttacgtttcatttattgttgtttgtgttgtgtgtgtttgtgtgtgcgggggtgaggatcactccttgtccttgatacagcggacgggagcggcgcaataaccaccctggtaagcgattgtcatgcgattgtaactcttgttgtaagttatcataccggcataatactggatgttcttgatgccgctttccggatcgtcggccgtattgtatgtaaccttgtaacccgtcgagctggggaaatatcccatgccgaacgccgaagcgtcgacagccgagaccgtggccatataggccggggtcgccgtggcgctcgtcgcattgatatagccgcagcccgcaatattgaaaccgtccttgttgagcgcggcaatcgaaccgccgccctgcgtcttttcgaaatagggcgatgtcgggtcggacaggctgccgctgccgacacccgccagcttgagccactcggccatcgtcgggatatgccacccgtcggggcaaataccctgcgcaccctcgtattggtcgaaattggtgcccgtcatctcgccggtcattcccagcatcacgggatagctgtacagcaggcccgcggtctcagtcaacgacgggtcggcggctttcgagaggttgcaggggtaccacaccccgttgccgtccttcgggtcgctcgatatggttttgccttcgggaacatagcgcaggttctcggccatccacgtgcggccgtccttgagcgtgacgatcttgtacttcacgccgccccactcgacggtcggggtctccacttcgccgtcgccgtccggcagcaggtcgtctccgtcaacccagcccgcgatcgggccgctgaatttcacctgaatgtcagccggctgcacgttgcagtccatgcggcggttctcacccgacttgaggtcggtcgtgccgagcgtctgcgtacgcatcttaccatcggccgtggtgaccgtaaccttgagctgcacaccgttctgcggcaccagcagcgcgtagtaaactttctcggcagtggccgtattggcggtcacgtcggatgcctcggcacccgccttggccgtaaaatcgcccgtggcaggatcgagcacaccggtgccgacagcacccttgatgacgatgtcccggatgtcgaaacccgattcgttcgtcacgctgatgacgatccgcgacattttgtgcttgaaggtcatctgcgtggacgacagcgtgggcttgacccccgtcttcacggccacgatcaggtcggaagccgtgtagttcgcaccgctctgatccgcctttaccgaaaactccgcaggcgccgcggcaccggcctggtagggataataggcgaagagcgtcgaggtggcgttgacatcttcgtaccagaggaaaccctcggtcttgaaatccgtaccgtcgaacgacatctccttgttcgccacgaacgccgaaccgtccgccgtcatcgtgatcgtgaggccgaccttgtcgttcagctcgaaatcggtgtccgtcgcccgcgtgccggacgacatgcttgccggcgtcagtgcaggattggcgatcgtcggggtgatgcgcacctgcttgtcgcccgtcccggtgctttcctccttcgagcaggcggtgaaaaccatcgccgcgactgccgtcaatgtcaaaatccttttcataatcctatcctttaaattaaaaattatatcctacactcagcgtcgccgcgacccggttgggctgcgcgacgtattccagaccgaagccgtgttcgtaacgcgcgaatacgtcgatatagaaccgtttgatattgcgccgcagcccgagcgctgcccccagccgtttggccgtgaggtattcgttttcgtaatcgtagtaagcggtcagctgcccgggatattcacccggctgcacgccgggggtctcgaactgcttttcacgctccgtgaaaccgcccaggcgataatccgccgcaagggtcagctcccagaggccgaacgtgcgaatcagcgaggcatatatcttcgtaaagtggagcttctgccccttgacataggggtacatcagcgtcgattcgcggttgagctgcgaataaccgaccccggcgcgcaaatccgtatgcggtgccacgaactcgtattcgcctcccaggtcaagtcccttgcgcccgaaagttggcgtcgaaccgtgtatagtgatgatctgcacgccgttgatggtctcggtggtgatgatgttctcgtcggtgccgagcgtctgccagtcgaggttcacacgcacgaaatgcctgcgcagtgccgtccccagcgacagggcggcattggccgtcacctggtgcgtttcgaacaggtgccagataatccggctctcgcccgtctcgccctgcctgttgcggtaggcgacgtcggcatagaacggcccgtattgcagttggacacccgccccctgcgtattctcccggacggggaatcccgaaacgccgttggtcgagaggtgtatgtcggtgctcccccacttctccagcgacccgtagagcagtcccctgtcgaagaatgcctcgtacaggtcggcaccggggcccacgccttccgcgtcgaccttctcgctgttcgtacccacgatatagaccgccccaacggcaaagcgtcccgcatggtacatcacgccgggcgaaaattcgaaatccagccgtgtattcttgtggcgcaggtctttgcgcttggcatagttgcgggcttcgaactccacgcgcaggccacccgtccaccggttgcccagcacggccgatacgccgcccgtgaacgtgtaatcctcgcgcaccttgcgccccggcgtaaattcgaggatgtccaccgggtaataccccggctcggtgaacatcgagccgcacatgttgcggccgtcgaaatagtcgtagccgaaaccgcccgagaacgagaccttcttcaggtggcgcaccgactcggttttcgccccggcattccaactgtcgtccgacgcggagtggcccgtaagcccgccgttctccttggtgaaatatatctcggcataggaacggctcagggagtcctgccggatacccgcagcgttcgggccgccgttccaggggttgcggcggaaaatatagtcgaaacgctcctgtgccgcggcagcagagacggcaaccagcatcagtatcgttaaaatccgtctcataggctaatcacgcaaagattgtgtctcacgctcataaaaatcgttcgacgagttattggtatccacgtacctttcgaagccggcagcagccgtggcctcttcatccagcttccgatgcagggtatgcccctgcgccttggccgagaaaccgatatacccggcatccacatcggtgtgcaggcgtttgttcttggtcgcctcggtcatgttgcatacctcgacgccgtccacgatccagtcgttgtcccacggtatcttcgaataggtgatgctgccgttctgaaccgtcgactgaaggtcgtcggccaagtaggcatccagatcgaacccctcaggcgcccggaagaggatcacggcgggcgaattctgcgaaatcacgtagacgacggccgaattggttccggtctttttcagcaccttcatgtaatgcgcctggtcgatctggtcgcccggaacaggcgtggggtgcaacttgttgccgggatagtgcaccatatcgtagagcacgaaacaacccttgcggttgaggttcaccgactgggaataggtctgcgtatggtcgacgccgtagtaggccaccacggcatcctcgccgggttgcagcgggaaatccatccccgatcccgggaacatccagatacaatcggggatggcggcgtaatcgcggaaaacgatattgcccgaagggtcggtgctcgtccacggattgttggcgttcgagttgtagggggcgaccatcgccaggcacaggccgtcgaggtaataggtttcgaaactgttgttgtgcaggacgatatatttgtcgtcggcataagtccccgtcgccggcggatcctgcatgcagccgcccgagtagatctccttgatgaggatcgtacccggcttggaaaatttcagcgccacgtcgacgtccttgtccccgccgacaaggtcgacctgctcgatcgtaccgttgaaaaccgccgaatcgtcgggcaggtcgagcaccgagagccggtaatgcccggcagcgacgcggaacccggcgtggccctgcgcatcggtcagggcggtatagacattgcccgtattgcggtcggagagtttcaccgcgacgccttcgcgcagatagccggcgtatccctcgggatacacggccgtcacacggagttcgcgcagcgcaccgtcgtaagggttcctgtcgaacgacgtgcaaccggccaccagcagacaggacaatatgcaaaatatctttctcatcgttttcagaatttaaggcgtaccgtaagtccgtaatagaaatcgggtgtgaagaccgccttgacacccgtggcgtacgacgcgacgaagggccgcgaattggtgaagttgttggcgtagaacgagacggagacatggtcgccgatctccttcgtgatgctcaggttggccgaaaaataggggtcgtaaccgtcgccgttgaaagagtaggcgttgcccgaacgcaacagcagggaggagaaggccgggtcgttcttctcggcatcggtaaagggatgacggttgccgtcgaggtcgatgtaggccacaggccagatcgccgtatagctgtcgccgtcgtagatgctcccgccggtggggttacggtcttcgtcgacgttgaaggcatactcgcgtcccttgtactccgaaaggttctgcgagcgcttcacgagcgaggcttcgagccgcagcgagatgaccatgcggatcgagggcacgtgcgtcgtggccgtgagattcatatccagcgcatgcagcttccggccgttgtaggtgacgttggagctgcccccgttatcgagataaacccccacataggggtagaactcgccgccggtcgaggtcgagggatagtagcatgcctcaccctcgttgacgtatttggtatagccgtaagccccgtcgagccgcagctgcgtgcggatggggttgatctgcgggaactccacgacgaactccagccccatgcggtctacgggcgaaccgttgttctgataggtattcttgacgaacgtccgtttcgtggaagtggtctgcatggcgatccagccggccgaggggttgtccttgtcacggacgaagatttcgcccgtctggctgtcgacccggaaagccgggttcgccggcatcgtgtatgcagtcccgtcgggcagcgtggagggcacgcccatcatattataggagaacggctcgaaggcggcgctcagcttataggggtatttcgtgcggttgaaatagccgaccagcgagatcgaggtacccccgatacgcaggtcgacgccgacctcggaattgcggttgcgctgccatttcaggttgtcgttgtagagtatctggtaaggctgcgtgtggtagacataggcgctctgccccgacccatagttggtagcgaacacgggcgtatcgcggtattcgggcagcgggtaaagcacgttgaacgacggcagtttctcggtgatgccccagcctccgcggacagtcagatggtcgttgatgcggaatttcaggttgaagcgtggcgagaggctcgacgtattctcgtattgcgtatttttgataaaagtcttttcggcacgcaggccggccatcagttgcagcgtggccgatcccagcggcacggtcagcgtctcctcgacgtaggccgcgaggttatgcatataggggatgtccgtatacggacgggggcggtaaccgttaggcgcgagggagggagtcgcatagtactccccgtccccgacattgccgttggcacgccacgaagcgccgaccttggcattgctgtgcacgtcgccccaactgcgcacccacgtggccttgaggttggccgcatagtcgagctgcttggaatcgacgtatttggtcgagtaatagaccggcgggagcatatcggcaatataatacccttcctgttcggcatggactgccggaagggaggtcgaattgagattgtaggtgcgcttgcgcgcaaggttgtcggtatagttgagcgacgcatcgaaatccaggctcgtgatccacgacctgttcagcagccatttgagcgaggtgttggcacgcagcacattgtcacgcaccttctcccactcgcctttctgggcatcggggtcgtcctcggtattcataccgccgatattggccgttacgccgaaattgaaatgcagaaccttggcgaaggtattctggtagttgagcgccagccccgtgcgggaataggaggtgtagggcgacgcagggttcttcgtggcccgcgtatactcgacgttgctgttcagcaccccgaggttccgccccaggtcgaagcccttcgaggcggcgatctgtttggtgcgcggattggtggagagcgtcaccgtatagggcgtcttgcccttgcgggtcgagattttcaccacgcccgacgaaatgtcgccgtattcggccgaaggtacgccggtcactacctcgaccgactcgatgttggtcgccgacaggttacgtgtgctggcacccgtcgggtcgcccagcgaagcattggtggaaaggcgtacgccgtcgacttcgacggccgtaccgaacgccgcattgccggccgtgctcccgccgctgcgcagcgagaagacattgtccttcatcaggtcggggttgaccgtcttgccgcccggcagcagtgccgagatgtccgacgcattgaccatttgcaggtggtcgatggcattgccgccgatcgtacgcgacgtagccatggcgttgggcgcctccttggccgtcaccacgacgctctccagtttcaggttatcctcgggggcataaagcctgaccggccccatccccatacgcacgtcgacctcggcttcggtggtaacgaaccccaggcaggaaacgacaaaacgcgtttccccggccgggactcccttcaccgtgaagtttccgtcggcatcggccacggcccacaatccggactgcggcaattcgacgactgcttgtccgatcggcttgccggtatcctttacaagcacccgtcccgtaacgtcgagacgctgcgccgacacgacagccgggacaatcgtgcataaaaacagtagtaaaagtttcctcatatgcttgacctaacgcaacaaatataacgaaaaagcattacccataaaccgtttatgttatttttttaacatataacgtaatttttgcctgcaaaaatagcgattcgggcctcaggcggcaatcgccatttatggggattttcaccggccaccctaccgggatatgcgcataaaacggggttttcccacctttatattatataggtcggaaagattaatatatgatttttagtactctgtattgcatagtatgtattttttgcttacatttgccgatattataaccacatttattggtgtttggtaattttttattgattttcgataaaaataaattgtttttcaagattatattattacctttgtcccaagcgcctcacacaccgcttacagattgtaaccctcaacatcgcaaaccgctttataacggcagactgaatatgataaagctggaaaacatcaacaagacctataataatgggtcacccctgcacgtgctcaaaggcatcgacctcgatgtagaaaagggcgaactggtctcgatcatgggcgcctcgggttcgggaaaatccaccctgctgaacatcctcgggattctcgacgactacgacagcggcagttactacctggccggacggctgatcaagaacctcagcgaaacgcaggccgccgctgcgcgcaacaacatgatcggctatattttccagtccttcaacctgatcaattacaagaacgccgtcgaaaacgtcgccctgccactctattaccagggcgtctcgcgccgcaaacgcaacgccctggcactcgaatacctcgacatgctggggctcagggagtgggccgaccacatgcccaacgaaatgtccggcggccagaaacagcgcgtggccatcgcccgggcgcttatcaacaagccccagatcatcctagccgacgaacccacgggcgcactggacagcgccacctcgcaggaagtgatgaacctgctgcgcagcgtgaacgttgatatgggcatgaccatcatctgcgtcacgcacgaacagtcgatcgccgaccaaacggacaagatcatccgtcttacggacggcgtcatcagcagtatcaccgaaaccggactcggaaagcgatgagggaactgctgctggagatctggacatcggtgcgccgcaacaagctgcgcacgttcctcacgggcttctcggtcgcgtggggcattttcatgctcgtcatcctgctgggctcgggcaacgggctcaagaacggcgtaacctccaatttcggcaactacgccaccaactcgatcaacctctacggcggccgtacttcgaagccctacatgggctaccagaaggggcgccgcatccgcctgtggaacagcgacctcgaaatcctcgcccgggaattccccgaggtagacgaagtggctgccaactcgtggttcgacaaccatacggcaacctacgggaacgaatacaccaaggtctggctgcgcggctcgctgcccaagatcgaacagatcgagggcgtggagatcgtaaaggggcgcttcgtcaacgacgcagacatccgcgaataccgcaagtcgctggtcatcgaccaggccatgcagtccctgctattcaagggcgccgatccgctgggggcaaggatcaagctcgacagcacggtattcaccgtggtcggcgtctacaagggcgacgcccagcgcagcagttcgtcgtgttacatcccgctgaccaccgggcagctgctctacaacgccaacagccccgaagtgaacaatgccatcatcaccatcaagggcgtccacaccaccgaggcgatgaaggagttcgaaaagcgcgtcatccggcgcctttccgccgagcaccatttcgcccccgacgacgaaagcgccatctggctcgacaatacgatggaaacctacaagaatttcatgatggttttcgcaggcatcaacgtcttcgtctggatcatcggcctggggacgctgctggccggcatcgtcggcgtgagcaacatcatgctcgtgacggtcacggagcgcacctccgaattcggcatacgcaaggcgctgggtgccaagcccgtgtcgatcatcaggctgatcctcaccgagtcggtgatgataaccgccgtattcggttacctgggtatggtattcggcgtggcgatgatggaaggggtcaactacatgctcaaccagacgccgcagacgggcgacggccatgcgccgtcgatcttcctcaacccgacgctcgacctgggcgttgcggtcagcgcgacggtcgtgctggtcatcgccggcctgatcgcaggctacgtccccgcctaccgggccgcacaactcaagacaatcgacgccctgcgttataacaagtagaagccatgggatttttcgatacagaccgctggaacgagatatggcaaacgatctcccgcaaccgcaagcgcagcatcatgacggcgctgggcgtcttctggggtatcttcatgcttaccgtactgctgggtgccggcatggggctggggcgcctgttccgggcgcagctgggcgacatgtcgaccaacacgctgctcatacagccttcgcagacctcgcttccctacaagggcatgcccaagaaccgctggtggcgcatgaacaacgacgacgtggaaaacgtccgagggctcaaggaggtgcagtacgcctcgggcgtctactggggcggggagatccattgcagctacaacgaacgcaagggcgactattcgctgatgggctacatgcccgactaccagcagatcaacccgcagaagatcatctacggccgcttcatcaacaacgtcgacatggcgcagaagcgcaaggtctgcgtcatcggcacccagatacagaaagacctgtttccgggaatggaagacccgaccggaaaggtcatcaaagtcaacaacagctatttcaccattatcggcgtcatgcggtgccagagcacggccatctcattcagcaacgtcgaacgcacggtcgtagccccgatctcgctcgcgcagcagatgtacggcgggggcaactcgatccacatgctggccatcgcgggccgggaagacaccccgagcaaagaggtcgaaaccgcctgcaagtcggtgatcttcgccaagtacctgatctcgccggatgacgagaaagccgcctggtgcatggccacggccgaaatattcgacaaggtgatgagcctcttctggggcatcgggttcctgacatggatcgtgggcctggggacactgctggccggcatcgtcggcgtgagcaacatcatgctggtgctggtcaaggagcgcacgcaggagatcggcatccgccgcgccctgggcgcaccgcctactgccatcatctcgcagatactctccgaaagtttcatcctcaccttcatcgccggggtggtcggcctcacggccgcggtcggggtgctgtcggtcgccgattcgatctattaccaggcggtgaccgtggcccaggagggtgccgaaatctcgtggcaaatatcgttcggaacaggtatgctggcgcttttcatcctcgtggccggcagcctgctggcgggcgtcatccccgcctaccgggccctgagcatcaaggctgtggatgcaatacgtgaagaataaattaaattaaatcaatagattacggctatgaaaaaatttctgaaaatctttctgggtgtgctctttgcggcgctgttgctcggaacgttcgtgttcctgtggcagaagacccgtccggtaaaggtagtctacacgatcgtacaacccaaactcgacacgctcaaacaattcgtggtcgccaccggcaaggtcgaaccccgcgacgaggtgctgatcaagccccagatttcgggtatcgtttccaacgtctacaaggaggccgggcagatggtgcgcaagggcgaggtgatcgccacggtgaaggtcgtgccggagatgggacagctttcgagcgccgaatcgcgcgtttcggtagccgaaatatcgctggcgcagacccgccgcgaattcggccgcacggaaacactgcacgacaagggcgtcgtctcagacgaggagttcgaacaggggcgcaccgacctccagaaagccgaagaggaactgcagaacgccaaggagaacctggagatcgtcaaaaacggcatcaccagccgctacaaggagctcagcaacacgcagatccgatcgacgatcgacggtatgatcctcgacgtgccgatcaaggtcggaaactcggtgatccaggccaacacgttcaacgacggtacgaccatcgcctccgtagccgacatgtcgaacatgctcttccggggcaacgtcgacgaaacggacgtcggcaagttgcacgaaggcatgcccgtgaaactgacgatcggcgccctgcagaacgtcgaactggatgccaacctggagtacgtttcgcccaaagcgaccgaggataacggcgtcatcatgttcgaagtgaaggctgccgtgaagattcccgccgacgtcttcgtgcgcgccgggtacagtgccaacgccagcatcgtgatcgaaagccgcgaaggcgtgctcacgcttcccgagagcaccgtcgaattcgagggtgagaaaacgtatgtctacctgctcaccagcgccgaggacatcgcagagcagaccttcgataaacgcgaggtcaagataggcctttcggacggcatcaacatcgaacttaccgaaggcgtgaccgccgacgacaaagtccgcggcgcgaaggaagacaagaagaaataaccccaaatgcaccgcagcatgaaaaccagcaccctattcgccgctctctgtacagctgccgccgctctctgcgcaatgcccgcgggggcccagaccgcaccagctgcacctcaagcctccgcagcaccggcacccggcacgccctggtcgctcgacgactgcatcgggtatgccctggccaacaacatcgacgtgcagcaacgcgccctgcaggtcgaacagaacgaggtggaactatcgacggccaaatacagccgcctgcccgacctgaacgcctcgatcggaggcgacgcatcgttcggccgcgtactctcgagcgacaatacttataaggacaacaaccagacctcgggttcgctcaacatctcgaccagcatccccgtattccagggcatgcgcatcaaccgccaggtcaaaggcggcaaactcgacctggccgcagccatgcaggatctggaacgtgcccgcgaagacgtgtcgatcaacgtcatgacactctatctggaggtactttacaacaaggaactcaccgacgttgccgaacgccagctcgccctgagcaccctgcaggccacgcagagtcgcgaactggtcgccgccggcaaacagccggaatcggcccggtacgaaagcgaggcgctcatggccaaagaccagctgagcctgacccaggcccgcaacgacctgcaactggcactgctcaacctgagccaggccctcaaccgcaagagcgccgcagggttcgacgtcgtggttccggagctcgacagcgtgacgctcgcctcgctgcaccggctgggcacggcagacggggtctacaactatgcagtggaaaaccgtccgcatatcaaggcggagcggctgcggctcgaaagttcggagaattcagtcctcattgccaaatcggcactctatccctccatctcgctttcaggcggctacggcacgggggtgtacagcgccgacagcgataagttctgggcccagatgcgccataacagccgcgaatacgtcggactgtcgatgaacatcccgatcttcaaccgccgcgccacgcgcaacaatatccgctcggcacagctttcggcccgcagccagcagctcgcgctgaccgaagccgagctggcgctgcgcaaggagatcgaacaggcgtggtacaacgccgacgcggcgtacagcaaataccgttcggccggcgtagccctcgcctcggccgaggtagcgttcgcctacgaacagcagaaggcggaatcgggccgttcgaccattttcgatttcaacgatgccaagacccgcatggaaaaagccgagtcggaactcgtgcaggcgaaatacgaattcgtattccgttcgaaaatactggatttttaccgcgggaaaccgctgaaactgtaatccggacaggtaaacagatcgtacataataaacaaatcagggcggccgatatcgaccgccctgatgctgtccggaacaaccaatccctaaagttttccggcagcggccgggtaaggttttcagactcccacccggcacagaagcccttttgcgtcactaattaccccctccatcccctgtgtgaagtagggtagtgcaaagatatgtaaattatcctgaactgcatagtgcggggtctgttttgtcataacatggagctaaaatgatttaccttgccgaccgaaaatgttgcacacagacacaatgagcccacaaaaggttcggcaaaaaggcgggtatctggaaaatttgccctacttttgcagcaaattcacaaacggaaaggatggaatggcttaaaagtttattcgtcgaacactcggccctgcaggccgtcgtggttatttcgctcatttcgacgatcgggatcgccctcggccggatacgcatcttcggcatctcgctgggcgtggcattcatctttttcgcaggtatcctggccgggcatttcggactgtcgatcgacccggcgatgctgaactatgccgagagcttcgggctcatcatcttcgtatacgccctcggcctgcaggtcggccccggcttcttcaactcgctgcgcgccgacggactgcgcctgatgtcgcccgcccttgcggtagtattgctcggcacggggctggccgtggcaatgagctatacgctgcacgtctcgatgcccgacatgtcgggcatcctgtgcggcgccacgaccaacaccccggcgctcggagcggcgcagcaggcgctgcaacagatgggcgtcgactccagcggcgccgccctgagctgcgccgtgacctatccgctgggcgtggtgggcgtcatcctggccatcgtcttcatccgcaagctcttcgtccgccccgccgacatgccggagccggacgccgaacaccggaaaaacgtcttcattgccagctaccacctgaccaacccggccgtattcggcaagagcgtacacgaaatagccgctcagagccaccaccatttcgtcatttcgcgcgtatggcgcgaaggaaaggtttcgatccccacctccgacaagacgctacagaaggacgacgtcatcctcgtgatcaccaccccgggcgaggccgatgcgctgcg

SEQ ID NO: 318 - DNA, 70485 bp, Alistipes onderdonkii
  source 1..70485: mol_type = genomic DNA
tccgccgcaccctcgaggtgggtgcgattcattgttgataaacaggttgaaaggttgttgaaaaacgagaataacaattcgtaaacgactgacaattaactctatctggatgtcgataacttgtgcactgtgcaccgtgcggcgtgaattgtgtggcaaatatacgacggcgtatacccccttgtcaagaggcggaagcactttttctaaaatttgtggaaaaactcccgaattttgattacctttgcaacatcgaaccaacagttttatacccttatggatgatggtcatagttccacgtatagcggccgtgtcgtatctcaatacgataccgttcatctatggtatcgagcacgaaggtaacctccgtgccgaactgctgttgtctccgccttccctctgtgcaaagaatttcgccgaacacaaagccgacatcgcactggtgccggccgcagccgtgccgtcgctggcggatgcgcaggtagtgaccgagtactgcatcggagccgccggccccgtgcggacggtggtgctcctgagcaacgagccgatcgaaaaggcgcgccgcgtattcctcgatgcccattcgctcacgtcggtgcaactggccggctacctgcttgcaaagcactggaaagtcacccccgaatactatacgctcgaagattatgcgcagctggggcacgccctgccgggcgacgcctttctgctgatcggcgacaaggtcttcgaccacgaaggacgtttcgcatactcgtacgacctggccgccgagtggaaaaaggccacgcggctgccttttgcgttcgccgtctgggtcgcccgcaagggtaccgaccccgacctcacggaggggttgcagcatgcgctgactttcggtatcgagcacacctacgaggccattctcgaacatggtttcgacaacaaaccgtacgatgcgtatgcctaccttacgcagaatatcgactatattttcgacaatcagaagcataaagcgctgcaaaagttctgggactcgggtatcaaggtaaccccgagggccaatcccggctgaagagcttagcggacagccgatccgcctctctgccgaacaggatttttaactttaagaaggagagcgttttatgattacaatttacctcaagcagtacaacaagattatccggaatgccgacacgaagctcttcgacgagctgggttacgacgacattctgtggatcgacatgctcctgccgaccattaaggagcagaaggccgtcgagaattttatggagatcagcctccagaccaaacagcaggtcgaggagatcgagtccacgtcgaaatattcggagaacgagaatgccatcatctccaactccaacttcttcgtgccgacgggcgatacgttcatcgtcgaacccgtgtcgttcatcatctccaacgagggtgtgctggtttcggtgcgcagcgccgagttccgtaccttccgtgaaacggaaaaacgtcttcagatgaactaccgcagctattcgacgggctaccaccttttcatttcgctgctcgaggtgcgcatcgatttcgacgccgacctggtggagctgatcgccaagcaggtcgcggcgctctcgaaggacatcaactccgaggactcgatcgacaaggccgtcctgcaccgcatcagcgccctgcaggagagtacgatgtcgctgcgcgagaatatcttcgaccgccagcgcgtgttgtcgggcatcctgcgctccgagcgcttcccgaacgatatctacccccgcctgcaactgatgatcaaggacgtcaactcgctgatcaaccatgccgatttcagcttccagcgactggactatatccaggacgccgcgctgggtcttatcaacattgagcagaacgagatcgtcaaaattttctccgtggccgcggtgatcttcatgcccgcgacgcttatcgcgtcgatctatggcatgaacttcaaattcatgcccgagttagactggacgctgacgctcggaaacggctggaacatccccctgggctatatctttgccatcggcctgatgatcttctgctcggcgctgaccatctggtatttcaaatacaaaaagtggctgtaatacggctggccagagcgctgtcctcgtaatcggtacggccggagttccagtggttttttcggtggtttcttgcgggaatgctgccggcattccatgcttggtatttcattccggcatccagtttcttcccttccctcctctcggctccggttcccttttccgtttccggaggctcgctttttcagcccttttcgccccttccgttttcctcctcgcgcatccgttttccggcgctccccgttccacgctttcccgctcgggttttctcttctttcttaagaaagaaagagaatgtagccttttccccgcaattttcgtatatttgcaggctataagctgtgtccatgctcgaaaaacttgcaaaacagactgccgtctacggcatcagtactattgccgtaaggttcctgagctatctgctcacgccttactatacccgcattttcgggcaggagacctatggcgtcgtcacggatatctacgccctgatcccgctgacgctcacgctgctgacgatgggtatggagtcgagctatttccgtttctcggccaaagccgaagaggcgggcggcgacgtgaaggccgccaaacgcaggctttttgccacgacatggggcgtcacctcgcttgccgccgccgttttctttgtcgtcgtcgcctttttccgtgacgggatttcgcacctgatgggcgaggcttatgtggcacaccccgaatacatcgtctgggtagggctcatcatcctgttcgacgtctggtcatgcatccccttctcacggctgcgcgagcagggacgggcgttgctgttcgtcggactcaaggcgttgggcgtcgtgctcaatgtcgtcctggccgtggcattcggcctcgccgggcttttttccaccgggttcggcgtgggttgggtcttcgtcgccaaccttgtcgccagtgccctgacgtggctggtaatcctcgccaccgtcgatcgtaccgtgccgaagatcaactgggccctgctggccgccgttttcgcctattcgctgccattgcttatcggcgggcttgcgggtacggccaacgagttcatcgaccgtcagctgatcaaatacctcgtgcccgagggggccatggcggagctgggggtttacggcgctatcaccaagatcgccgtggtgatgatgcttttctaccagatgtaccgccttgccgccgagccgttcttcctctcaaacttcaaaaagtccgatttcgtgcagatgaacgccgcggcgctgaaatactatgtcatggcctcgatgctgatcttcctgggcatcgccctgttccgcgacctgttcgcgctgatcgtgggacgcgatttccgcgaagggatcttcatcctcccggtcgtgctcggggccaacgtgctgacaggcgtgtggctcaacctctcgttctggtataaacgcgaggagaaaacctcgctggcgatcgtcgttacgggtgccgggctcgtcgccatgatggccttcggtttctggttcatcccgctgtggggatactacggggctgcctgggcccggctggcgagcgagtcggcgatggtgggtgtgagctggtggctcaaccgccggttttacccgacgccctacgactgggggcgcatcggcgagtatgtggccgtggcgcttgcggtctttgcggcctgcgaagcagtaacggccttcgacggcaataaattgataacctatgcgtttaatatagtgctgtttgcggcttatgccgtctacctcgtccgccgcgagcggatcgatgtcggggcgatgctgagagcggcgctgaaacggaaatagacaatgccgagacacctgtatatccgaaccgtgcttgccggggcgagtgtgaaccctgtggggaaatgatatggcgatgaaacggaaggtgaaagagaaggccgtggtgctggcgatgagtttcgtgctcttcatgggaggtgtatccgcgctttcgatggatcgcggcaacggccgtacgattgtcctggtattcgttgtgctggcgctgctggctatcgccgcccggcagacgatacggagtttgaagaagaaaaaggagtagaagatatgcgttttgcggacataacgggacaggaagatctgaaacggcatctggtgcagagtgtcgatgcaggacgggtgagccatgcccaactcttcacggggcaggcgggtgcgggtgccctcgcccttgccgtggcctatgtgcaatacctttgctgccaccatcgccatgacggcgattcgtgcggtgagtgtcccgactgcaggcagatcgctgcgttggcgcaccccgatctgcacctggttttcccggtcaacaagcaggggaagaaatccggcgaggtgatgcgcagcgatgaattcctgccgctgttccgcgccattttcggagaaaatggcggctatttctcggcgcaggactggtacgaacgcctcgacctgggcaagacgctcaaaggcatgatcgcagcccgtgaggccgacgaaatcatccgcaaactctcgttcaagagtttcgaggccgactataagacaatgctgatctggctcccggaagcgatgaacgaggaggcggctaacaagatcctcaagatcttggaggagccttgggaaaagacgcttttcctgctggtttccgagcagcccgaccgcctgttgccgacgatcctctcgcgtacacaggaggtcgccgtgccgcgcatcgcacccgacgttctggagcgtgtggcccgcgagcgggggatcgccgatccggtgaaagcccgtaacatggcccgtcttgcagggggcgatctgctggaactgaaacatctcgtggccggcgagagcgatgccttgcggaaagagaatttcgacctcttctgcgggcttatgcggctaagctacaacgacaagcatctggaactcgtcgcctgggccgaagatgccgcacagctttcgcgcgaacagcagcgtgcttttctgcgggatgccgcgcgcctcttgcgcgagagttacatgctccatgcgggcatcaatgaagtctgctacctctggggcgaggagctggctttctgtaccaaattcgccccttttatcggatcgcagaacatagaaccgctcatcggcgagatcgaaagcgctttggcgcagatttcgcagaatggcaatccgacgatcgtattcacccattttgcccttgcggtgagcaaaatgataaaacgactctgacttatggcacgtgtagtacttcttaccggcggcaatacgggcgacgtgaaacggacgctccaggctgcgcaacaactcatcaacgcccgcgtgggcgccgtgctgcgttgttcgcaccgttacgaaagcaagccgtggggcttcgatgccgaacagcatttctcgaaccaggcgcttgaggtctccaccgacctgcaaccgctcgaggtgcttgaggccgtgcaggccatcgagcaggaactgggccgcaaccgcgcggccgaagcggtcgagaaagcccgtacgggcgtggcctacacctcgcggccgatcgacatcgacatcctcttctacgacgacgaggtgatcgcaagcgagcggctcaccgttccccacccgctcctttccgagcgggaattcgccctggccccgctgtgcgaaatcatgcgccagcgccgccacccggtcacggggcagaccatggaggagatgtacgaggccctgcgcccgaatgaaaattaaaaaagagagaacattgaaaaggggacgaataataacgttgttcacggccgtcgtgctgttcgcgggatgtttcaaggaggtctcgtacaggacggactatgtgctcaagccgcttgtgcaggagaactcgggcgatgtcgcccaattgcttcccgaggggaaggcgcaggcttttgcccatgctgccgacacggtcttttgggaggtcgcttcttacgaagacgccctggccgggatcattacgcggcgggacaacccgtccgaaaaacagaccgtgccgctcgtgacggccgaaccctaccagcaggaagggattgccggatggctctcgatgcggatcgacaaaccgtcggtaatggtcgtcgcggtcgataccgagcacaggatttacggctatacccaacaggagatcgccgagaatttcccaaagctctacgtttccgtcgtcttcaagccgtggaaggaggggacggaatacaaggacggcaactggattttccgcaaccagttctatgtgcctccgacctatctcgattgttacatcgtaccttcggtgcaggccgaggagggcggcgaaacgaccgagccttcgaaactcaaggcctatgcctatgccgtcgatacgacggcgtggaggatcgcctcatacatcgacgccgcggccggagtcatcacctcgaagaacgacccgtcgcaaacccgttccaaccccaatttcactgcctcgaaagaggagtcgggcgcttacggcatggaagtgagcagcccgacgctgatggtggtcgtggtcgaccagaccaacgaggtttacgcctattcgaaacaggaggtcgacctcgacggcgagcccgtgaccttcccgattgtcttccgcacatggcgcccggaatacctctatgtcgaggaaggctggcgcgtggtcaatgaaaagaacgccgacccggaacaggagggttcggatacaactaaatgataacgatggatatccgcaaaagacatatcgtccgcacgctgcgtgccgccgtgctgctgcttttcgtttcggctttcctgagccgttgcgcgagcatgatgacccccacgggcgggccgcgcgattcgctgcccccggtcatcgtgaacatgacgcccgacaacttttcgaccaaccggccgctcgtgaaccacgagaagatctacatcgagttcgacgagttcgtgcagctcaaggatcagcaaaaggagttcttcacctcgccgcagatgaagaagaaaccgctcgtttcgctgcgtggccgtggcgtcgtcatccagttgcgcgatacgctcgaggcgaatacgacctattcgctcaacttcggcagtgccatccgtgacaacaacgagggcaacccgctctactcgatgcgttatgtcttctcgacggggcccgagatcgactcgatggtcatgtcgggttatacggccgacagctataaggccgactccgtgtcgaagagcttcatctggttcttccccgccgattcggtggaaaacgtcgccgaatacgactcgacgatcttcaagtacaagccggctgccatcgcccgcgccgagaacaacggtatcttcatcgcccagaacctcaagccgatcgcttaccgcgtctatgccgtccaggacaagaacgacaaccagatttatgaacccggttccgacctggtaggcttcctcgaaggtacctacaacccccgcgagcaacccgatttcgccatgtggtacgattcgatccgccaatatgtcgtggccgaaccgcagctctacctgcgcatgtttaccgacaaggcgttccggcgccaggtgctttcgcagtccgaacggcccctgcaacacaaggcgatgctctatttcgcggccgcacacccgcagatcgagcgtatccgtttcgacagcatccccgaggatcgggtcatcttcgacccgcagaccgtcgggcgcgacaccatcgccctgtggttcaacatgccttcgtcggcactccccgatacgatcaagggcgagatcacctatttcaagcacgatacggtcaatgtcctgcaatcggtcaccgagcccttgaagctggcctggaggttcatcgaaaccaaagagcaggagaaggagcgcgagaagctcgaacgcgaccgccgcaaggccgaggccgcgggcgaggagtgggtcgagccgaagaaggagaacccctttgcctacaaactcccgctgtcgggcgaggtgaaccccgagaaccatctgacgatggatttcgactatccgcttacgaagctcgattcggccgccatgctcctcacgcttacgcatcccgacaacagtatcgaggatattcccgtgtatttggtgcgcgatacggcgcagctgcgccgctattatatccgtgcgccctggaaaaccggcgggcaatataccctcaccatccctgaaggggccattaccgatgtggcgggattttccaacgactcgatcatcggcaagtatacggtgctcgaccccgagaagttcgccacggtgaagatccatgtcacgggcaaggacgacagttcgaagtacatactccagctgctcgacggcaacaacgccctcaaacaggagaagcgcgacgttaccacgggcgactggcagttcaatttcgtcccggccggtgaaattaagttccgtgtcatcgaggacaagaacggcaacggcaagtgggacacgggcaatgtggtcgaacgccgccagcccgaacgcgccgaaatctatgccaacgacgaaggcgaagactcctttgccacgaaagccaactgggaggtcgagttctcgatcgacatgaacaccctgttcgctcccgtgacgatggagtcgctttcgcgcacgcttgaggaacgtgaggcccagcgcctgcgccgcgaggccgagaaacgcgccaaggaacccaagaagaagggtcacagccacgataacaatcagaataataaccgcatgaataacagcatgaactccacgggcggcatgttcaataatttccgatagcgcgatgatgaagagacgattcaaaaacctgttgttgttcgcggctgccgtatgctgctggcatggtgcttcggcgcaacatacgctcggttttacggccggttacggcatggccagcgcccgcttcgaccccaaacaggagatgaaggggatgtggggtatctataccgccggccttacttggcgctactatggtacgcaacgcttcgtgggcggtttcggtatcgacctcgaattcctgcaacagggtttctcctttgcaaccaatgcctcgctggtcgaggagccgaaggatttccgttactatacgcgccatatcaattcggtcatgctgcccatcgtctggcagccccatatatatatgctgcgccaccgtgtgcgcgtttacctcgaagctgcggccaccttttcctaccagctttcgtccgactacgaggatgagagcgccaaggcatcgggaatggccgactggaagggggattacaactacaagacggcccgcgacagccgctggggctacgggcttgcgggcggcggcggtatcgcctttctgatacgccgcttcgagatcaatgtccgcgcccgttattacttcgggctttcggacgtcgtccgcaaccgcaacaagtatgcggacaacggcatcgacggttccgaaaacccgttttggacgacgcctatgcgctcgccgctggacaacctcactatttcggtggggttgagctaccgcttcaacaaggagggcttctcgacctggaaaccgcgtcccaaacgcgaaaagaaccgcgaagtcttcaaatacggattataaatattcaagccatggaaaccacacgacagcaaaaaatcgccaaacagatacagaaggacgtggccgagatcttccagaaggagggggccggcatcgtccgcggggcgctcgtcacggtcacggccgtgcgtatctcgcccgatttcggctatgccaaggtctacgtcagcatcttcccctttgaccggagtgccgcgacgatgaaggagatcgagcatcagaactggtttatccgccgggccctcgggcagcggatccgcaaccaggtcaagaatgtgcccgagttgcagttcttcctcgacgattcgctcgaatacatcgagcatatcgaagaagcgctcaagcacgacaagcccgaatagctcccgcttcccgacgtcatgttgccgcagtttttcgcccgccgctaccttttctcgcccaaatcccgttcggtcgtcaacctgatctcgggactgagcgtggtagccgtcgcgatgcctgtcgctgcgatgatcatcctgctttcggtcttcaacggtttcgaaagcctcgtgaagtcgatgtattcggccttcgacgccgacctaaccgtctctgcgcggctggggcagacttttcctgccgacgcgatagacacggccgccgtggcacggattcccggggtcgaagcgttttcgttcgtcctcgaacagagcgccctgctggaacatgccggacgccaggctacggcgacggtgcggggtgtcgacgatgcgtatgccgcggtgtttccgctcgacagtgtcgtttcagcgggtgaataccgggtgcgcctgggggatattgaacgactcgtcatggggcagtcgatgacttatatgctgggcatccgctcgcttgccgatgccgatgtcaatgtctacgccgtgcgccggggttcgttctcctcgctgctgcctttcgacaactatacgcggcggacggtgcccctcggcggggtttattcgctcgacctggagacggagcggacatatgtcctggcgtcgctgcggctggcacaggaacttttcagccatcccggccgtgtttcggggcttgtcgtccgcctgcgcgagggcgccgatgcggagcaagtgcgtcaggctctggcgcggctgtcgggtgacgattaccgcgtccgcacgcgccacgaactgcgggcctccttctaccggatcatgacctatgagaaatggggtattttcttcatttcgctgctggtactggtcatcgcgtcgttctcggtcgtcggggcgttggcgatgctgatcgtcgacaagcggcgcgacattgtgaccctgcgtgcgctgggagccgacacgtcgctcgtgcgggctattttccgcagcgaagggttgctcatctgcggcctcggcgctgcgtgcggggcgttgctgggcgtcgggctgagtcttttgcagcagcacttcggcctgatcgaaatcccggccgaaacgcttcttgccaagagctatcccgtcgaattccgcccgggcgacctgctggccgtgctggtggccttcggccttgtcgcctatgttatttcgaacattaccgtgcgcagcatggtgaaacataatgcctgattatgaaacgcattttccgtatatcgctctgcgcgttcctgctgcttgcaggcgccgcctgtacccgccacaagattatccccgatgagaaactggcgcagatcttccacgacgccttcctcacgaacgcctatattggcgacgtgcgggtcaatatcgactcgctgaacatctacgaaccgatcttcgcccgctatggctatacgacccgtgatgtctactatacgatcgggaacttttcgaagcgcaagagcgcccgtctgggcgacgtcgtcgagatggcgatcgataaactcgaagccgagggtaaattttacgaccgtgaggttgccgtgctcgatacgatcgacaacgtggcccgccgtactttcacgcgtacggtctatgccgattcgctgatccgcgtggggtcgctgcgcgatacggcgcgcctgcggatcgccgtcgatgtgcagcccggcgagtacgaattgcggctcaaatacctcgtcgactcgctcgaccggaacgagaaggggttgcggggcgtcgtctggctcgaaaaccgggacggcgggcgcagtagcgtctattccacgacgctgcgccgtaaccggacggagaatttcacccgccgtttcacggtcgatactacccaccggcgcctgcacctggatttcctggatttccgcgagaagcccctgcgtccctcggtgacggtgaccggcctcgaaatcgactacattcccacgacgtccgttgccgtcgacagcctttaccggcaacaactcgacctgcgaatctttgccgatgaattcctccgcgcagccatccaggcggatagcctctaacctgctctggacaccgcagggtctgctccgcaatcccctggtcggggttgcggccgacggccgtatcctctccgtcgtgacgtgtcccgagcccgaccggtgtcccggcaccgagttctatgccggggtgctcgctccggggctggtcaatgcccactgccacctcgaactctcctatttgctgggggcgatccccgaacggtgtggttttgcggggtttgccggtgccatgtcgcaggtgcgggagcgcttctccgccgaacagcgtgcacaagccgtcgaagccgccgatgccgccatgtggcaggccgggatccaagccgtaggcgatatttcgaacggggataccgctttcgccgtaaaatcgcgcagccgcatcgcctaccatactttcgtcgagtttttcggtctgcgcgccgcgtcggccgagcacctgctgcctctgctccgccatccgcaaacttcgctgaccccccattcgctctattcggtgcaggatgcccccttgcgtgcgatcgctgcccggggcgataccccgctttcgatccatttcatggaatctcccggcgaagcggcgctcttcgaacaccgcggcccgctgtgggagtggtacgcgaaggccggtttctcctgcgatttcctgcattacggctccccggccgaacgtctcgtggcctgcgtgccgcacgaccgccgcgtgaccctggtgcatgactgctgcataacgcagcgcgacatagacatcgttatgggccattttacggcgcccgtatggtggtgcctgtgcccccgttcaaaccgctatatctccggcctcgaaccccctgtggagctgttacgccgcaatcgcctcaatatttgcctcggaaccgactcgctggcttcgaacgaccggctttcggttttcgaagaaatgcgtatgttccccggcatcccgcttcccgaactgctcgcctgggctgccgggggcggtgcacaggcattgggtatggaggatgcactcggcgaaatagctcccggccgtcgttgcggcctcacggtcatttcagggttggattacggcacgctgtgcctgaccccggcgtcgcagatccgccgtattctctgaccgggatactttccctccccgtatgcgtggttatcgtacggatgcttgccgccggtagatgaaaacaaaaaggagcttcccccgtcgggaagctcctcgtattttgaggccggatgcctatttacccagtgcgttgcagagtttctggttgatcttgcggatacgttccggctcgaccttcatctccttgcggtcgtaggtcatcagtccgttgacctccatttcgacgtcggtggtctgcgtgtatacgcctgccgaaaatccgcggccgatcagcttgtagagcatttccgcatacttttcgtattcgtccgtcacctccttgggcgagttgaggcggatatagccccagttgcggtcgggttcccagaggtgccccttcatcacgaagccgatgccgccgtactcacccagcaccgttgcgcggttggtatcgagcagcgtcaggcgcgggttggggtagtggtgcgtgtcgaggatgtcgcccgtaaggtaatggttgccgccgctggcggggttgaccaggcgcgaaggatcgtaagccttcgtccactctacgatttcctgggtcttgaactgtccccagcactcgttgaagggaacccatacgccgatcgagggggacgagtagaggtagtcgatgatctctttccactccttgcggaagttggcctccgattctgccgaccggtgcttctcctcgcccgtgaaatagttgtgcatctgccactgcgggccgcggtcgccgctgggcatgtcctgccatacgatcatgccgagtttgtcgcagtggtagtaccagcgtgcgggctcgacctttacgtgtttgcgtatcatgttgtaacccagatccttggtcttgatgacgtcgaatgccagcgcctcgtccgagggggctgtatagaggccgtcgggccaccagccctgatccagcgggccgaactggaataccggctcgttgttcagctccaggcggacgatgtcgtcggcatcgcggccgatcgagaatttacgcatggccgtgtaactttccacttcgtctattttcttgccgttgcgtaccaggcttaccttcatgtcgtagaggaacggtgactcggggctccagagtttgggctcggcgacggacagttccacggcggcgccgttgagcgagctgcccttggcgacctgcgtgtcgccgtcgaaaagcgccacttcgatgcggtcttcgggctgtgcgccgcaaacaggaacctcgatgcggaacgacttgcggtcgaggtcgggcgttgtcttcacctgcttgatatattgctggggcactgcttcgagccataccgtctgccagatgccgctcacgggggtgtaccagatgccctcggggcggttcacctgcttgccgcgcggctggtagccgtcgtcggtcggatcccatacgcgaacccggatgtcgttggcaccctttttcagggccgacgtgatgtcgaactcgaacggcgtatagccgcccgtgtggctgcctacgctgacgccgttcacccagacgtcggctttccagtctacggcgccgaagtgcagcagcacgcgcttgccgttccatttcgcgggtaccgtgaagctgtggttgtaccagagttcgttatccttacccaggcttttccctacgcccgagaggctcgactccacggcgaacggcacgaggatctgtccctggaatttgtcgggggtctgtcctatgggcaggatcgcatagtcccacaggccgttgaggttttgccagtcgccgcgtaccatctgaggacgcgggtattcgggcaatacgttctgcggatcgagcttttcgccccactgggtacggatacggtcgcccgcgggttgccattgcgctacgccggcaagggtcgtcaccagggcggcagcggtcaggagaatgtttttcttcatacttcgggttattattaggttaaaattgtatttcaaatccgtacaaaattaagccatcttatccggaaaacagtccgcatatatgcacaaaaagtatatttatgcttggaaatgcggtttgaactgcatttttacggacttttcatgcggggcacatttcttcgtcctcggggccccggctcccctatatcccgaggtgctcttcgagcgtatggcgcaggtggtcgctgtcgaggtgcgtatagatttcggtggtgaggatgctttcgtgtccgagcatctcctgtacctgccggatactggcgcccccttcgagcaggtgcgtggcgaacgagtgccggaacgtatgcgggctgatgtgtttgtcgatgccggcgcgttgggcggcctgtttcaggatcgtgaagaccatcacgcgcgtaagctgcccgccccggttgttgaggaatacgacctcttcgcccgaacgtgcgctgcggcgcttttcgagatagcgctgtatcttgtcgcgtgcgacggtgctgatcggcaccagccgctgcttgtcgcccttgccgatgacgcggatgtagccctccccgaaaaagaggtcggaaagccgtagcgaggtgagctccgagacgcgaagcccgcacgaatagagcacttcgagcatggcgctgtcgcgtatgcccttggtcgtgcgcgtgtccacggtggcgatgatgcggtcgatctctgcggtggtgaggacgtcgggcaggtgcctcccgaatttcggcgtgtcgacgaattcggcgggcgacgcctcgatctggtcgcttatgagcaggaaattgaagaagctgcggatgccgcacaggcagcgggcctgtgaggttttttcgcggccgcgctcgaaaagccagcccatgtagcgttcgatcatcgtccgctcgaccttgcggggcgtcacgtcgtattggcgcaggatgaaatgggcgaattggcgcaggtcgcgcatatacgattcgacggtattctccgagaggcgtttttcgagtttgatataagtacggtaacgacgtcccgtctcttcccactttttcgtgttttctgccatccttttcctgccttatttccgagattatcgttaactttgtacgggcgaagatacgtaaattttacataatatgaactatatatccttgaatattgccttttcggacgacctgcaggccgagatcctgaccgccgagctggccgactatcccttcgagagtttcgaggccgatgcggggacgctcaaggcctatatcccccaggagcggttggccgactgcaagggcgaggtcgatgccttgctggcgcattacggcgtgcagggacgctatatcgccatcgagacgcagaactggaacgccgtctgggagagcaatttcccgcctgtggacgtcgaagggcgcctgctgattcgggcaccgttccatgagcctgcccccgcaggggtgatggaggtggtcgtcatgcccaagatgtcgttcggcacggggcaccacgcgaccacctggctcgtgtcgcgtgccgtgctcgacctgggtgtcgcaggccgccgcgggctcgatatgggcagcggtacgggtgtgctgtcgatcgtcgccgccaaatgcggtgccgcccatgtcgatgcggtcgacatcgacgattgggccgacgccaactgccgcgagaacatcgcttcgaacggcgtcgccgatcgcatcgaaccgatgctgggcgacgtgcgccgcatcgccggacggcattacggctttattctggccaatatcaaccgcaatatcctcacggccgacatgccggcctatgccgcagcgctggagccgggcggcgacctggtgatgagcggtttcctggaacaggacgtcccggcgatagtcgcccgtgccggggaactgggcctgcgcccggtggcgaccgctgccagggaggggtggatgatggttcacgtgcgcaaagggtaggtgaagacgtacaaagggcgcggggtcgttctccattcgctcaaatacggcgactcgtcgatggtcgtctacctgctgaccgacaccggggggcgccgcagctacatggtgcagggcgtccgcagccgcaacgggcggggctcgaagctggcacttttccagccgatgttcccggtcgagttcgaagggctcgaatcgtcgcgtcagcagatgcaccgtttcaaggaggtgcagggcggcttcgtactgcaaagcctgccgttcgacgtgcgcaaatcgaccatggcgctcttcatggcagaggttttgtaccgcctcgtcagggaatacgacgaacccaaccaggcgcttttcgattttgtgtggaactgtgtcggggcgctcgattcgatggacgagggggtggccaattttcacctctggttcctggccaacctgagccgtttcctgggtttttgcccgggcaacgactactcggccggcgattggttcgatatccgagagggactttataccaaaactcggccgcagcacgttagttttatgacacaggaatgtacgcgtattctgcgcgatatgatggagtgcgacgtgcgttgcctggccgaaatcggcctcaaccgcacgcagcgcgtcgagtttctcaatgccgtgctggtctatttcggctatcacctcgatgccatcagcgcggtgcagtcggtgcggatcctgcgggaagtgttctaagggaattgtaattttggagagaccaaataaaagataggagggatagttatgaaaaggatgtttattctggcggccgccctgcttgcggcccttgcgatttcggcgcaggaacccaataagttcgggctgaaaaaacccgattcgccccgctcggggaagtatgagcttcccgattcgctccgtaacaagttcgagcttcccgactcgctggcgcatttgtcgccctggaaacccgattaccgtgccgagggaaagatgaaggtcaagccttcggttacgatgacttcggtggtagtgatccagaaggaaaacctgccgtcacgtgttacggtgatcgacaacaatacgttgcgtctgggacgccatttcaccatctcgaacggtcaggcctggaacaacggttccttccccgatgcgttcctcgatgcgcggacgatctcgatgcccctgccgcggtagggtgttgctgcccgttccggaggaatgccggttccgtccgcacttcgtttaggcgggcgcagtttcctgatggttccgtgaactggaagtccctcgggacggcaatacgaggcgtattgcaggcacctatccgaacaggagtgtgaaggttacccggttgtccgtgttggccgtcaggcgcagcgaacccttgtgcagttgcatgatgcggcgcgagacgctcaggccgatgcctgatccgtcgggcttggtcgtgaagaaaggcgtgaagatattttcggttacttcggcggggattgccccgccgttgttgcttatttcgatgactacgttttcctgcgggtctatgcgcgacgtgatttcgatgcaggcgtcccgccgcgtccctaccgcttcgcgggcattcttgagcaggttcaccaccacttgtccgaccaacatctggtcagcatagatcatcgtgtttgccggttcgacgtcgagccggatgcggatgccctccgcggcgatcagcgtcatggcgtgctccagcagtccccgcacctcgaagggtgccttctgtggcaccggaatcttcgtgaaccggcggaaattatcgacgaaggccatcagccgccggctcgtggccgagatcgtatccagcccatgcgccacgtcggcattcatcgtccggtcgatatgcagcagcgtgtcgctcagggaggtgatcggtgcgagcgagttcatgatctcatgcgtcaggatgcgcgtcagcttgttccacgattcgatctgcatctcgctcagttcgctgttgatgtcgcttatgaccaccacgcgcagccggcgtttttcgagtacgatctccgaacaccccagcgagaggctcatttcgcccgtttcggtcacgcacgacacatggtgcttttctcccgggcggatcttcgtcagtacccggtatgcctcgggagcgggcagttccagttgttggatgtgggtcaagcgcggcagcccgaagatgcgcagcgcttctccgttggcctggtagacgctccccgcgtcgttgatggtgataagccccgtgcgtgcatactccatgatcagctggtagtagcgctcccgctcttcggtgcgtactttggcgcgcaccaggatctccttgatacggttcagggcggcgttgagcatcctgttgtccactttcgacgggtcttcatggaagcggaacgtgaaatcgtcgttgtcgatggcgttgaacatgaaggttacacggcgtatcgaatcgctgtagagccttagaagacggtatgccgcgatcccgatcaccgggacgagcaggatcgccagcgggtaccatgcccccgttaccacccatccgagtgctcccgaagcggtgatgagcaacactgtgtacccgattacggggccgtaggctattccttcgcgtttcataacccgtagcgtttgatcttgttgtagagtgtctggcgcgtgatgcccagctgccgcgccacctcggtcaggttgcctgcgtaacgcgctatcgcctgcccgatcatgccgcgctccatctcttcgagcgtcgagaatgccggggcctgcactacttccggagccggccgcagcagcagtgttgcgggggtaatccgccttccgtcgctcatgatgacggctttttcgacggtatgctgcaattcgcggatgttacccgcccaagggtattcgtccatttcgcgtaccgccgcctggtcgaaaccctcgatcggtttgttgtacttcgtggcgtagcgtttgaggaacatttccgccagcggcaggatgtcttcgcggcgctgccgcaggggcggcaggtctatatggatcgtgttgatgcggtagagcagatcttcgcgaaactcccccccccgcgctaccattccgaacaggtcgcggttcgtggcgcagatgaggcggatgtccaccgccacgggcgtgttgctgcccacgcggaagatacgcccgccctggatggccgtcagcagtttcgattgcaggtggggcggcaggttgccgatctcgtcgaggaaaagcgtgccgtggtcggcgacctcgaatttcccggcgcggtcggcccgggcgtcggtgaaggctcccctgacatggccgaacagttcgctctcgaagagcgtttcaggtacggctcccatatccaccgaaaccatcagttcgccgctgcgcgccgagcggttgtgtatctcgcgtgccagcatctccttgccggtgccgttctcccccgtgatcaggatgttggcgtccgtggccgcaaccttttccacgatctcgcggatgcgcgccatggcggggctttcgccccagaacatcggctgctccgaggccagctcgcgcttgatctccttgagctgcttcacctcgcgggccgaccgcgccaggttgtaggcgttgcgcagcgaagccaccaaccggtcgttgtcccacggtttgacgacgaagtccaccgcaccgtcgcgcattgccctcacggccaggtcgatatcggcgtatgccgtgaagagcacgactttgatatccggcctgcgggcgtggatctcgctcagccagtagatgccttcgttgccggtgttgatgcccgccgtgaaattcatgtcgagcaggatcacgtcgatctgttcctcgcgcagggtcgtcgccagccggttgggggtggggagggtcagcacccgtgcgaaatatttttccagcagcaggcgcaacgccgccaggatgctgcggttgtcgtctacgatcagtaacgttccctcttttgccatggtcattccggattgttttgcggtaaaattagcgttaaaatcgtgaaatcgtcccttcgtgtccacaaaatttacaagggtgtaaaatttttttacactttgtctgttgtgcgtatgatgtattaatttgtaatacagttatttagtttctttggcacggggttggctccgaaatgtcccgaacgaacaatacccgcaaatcaaggatgaaacgactgttattactccttattctgtcaattttttggacactcgctgcggcgcagatatccctgcccgccgcctctgtgcagccggatgctgcgcccgttgctcccgtgggggcttcggccgcagatattgcggcaacggaaactgtcatcgtcgcggatcccgccgtggactccctgtccggccccgccccgaatgcggccgagcccgtcgtgcgtatgaccctcgacgagtgcatggcctatgccgtcgaacacagtcccgtcgtgcggcagcaggattacaccaaccgcaactatcgccaggactatatcgaatccgtggcggcgctcgtaccctcggtcagcggatcggtcagcgccacgaccagtttcggccgttcggtcgaccccgagaccaatacctataccgacgtttcgaacctttccaacaactacggcgtttcggggcaaatgcctgttttcgcaggttttacggggatcaataccatccgtgccgcgaaggtgatgcgcctgatgggcgttgaggagttgcagcgggtcaaggacgaggtggcgctcaataccatgcaggcctatttcgacgtcgtctattacaccgaaagcgtgcgccttgcccgtgaacagctggaaaccagcaccggcaacctcgccaagagccgcaagctgctcgaactggggctcaagagcgctgctgacgtggccgagcaggaggcgcagtgcgcttcggacgactacctgctcacgcagcaggaaaacaacctcgaactggccaggatcacgcttgccgaaacgatgaattatccgcccgaccgtcccctggggatcgagacggctctcgccatcgagaccccggtcggcacggcgcccttctccgatgtggtcgcctatgccctcgacaacaatcccaaagcccgcagcgccggttataacgtgcggcagtcgaagctccagtattcggtcgcccggggcggctttttcccgtcggtctatgtcggcggcggatactcgaccaatttcttcatgagcctcgacgaccattcgttgtacgagccgtttaagaaccagttccgtgataaccgcggttactatttttccgcccagctcaacatccccattttcggggggctttcgcgccgcacgaggacgaaccgcgcccgcaacaactggcggatcgccgagcagcagcgcgatcagacgttgcgtgccctgcaaagcgaaatcgcccagaactaccagcagatgctcggctacggcaaggagttcgtgcaggccagcaaaaaaagcgcggcctccgagctggcctacaacgccgtcgccggcaagtacgaccggggtatggtttcggcactcgaccttcagaccgccgccaacaacctgttgcaggcccgctccgaacggttgcgcgcacggttgcaatacattatcaaaacgcgcctggtcgagtattacaacggtgcgcccctgatccgctaacgaaaaacagaaaataacatggacatccgtatcgaaaagaaaaagggcatccgcgccctgtttaccaaaaaaggcatcccctatctggccggggcgctgttcctcgtcttcgtgttgtggctcctgttgcgcgacaactcctcgacgttgcgcgtcgatgcccgtacgatttccgtcgggcaggtcgtgagcggtgaattcaacgactatatccgcgtcaccgggcaggtacagcccatcaccaccgtgcagctcagtcccctcgaagcgggcatcgtcgagcggctggtcgtcgaggagggtacctccgtcaaaaagggcgacgtgctggtcgtgctgagcaacacgtcgctcacactcgaaatcctgaacagcgaggctgagctggccgaaaagcagaacatcctgcgcaatacgctgatctcgatggagcaggagaaactctcgctgcggcaggacaaggcgcagctggatctcgacgtgtcgcgcaagaagcgggcctggcagcagaacgaggagctttacaggaacgccctgatcgcccgcgaggagtggttgcagtcgaaggaggactacgaactggccgaaaagaaacgcgagctgaacatcgagcggcaggtgcaggattcgctctaccgttcggtgcaggtcgagcagatggaggagaacctcgacaacatgaagcgcaacatgcagctcatccgcgagcgcatcggcaacctgaacgtcaagtcgccgatcgacggcgaagtcggcctgctggacatcgtgctcgggcagtcggtctccacggggcagaagatcgggcagatcaacgacctgtcggactacaaggtcgaggcacagatcgacgagagctacatcgaccgtgtgcgtgccggtctcgaagccaccttcgaccgtcagggcaccgactacaaggtgcgcctgcgcaaagtctatcccgaggtgcgcagcggccagttccgagccgacttcaccttcctgggcgaccatcccgagaacatacgcagcggccagacctactacctgcacctcgaactggggcagcctaccgaggcggtcatcatcccccgcgggtcgttctaccagactacgggcggcgcatggatctatgtccttgcacccgagggcgacaaggcttacaaacgccccatccgcatcggccgccagaacccgcagtattacgaggtgctcgacgggctggagccgggcgagcgggtcatcgtttcgggctatgagaattacggttcgaacgacgtgctgatcctcaataaataattttccgctgaaatttctccgcacccgtcaaaaccgaataatatgttccgtcaactcaatttccgctcgtttttcaacttcctggggcgcaacaagctctatgcggccatcaatatcttcgggttgtccgtctcgctaatgttcgtgatcctgatcgccgactacactcttcggcaacttacgtgcgacgactaccacgccaaggccgaccacatttatgtcatcggcaacgaggagcgcattacgaacggttattacctgcagaaatacctgcgcgaccgttatcccgagatcgaatcgacctgtgccgtcgcagtgtcgggacagtccaccgatgccatgcagcccgtcgaggccggacaggggaaatattcggcgacgatcctcttcgccgatacgacttttttccggatattcgatttcgaactgctggagggcgaccgggagcaagccctcgcctcgcgcgacaacgtggtgctttccgagtcgttcgcccgcaaggttttcggcacgttcaacccgatggggcaggtgatccgcttccccgacgaggagaagtcgtacgttgtgagcggcgtggtgcgggatatcgaccgctcggtgattcccaatatggacatcatcatgcgggccgagcgcctctgcgatatcaattcggccaatgacgggcatatgagtaattccggtgccgtgacgactttcatcctggcgcgtcccggtgccgacctgacggccaagatacccgatatgcttgattatttcaaagagatatattggatttacaagggcaatgtctatcagcatgtgacccttacgcctttgcgcgatgtctattttttatcccagaataatgatggggggttcaactacggcagttggcccttcgtgatgatccttttcggtgtgggcaccgtcatcctgctcttcgccgtgatgaattatatcaacctgacggttgcccagaccgggttccgcgccaaggagatggccgcccgccggctgctgggcgcctcgcgcggcgaaatcatcctcaaactgatcctcgaatcgacattcctgtgtgtcgtggcgttcgtcatcgcgcttttcctggcagccgcggtggagcccggcgcttcgcggctgctggggtcgaaaatcggcgtctggcaggatatgacgcctgccgtcgtggcttgctatgccgcgtttatcgtggtgctgggcgtcgttgcgggctttatcccggcgatgatggtgtcgcgctacaaacccgtggacatcgtccggggatcgttccgccaccgcaccaagatgttttacagcaaggtgcttatcacgatccagaacgtcatcaccattgtcctgatcgccacctcgttgaccatcggcctgcagatccgccacctgatttcggcgccgatggggtacaatacggccgacatactcgatatctcgaccgaaattttcctcgggaaaaaacagattgcgcagttccgcgaagagttgctgcgcgaaccttgcgtcgaggccgtcgccctgggttgcggcacgccccacgaccggggcaacaacaatacgatgcagtatggccccgaccggatgatcgggttccagatattcatcggcgattcgacctatttccggatactggggctggaacggctgcgcgacaaccacctcgcccgtatgaacgacgacaatatggtcttcatcaaccagcacgccctgcgggaactgggtattgcggaggacgccaaagaattcaaggtaggcatggattactcttatccctaccaaatcgcaggtatctaccgcgatttccagatcgggtcggcgctcgacaagccccaatcggcgatgctgtggcagacggacgacattgcggatatgtacccgtggaatatcctggtcaaaatccgcggggacaaaaccgcggcctacaatacggtcaaatcggtcttcgaacgtatttccgacggtgcggtctttaccggggcggagtatatcgagcaggaaatcgaagccgactatgccgatcagcggcgcatcctgcacatcgtcggtatcttcacgctcgtggcgatcctgatctcggcgctcggtctggtggccatgtcgacttactacatccagcagaaggagcaggaggtcgccgtccgcaaggtcttcggctcgacgcgcggtgaggtgctcacgcgcctggtgggcaacttcatgcggctggtcggcgcggcgttcgtcatcgccgtgcccgtggcgtggtacctgctcgaacgctggctgcaggattacagcgtccggatttcgctctctcccctcattttcctggcctcgggggcttttgccgccgtggtggcattcgttgccgtcttctggcagagcagccgtgcggccgattccaacccgatcgactcgattaaaaactaaagacagacccgaatgaagaatttcctattcgcattacgttacctgcgtaaactgcgcggcggcacccttgcccgcgtggtgtcgctttcgctggggctggccgtcggtctgctggtcttttcgtatgccaattacaacctcacctccgaccgttgtttccccgaccgggagcggatattccaactgtgggctcattatgccgatccgcagcacagcgggtacagtccgcagctcaatgcccccatcgccccggcgctggccgaagaggttccgcaggtcgaagccgccacacgcctgttcgggccgcgcacatccgacatcgtgcgcggtgataatgcttttcaggcaaagtatatatacgccgatacgatgtttttcgacgtgctgggattcgaaccgatgaacggcaaccccaaagagatcctgctccatgccgaccaggtgatgcttgcggagtctttttcccgcacgatcttcggtcgtaaggatcccgtggggcagttggtattactgaacggcaccgattcgctgacggtcatggggcttttccgcgacccgaatcccaaccagcacctcggcggtttcaatatgctctgttcgttcgaaatggtgaagcgcgacctcaatacgtcgtggcagggcggcgattcgttcccgagttatgtcaaactccacgaaggggcgtccgtcgccgaggtcgaagcgcagcttcccgcatttttcgaccgccacggattcaccgaggatatgaaagcctggaaccgcagctaccggtttttcccgatcacggagtcatcgcgcataaatacttccgcggggctgatcgcatgggtgttgatggcgctggcggccctcacgcttttcgttgcggcgatgaactatgtgctgatttcgatttcgacgctggtcagccgctcgaagaccatcgccatgctcaaggtcgggggtgcccgccgttcggacatcttccgcattttctgttccgagaccgccgtattgaccttcgcttcggtcatcgtggccggattcctgttgtgggccctgcaggagcaggtgctggagattaccgggacgccgatgtccgaactcttcgccttgaagcgcatttgggtgccgtcgctcgtcatcctcgccgcgttcgcccttgccgcacttatcccgtcgcgtatttttacttcgattcccgtgacattggcgttccgtggggtcagcgacaaccgccgccggtggaaacagacgctgctggtggtcgagatcgtcagctgtacgttcacgcttacgctcctgttattggccgtgttgcagttcgataaactccgcaacggcgatttcgggttcgaacacgacagtatcgtatatacctacgtcaaaacgcctttgggcaacatctcttcggtctgcgacgccgttgcttcgctacccgaagtcgacgctgccggagcttcgctcgaggtgccgctttggggatattcgggaatgccctgcatcgacgaaaactccaaggaattgcttttctcctgccgctggctgctttgcaacgagggctttatacctgcgatgcggatgcaccttgtcggcggccggaactttatgccttcgagcaaccccctggaggcgatcgtaaacgaaacctacgtccgtatgcgcggatggacgcccgaacaggcattggggcatcagattaccgacgactcctcgcccggggctcctctttatacgatcgtgggcgtcgtaaaggatttccggacggtcgtggctacgggagaggtcgaaccgatcgtgttccatccgttcagctatttccagaagttcggtgccacggacgattatatgctggactattccatgatgatccgcctgcgcgggatgtcgcccgagtcgctggaggccgtgcagcgcaagatcggagaatacccttcgggcaacaatcatgctctcgaagtttacgacaacaaactgggccccatccttttcgagatacgcagtttccgcaatatcgtctttaccgtgagcggcatcaccctgcttatcgccctgatggggcttgtgggttacctgggcgacgagatgcgccgccgcagcaaggagatcgccctgcgcaaggtcaacggggcttcgacggccgacgtgctgcgcctgttggcgcgcgacgtgctgtggatcgccgttccgtccgtggtcgtcggggccgccgtaagccgctggggtgcagacctgctggtcagcaacttcgtcgagcgtgtggcgctccgctggtggctcttcgccctgtgcggggcagtggtgctgctgatcgtatgtgccgtgcagctcgtccgcacgtggcgcatcgccaatgccaacccgattaacatgattaaaaccgaatagtgtgttatgaagatcgcatttcgtaattttctgactacgctgcggcgctacaaaatctcgtcgctgctgaacgtcataggcctgacgctggcatttaccgcgttctacgtcatcatgacgcaggtctggtgggagctgggttacaaccgctcgctgcacgaagccgaccgtatttatctcgtggagaacgaggactggtacgagcccgggaaatggtcgtcgtggcttaaccggccggtgcccgagcgtgtcatcgcttcgacggcgggggtcgaagtcgggggctgcatgtggggcggtttcggctccggaacctgttggacgagcaacgagccttcgttcgggtataataagttttctgcttcctgcggttcggtatcgctgcctttcctcgatgttttcgctttccgttcggtcgagggcgatgtgcatgacctcggaaaaccgaagagcgtcatcgtttcccgcgaggcggccgaacggatgcgggtcggcgtgggcagcctcatatgggtcgacaccgacgaaccccagcccgacggggcgatggaagtcgtggcggttttcgaagactttccggacaattcgttgctgggagagtgcgaggtggtgaaaaatctgggcgaaacgaacctttataccacttcggagtggagtttcaattatttcgtcaaattcaggcccggtgccgatcccgacgagtttgcgcgccagtggacgaacgtgaaccaggagatgcagcgcgaggcggccgagaaacgtgtggcggccggggacgccgcagatgacgacgacgaatcgggtatctacggcgtgcgcctttctccggtatcggaactctatttcgagtcggattcacaggcgccctgccggcaggggtctgtcgtcacgacctataccctgctgggtattgccgtgttggttatcgtgctggctttcatcaacttcgtcaacttcttcttcgcactggtgccggtgcgcatccgtaccgtcaatacgttcaaggtcttcggcgctcccgcctcgtcgctgcgcttcaatttcgtgttcgaggcgttcgggctcgtcctgatcgctttgttggcggcctggtacgtttcctttgccttgcagggcaccgaattcgccagctacatttccgcatcgctggcgctgtcgcagaatttggaagtcgtggggctggtagccgttgtagctttcgtcatggcgctcgcagccagcctctacccggcgtggtatatcacgtcgttcgccccggcgctggtcgtcaagggatccttcggcggaacccgcagcggccgccggctgcgtacgctgctgctgggcgtgcagttcttcatctccatcgggctgatcatcgcgaccagtttcattcgcctgcaacacgactacatgatgcactatgacatgggtttcgacaaggaaaacctcctcgccgtgcggctttccgaacgtggggcggcaagttatgacgcccttcggcagaaacttctatccgaccctcaggtaaaggatgttacgggagctacgagccgtttggtgtcggtcgggcgtatgggctggggccgggagttcaagggccgtcaggtcgctttccagagttatgtcgtacaacctgatttcttgcgcgttatgggtatcccgattaccgacggacgcgatttcctggagagcgacttcgacaaggaactcggaacgatgattttcaacgaagcggcgcggcgggaatttgaaatgcaggtcggcgaccgtatcaacggtttcgtgtcgcccgacgagcaaattgtaggtttctgtgccgatttcaacttcaagcccctgcaatacggtgtatcgcccttctgtttctatcttcttccgaagaaaatccagcaggaaaattactggcacctgcctcatgtggtctatgtgcgtatgacgcccggagccgatattgcggctgttaccgcccatatccgccgctgtatcgcggaggtcgatccccgcacggagccgggcgatatcgttgtccgtgttttcgacgaggagctgggcctcgagtacgacaacgaacgcaaactgacggccatcgtcgggctgttcgcgctgttggccgtcgtgatcgccctgatgggcgtcttcgggctggtgctgttcgagacgcagcaccgccgccgcgaaatcgccgtgcgccgggtaatgggggcttcgcggggcgaaatcctcgccatgttcaaccgccgctacgtcatgctggtcgccgtgtgtttcgtgctggccgtcccggtaagcatctgggccgtcaggcactggctcgcaggcttcgcctatgccgtgccgctgtattggtgggtctttgccctggcactggcgggggtgctggccgtcacggcactcaccgtcaccgtccgctcgtggcgtgccgttaacgaaaacccggccgaatccgtgaaatccgaataaatcaaatcaatatcaacaataaaaacatgtttgttatgtcaatgctgaaagttgagaacctcaagaaggttttccgtaccgaagagatcgagaccatcgcactgaacggcgtgacgttcgaagtgaaggagggtgaattcgtcgccatcatgggtccctcgggctgcggcaagtccacgctgctcaatatcctggggcttctggacaatcccacctcgggcagctatacgctgctcgaccacgaggtcgccgggttccgggagaaagaccgcacgaaattccgcaaggggaatatcgggtttgtcttccagtcgttcaacctgatcgacgaactgaatgtcttcgagaacgtcgagttgccgttgatctacatgcgcgtcaaggcgtccgagcgcaagcgtcgtgtcaacgagatcctgagccgcatgaatatttcgcaccgcgccgaacacttcccccagcaactctcgggcggacagcagcaacgtgtggccatcgcccgtgccgtggtgtcgaaccccaagctgatcctggccgacgagcccacgggtaacctcgactcgaagaacggccgcgaggtgatggaactgctttcggagctgaaccgcgaaggtacgaccgtcatcatggtgacccactcgcagcacgattcgacttacgcgcaccgggtgctgcacctgttcgacggcgagctggtcaaggatctcgccaacaaactgtgattcctgtccatggccgataaaaagttcattccataagcggggaggccggagtattccggcctcttttgtgtcgttcctgtccgtgtcctgtgcggtgtttgttctgtttcccgggagcagacggccggcggcggtctttcccggatgccgtccggagccgttccgggtcattttaggtattttcgcgtattgatccattgcgccggaattacgacttttgtgaacccaaacgatcttgtttatgagaatgattttgcctgtattgctgctgctcggtgtgattgtacccgtccgcgcgcagcaacccgacacgaccactgcgacatcttcggttgaggagctttcggcggaaatcgcggcgctcaaagccaaaacgtctacatgggacaaagtgctggccgccctgccggaaatttcgggatatgtccagaccggttacgaatggagcgaccgttcgtcgaccttttttatcaaacgtgtacgtctgaacctggcgggcgccatcgctccgaaactggattaccgtgtccagatcgaattcgcttcgccgaaaatcgtcgacgcctacctgtgttacaaaccgttcgatgagctcaacgtccagctgggcgaatacaagctgcctttttcgatcgagaataccgactatgtgccgctcagatatgagttcgtcgaataccccctttcgttgtgcaaactgatggggttcagcgacctctgcggactttcggccacaggccgcgacctcggcgcgcagctgttcggaggatttttcaagcgcgacggatacagtatcctgaactacaacttcggcgttttcaatggcgaggggctgaacgtcaaggacaagaacaaaagcaaggacatcgtggcacgccttacggtcaagcccgtcgccggattgcagttcgcgggatcgtactactggggcgagtacggcgaggattacctgaagcgcatccgttacggtgccggtgcctgctacgattacgggcgcctcgtcctgcgcggcgaatacatctgcggcacgacgggcggcctcgacagcgagggatggtatgccgtagcgggctggcgcgtgacccggacattgttgccggcggtgcggtacgatacctttctcgaagacagctcccgcggttcgagccgccagaccaattatacggccgggcttacgtggcaacctgtgaaatacctgcgctgccagctggattacacctacgaagatttcgccgcgcgggatgtcgccggtcgcaatgtggtggcactgatgctctccggcatattttaacctgaaaaaatgataaagatgaaaaagtggatggaacaattccgggtcgaggactgggtggtggtctgggtgagcattcccctgctggcgctggccgcggtcgcaccttccgcgctgcccaaagtccccgcgacgctgctgggcggcgctgcgtggagcaatatcgcctgtctcttcgccatcgtgctggtggtgctctatgccgggtgcctgatgctgcggcgaccgctcagggggctgcttgcgtcgctcgtggtcgtcttcgccgtctcgttgctggcgcagatcgtcgccaagatcccctccgtgtcgtattacggcttcgaatcggtattcttctcggtgctcttcgggttgctgatccgcaacgtgtggcgtgttcccgcgtggctgaaacccgcgatccagggtgaattctacatcaagatcggcgttgtgtgcctcggtgccacgattctcttcagcgacgtgatgaaatcgggtgtcttcggtctggtgcaggcgtgcctggtggtcgccgtcgtgtggttctttgccttccggatttcgcgccgcatgaaggtcgacgaacgctcggcgatgatcctttcgagcggcgtgtcgatctgcggcgtgtcggcctgtatcacggcggcccgcgtggcgggcggcgacgaccggaaactttcgtacatcgtttcgctggtgctgatcgtcgtcgtgccgatgatctatctgatgccgtggttggcgcatgcgatcctgccgcatattttcgacgatccgcatgtcgtgcaggaggtcgccggggcgtggatcggcggtacgatcgacactacgtcgggtgtcgccgcgtcgagcatgatcgtgggcgaagtggccaaccagcatgccgtcatcatcaaggctgcgcagaacgtattgatcggtgtggtggcgttcttcatcgcgctttacctctcgacgcgccgcggcgataagaccgggcaggccccgtcgctggggatcgtgtgggagaaattccccaaattcatcatcggattcgttgccgcatcgctggttttcagccttttgcaggggaacggcctcttcacggccgatgccaagggtaaacttgccgagccgggtgtcgccaaaatgttctcgacggtattcttctcgctggccttcgtctgcgtggggctcgatacgcgcctcaaggatatcgtttcccgggagaaccgcaatctgctgtgggcgttcctcgccgcccaggctttcaatatcgtcgttacgctcctcatcgcgctcgtgctgttcggcgtactgaaaccgatgctgggataatccccggcagatgcctttccatagcccccgaaaccgaaaggttcgggggttttcatatttccggccgggctgtaatactcgtccgctgcccgccgcccgccaatcctgcccgttcatccgtccattcgcccgtccgccctttccgtgcgtttgccgccctgtcctgccggctccgcttgtctgctgcctgctctgtcttgcagtctgcccgtctgtctgatcccgtctgcctgtgccttgtgctgcaagggtctttcttgtccggaataccctgcacgcaatgccgttatggccgaataacatatttttcagcctttttaaattgtccgatggttagttttgctgccatgatcccgccgggacatgcatccgtgcacctccggcggcgtggaaaattccaattctaaccataaacaactaaaatgtatggcaacagtaaaagtcaagctcagggaatcgacggtcggtgggaaagcgggagtaatatattaccagctttgccatcggcgcaaatcacagcaggtaactacctccatgcgtctccagccccggcaatgggatgcaaggcgcgggtgtgtcatcacgcccctatcgggggaagcccatgcgttgctgtccgtgcagcagcggatcgaccgtgatctgtgtctgttgcatacgatcatccgggatctcgaattccggcaggagggctactcgctcagggatgttgtcgaccggttccgcaactcccggcggagcactgtgctcgcctatgtcgaaacgcaggccgcaaggctcgaggcgaacgggaagttggggacggcgcgcaactaccggcggacactcgggagtttctccgatttcctgggcggacgggatattcccttttcgctcgtcgatgaacggcttgtggggcagtatgacgactggctccggcgccggggcattgtccgcaataccgtctcgttttatatgcggatattgcgcgcggtctataataaagccgtgaaggaggatatcgtaccacaggccgatcctttccggtatgtgtataccggtgtcgaccagacctgcaaacgtgccgtcggcgaggatgtcgtcgtgcggctccggcggctggatctgacgcactccccgtccctggccttggcccgggatatttttattttcagttattgtacgcgcgggatggcgttcgtggacattgccttcctgaggaatcaggatatcgtcggggatacgatccgttatgtccgccgcaagaccgggcagcgcctcgttatccgtatcgagccctgcatcgcgaagcttatcgggcgctatgccggtgcagggcgcatatccggctatgtttttccgctgctcagttcggacgatccggtcagggcgttttcccaataccgtacggccctcgattattataatcgtcggttgaaaaagctgtccggtttgctggggctcgaagtcccgctctcctcctatgcggcgcggcatacgtgggcgaccgcagcccggaaccataacattccgttgtcggtcatcagtgcgggaatgggacatgcttcggaaaaaaccacgcagatttacctggcctcgctcgaaaactccgttatcgaccaggcgaaccggagcctgatagcatccttatacgtgtaaggtctctatgtaagagatagttacatcttagttgccgtctgataatcaattggatgacatataatgaagggtgttttttctaacactgcttaactattgcctgcaaatagcccgaatcggattaaaagagcacagaattcatccacttagtgagcaattcttgcaaacaatcaggataaaaacaataagtttttgatattcaaatttttttttacagaaacaagcggcgttgtaaacaaaaatatggtttaaaaaatttgggtatatactttatttttagtacttttgcgaaagttataaaggtctcttacatagagaccgcactttaaaatacgaaagtgttcttatgggaggcgcgcaattgattgaaaatcttggttttgcaaggttttcgatgtccccatggaacgctttttttctcaactatacgcccttttcgggtgccgaataccgacttaacggatcacaataatggactgtcaggacacagatgccaaatggtatgtgcttcgggttacctatcagcgcgaactctctaccaaggagtatctcgacaaactgcatgtcgagaatttcgtgccggtaagggtcgtacgccgccgggattccaagggccggttttcccgggtacgggaagccgcagtgcacaactatatcttcgtccgttccacgcgggaggttatcgacgacctgaagacattcaggctgccgattctgcgctatgtgatgcatctgcaaaacggcgagaaccagattatgaccgtgcccgagtcccagatgcgcaattttattgccgtggccgccaatatcgacgaaccggtgattttcctttcgcccgaagaggtcgcattgtcgaaaggcgacaaggtgaggattaaggacggcgtattcatgggtgtcgaaggcacgttcatgcgggtgaaaaacacccgggacagacgtgtcgtcgtcaagatcgacggcatcacggcggtcgctaccgcttccattccgtccgcgttggtcgaaaaaatatgatccttggcactataagcctgcaaaaagaactgttccggttccgataaattactgacatgacaccgaattacctgaaaaaaatgctgccattgctgctggatgccgatctcgcccaagcgacgaacgtgcgtctgctggcgttggcaagggcttttgccgcgggctatgaattggtgtcgtccgtggcgcctgccggggaattcggtacggaggaaactttccgcaataggatcgacagcttgttctgggcgctgtctgaacgctatgaacacgagcttgatacagcgatccgtagccggatggtacatgccatgtattcgcttgcctgcgaaacggtatttcccgccgatctgcggaagaaaaactgttgttatcgggctgcggacgcacttgtccgggattttatgggcggtgtcggtgcccggccgggaaacagcctgtttcagcagacgggcgtctgcatgtgcgcggccgacctgctctatcccgctccggctgccgatgacgaatacctgctgttcctggaacggcagttggccggatggacatccgccctggatgctgacggctgctggccgggggtgtcgtcccgggtcgcgttggaacgcattggggtgatgaaccgggttgcctgtatgtttcccgacttgtggaatgataccgcgataaggcgggcggcggggtattaccgcaggtgcgtacccgtccctgccgaccctctgaatttcgacgaggggtacctctatacgctgggacggatgtacgaggtcgcattgcagggcaataccctgcctgtcgataaaaccgcagcgcggcggatcgcccggttcatgtacgattacagcctgacgctgcccgtgcgcggcgacgcatggtattattgcacttcttatgtcatacattatattgccgaaagtgtcggggcgcgactggaggctgaaatggaacggcatatcgcataaatgataaagcctgttgaattttccatttgattgctgtcgatgtaaaacctcttccttttccggataataaaatgaatcagtatgacaacgcctctttgctacacagtcatcattcctttctttatagcccttttcttagtcggctggatccaccctaaactggtgaagatcgccctgttgaaaaacatcgtggataatccggatgcccgtaaactccagcgtacgcctgtcccggttttgggcggcgtcgccgttttcttcggggtcgtgatcgcgatcgggtgcatgagcgctgtcgtggactgctccggactgcctgtcgtaatcatggccatgatggcgatgctctataccggcacgatggacgacatcctgaacctctctccttccctgcggcttttgatcgagatcgtcgtcgtgctgttgctggtctttgtcggcggctattgcataaacgacttccacggtttgtggggcatcgggccgatctcttcctggtatgccgtgccgctgactgtttttgccaccgttggcattatcaacgccatcaacctgatggacggcgtaaatggtctttcttcgggctattgtatcatggcctgcaccatcttcggcatacttttccatctcgccggcgaagaggcaatgacgatcctggcggtagtttcggtcggggccctgattcccttcttcctgcacaatgttttcggtaaaacctcgaagatgttcatcggcgacggcgggacgttggtcatgggcactgtcatgtccgtcttcgtgatcgctatcctgcaatccggctcgcgggtcgcagccgttgtcgacccgaatgtagggcttgtaccgttcacgctggcggtgttgtcggttcccgtgttcgatacgctgcgcgtgatgtcgacgcgtatgctgaagggctcgtcgccattccgtcccgataagacgcacttgcaccatatgttcatcgagatgggttgttcccatgtcgcgacgacattggctatcttgggattgaatacggcggtcgtattatgctggtgggcgttcgaagcagccggtttttccatctccgtccaactgtatgcggtcgtcggcatgggtcttctggccacgttcgggttgtatcatttcatgcagtggcatatccgccgcgacacgaaattcatgggcgttattcgccggctgggttacaagactcatatcagccgcaccggaatcttcttctggttgcagcaggttatggataaagtatgagatagtaaatacaaaatatttatgaatatagcaattgttggaacggggtatgtcggattggtttccggaacttgttttgccgagatgggtattgatgttacatgtgttgatattgaccaggttaagataaacagattactagagggagagattccgatttatgaaccaggattggaagatttagtcacacgtaatgtggtcgctcgccgattgcattttacaacagatttaacatcgtgtcttgatgatgtagaggtcgttttttcagctgtgggaacacctccagatgaggatggggcggccgatttaaaatatgttttggatgttgcaaggacttttggacagcatattaaaaaatatacaatccttgtgacaaaatcgacagtgccggttgggacggcaagaaaggttaaagcggtgattcaggaagagttggataaacgaggggcaaaaattgattttgaagtagcctcgaatcctgaatttctgaaagaaggggcggctattaaagattttatgtctccggatcgggttgttgttggggtagagagtgaacgcgccaaaaagataatgagcaaactttatcgtccgtttttgacgaataatttcagggtgctttttatggatattccttcggccgaaatgaccaaatatgcagcaaacgcaatgctggccactcgtatttccttcatgaatgatattgctaatctttgcgatttggtcggtgcgaatgtcgatctggttcgtaagggtattggtgccgatggtcgcattggaaataaattcctttattcaggatgtggttatgggggatcttgtttcccaaaggatgtaaaagcattggtacatacagcgcaagaatatggctatacaatgggcgtaattgaggctgttgaagctgtaaacgagcgtcaaaaagagattgtggttctaaaactgcaacaacaactcggatctcttaaaggaaaaactattgcattatgggggttgtcgtttaagcctgaaacggatgatatgcgtgaggcaccggcattggtcgttataaacaaattgattgctgaaaaagctattgttaaggtatatgatccggttgcaatggatgagtgcaaacgtcgaatcggagataaggtaatttattgtaaagatatgtatgaaactgtgatcgatgctgatgcattagcacttttaaccgaatggaaagtttttcggatgccgtcatggtcggttttgaagaaggtgatgaaatcaccagttttggttgatggtcgaaatatctatgataaagaagagcttttatcagaaggattcagatattcagcaataggaaaatagaatcatccatgcggaatacttatatagattttttaagatttattgggctgacattgattattcttgcacatgtgaaagcccctgtgtggattaccgagttaagatgctttgatgttcctctaatggtttttgtatcaggcatatcgttcaaattttctgggggggggtattttatgcacagaataaaacgtatatgtatacctgtctattctttcctcattttcctgttttttctggtgtttctatcaaaatggatatatggatataacttttattctggcaaacaaatgcttggttccttgctattgttgaataatccaagtattggctatgtatggatttttcgaatatttcttttaatggcatttgtagctccatttatttattggatatcaatacgaatgtcgaaaaaacaaagttggggttttattgttgccatttttgtgttacaagcaatcctagttaagtgtcaaatacagaatcaatcaattaatttcttatacagggagtattttttatatctgcttggatatggagttttcttatttttagggatgcgtttaagagtagctgatgaagatgagcgaaagcggcttctgcatgtctcttgtgtcgcatgtttggcatcggttatttatagttgtctgacaaataatctgttgtctgattataaatatcctcctcattctatatttgcaatttatggagcttctgcttccgtaattctatatctggctaaggataaattgtcccgatttgtcgaacggcaaaaggcagcaatttcatttataggtgctaattcaatgtggatttatttatggcatatcccgcttgtttttataatgaataacctgttgcaaacgaattccttttggatcctcaggtggattagtgtctatgtaatggcaataggtatttactggatccaaatgcaaataatccggtttttattgcaaaaatgtccgcagttgaattttaagtattggatataatggcttttctatgtcgattgaatctgtcaaagcaaaataaacaggttgtcgaactctatatttcaacatttgttggaactctgctcggagtcgtatcatcgattatcaatacaagatttcttgatccggtaaattacggagatgtccggtatgtacagaatatcatcaatctgattgctgctttattgctttttggttattttctttctggaagcaggttgttagcactgtcgaatgatgaagcgtatagccgtcgtattcgtggggcaatggtggtaatcttgctcatagcatcgcttattttaataattggtactgcttccaattattggattcatctttataatggaaaactaacggttgctccgttgtttataatatctttacctgtatgtattcatcaattgctcctaaactatgttaatacaacagcgcagggggataatcacattgggcgactttcggttgcgcgaatgcttcctgccctgttgtatattcctttggcttattggatttatacacaatttggggcaacttctactcgtatgattttacttcaatggggtacttcctcattgattttgatcggggtcatagtctcaacgaaaccaagttttcaccgccttgcatatgtgttccgagaacttaatcaagagaataaacaatatggacttcaactatattatggtcaattggcgatggttgccaccaattatatcgctggtgtcgcattaggtatatttaatgtagataatgccaatgtctgttattttactttggctttgacgatcaccagcccgttgattcttgttccctctattatcgggacgacgtattttaagacatttgcaacgcaggatcgaatctctaagaaagtaatgagagggacgatagtggtgactgttgtaagttgtatcggctatatcgcgattataaaacctgttgtcagtttgctttatcctgcgacttatgctgttgtcggcatatatgctactatactggctgttgggtgctctatacatggtttgggggatatgattaatcggtatctgggctctcatggacaaggtatcgcgataagaaacagcagttttgcctgcggcttgttgaaagtgggaggatatattggacttgtttatttgtggaatatagaaggagccttgataaccaatatcttgagttcattaatatacagtggaatattgttttgttattattatcgatttactaaaggcagtcgtgttaataatagatattagacatatagtcctattaaactaaatgccttttattatgatcacatcaatattcatcatactttatattgtttatattatagctggagtgctattttatgatttacaactatttgattatatcgatgaaatttatccttggctactatttattctattcttttttagtaaacagaaattttcaaaaccatttattatatttttatgcgtaagtatattttatttcatatattctctctatattcaatctaatgtattagtggcaatatgtaatgattttatcattgaaataaagccatttctaactttctttagtctgttgtgtttaagaccggtatttacgaataagcagattattctcttaaagaatgtttcattatactgtgttctggtattagttatagttggtgttttgcattatggtcataatcaaacgattagaggggaggtgctgacgggggctggttatgctttgtcttgtatattaatagccctttcatattatttgtttagtaaacacgacaataataatgtcaaagtaatctgtatactaatttgcgcattagggatacttagaccaacctcaaaatatataatagaatttgcttgtctgatattcttgtattattacgtcgatacaaggaaacaaaaaaaagcaagcaaatatattctgacgtcagtcctacttattttttcgtcatatttcgtctatgactttattcgagatgatatgatgtattttacaaatgatggagctgcgagaggagtgttgtttgcgacatcatttgatattcttaatagttatgtcccattcggatctggactcgcatcttatgcgacgtctgcatcggcaaattggtattcctcgatatatgctcaatttggtatcgataatatttatggattagtcgacggagagacttactttgtatcggatacatattttccggtattagctcaattcggatatgtcggtattctcctttttgtgtcttttatgtattatgtgtataacttggctaaacggaaatatcaatattcaggtgatgacaagacatatagaatatccttgatcatattgtgtattatcgttgtggaatctacttctgcagcaacttttattgggaacaaaagtgtgttgttgatgcagttgttggctttatcattatatgatataaaaaagcatagtttttcttctgctaacttaaagcctagaatttttcttcagtaatccttatgcatcttgttattgtacgtccattaggtaatgttttagatgtcaattcatataattgtcaggaaatcggattggcaaaagcattggttaatgatgggtggtgtgtttctgtaatcatggccgggctgcagaatgaacatatccgggtaaatgtatccggagagcattttgtcgatgtgtattttttacgatttgtcggtctgcaaagcgtatgtttgttccgaggttggaaaagattgataaaaaaacttaagccggatattattcaagtacacgatctagaaacttggatgagttttcgggtagtgcgatattcataccgacatagaattccatgtgttcttatccaaggggcctgtccgacagaaatgagtctaaataaaagattctttaaaaagattttcgattcgatattcggaaaatatgtattaaaacatgtgaatgctgttggatgtaaaactcctaccgcatcagcatacctcaatgaaatttatccgtgtgagacttggactacccctatcggcttggatgaacagaaatttgcgggggaagtgtgccgggattgggtggctgaattgcatttagaagataaaaaagtgttgctatacgtggggcgattgaataattatgggcgtaagcctatgtttttggttgatcttctgcggcaattaccctcggactattgtcttgttatggccggcgaaggtatcttgcgtgatgatatactctgcagagcttcggaatatggtatctctgaccgggtgcatctgatcggaaccatttctcaaaaacatcttccggcattatatcgggcagcgcatgtatttttgttgccatccacttatgaaatctacggaatggtcatgctggaagcgatgtatttcggcgtcccggtaatatcgacggcgtctgccggagctaaagtcattattcaacaagatgtaaccggatatattcttgatactttcgatacctctttgtgggcggaaaagattgtcgatattaatgagaaagtacaaaaaagcatgggggcagatgcccggcaatatattcaaaagaatttaacatggtcaggcactgccaaaaaattcgaggagctatatagactggtaacacatcgtctttaaatctgacatcagctgttttaatgtcccgcatagtttatcttgatattgccaaggcaatatgtatgatcttagtcgttataggacattatagtcccatgacggctccggaatattggcagcaactcattcgggttatatatacctttcacatgccgctttttatgtttacaagcggattgatctacatcttatctaataataccccccccctccgatgttataaaagatttgttgtcaagaaaacgcacaggcttgcgattccttatatcgctgtttcgattatattgattacggttaaaatattcttgggtaagaacggggagaatgttgaccatccatgtgatatttactcgtactttgaactcttttatagaccggctgctggctttttcttgtggtttttatatgttctatatgtaatattcttaattgtacctttatttaaaacgaaaaaatcccgattatatttggctttggcatcactgatattatattttatcccgattgatctgccccatgaattttgcttgttcgaatttaaaaatcacttttgtttctttatgtgcggggtgttatgcggagagtgtaaagacatcattaaaatacagggaaagtctttgttaattcctctacttttattggcagtcaatgtcttcgctacgatttggggctattcgaatatgggcgtagtaaaaatgttgttagctctcaatgggattttttgcatgttatcgatttctcggtatattgaaaatcattggtcttctgctttgacgaatataatcatggcgtcattcactatatatttgtttcacacggcatttgaaggatttaccaaatctattgtatatagagtggcggaattcgttcctcttccttttattctgcaagcggttgtgatcgtcgttggtggaataatcttacctgtttggctggataaattcgttctccggaaatatcgggtcacacgctatctgtttggattgaaatagtgttgtttcaatgaaaatattattaattaataattttcactaccgtaagggcggaagtgaaacggtatattttaatacggctgaaattcttcaaaagagaggtcatgaagtcatcttctttagtcgtgagaatccaaaaaatctgccgtgcagacaagctgaatattttattcgtagtagtgagtctacctcatatttacgacggatgctgaactatttttataataaagaggctcggcataacatcgaaaagttaatcttgcaggaaaaaccagacattgcacatgtgcatcttttttggggcggtatatccccgtcaattttcgggattctgagaaagtataaaataccgcttattcatacggcacatgattatcgaatggtttgtccggcttatgtttttaattctaatgggagaatctgcgaagaatgccaaggagtgcatttttataaatgtgcattaaaaagatgctcaaaaaagaatttggtggagagtgtgttgatgtcagcggaaatgtatgaaaggaatagatttcttaatcctgcaaggaacctgtcgggtgtcatttatgttagccgcttttctcgggtgaaacacaagcagtatatgcctttgctctcatccataccatcaacggttttatataattttgccaatgaaccgtctgtagatttattgaatcatttttccggtgattattatttattttatggacgactttcttctgaaaagggcgtagataaattgatcgacgtatttgcatcgcttccggatatatcgcttaaaattgtcggaacgggcccgcttgaggagcaattaaagcaaactgttgtgcggcgtcggattacgaatgtcgaatttcttggctataaaatcggacgagaactccaaacaatcgtaagtcgggcatcgtttgtattggttccctctcaatggtatgaaaataatccgatgacaataattgaagcgtattcgttgcagaagcctgtcatcggtgcaaatttaggcgggattccagaaattatagatgatggtaagaccggatatatattccagcatgataatccggaagacttgcatcggattatcaaaaaaaccattaatatgtcagaggcggattatctgcgaatggcgcagaatagttacgagtttttcaagaataattttagttctgaaaattatgctgttaagttggaagaattctataaccaaataaaagattcttatgagaatatttaaacatccgatattgttcggaggattgaagcatttgcgtcaggtattttggttgtcaatcatgaatattttgcctgtgccgggaactttgcgttggatctttgcaaagtggggtggggtaaattttatttccgataatgaaaaaaaatggttttatattggatcaaacgtgcgttttgatagggtttaccccgggaatataattattcataatggagttcatattacacatggggttatattcctcacacattgtttagatacgcaaaattccgatttgtcggatattttctggaaagaaaatcatattacgattatgcctcgggctttcattggaaccaatacgattgtttgtgccgacgtaaccatcggagaaggtgctgttgtcggagctggaagtattgttacaaaagatattccaccttacgaaatatgggctggaaatccggcgcaatttattaagaaaagaagttgcaaacaatgacccaaaagattaattggatattaattctacaggcctgggcaatgttatgggttgttgtcggacatgcgcccttgttgtctgtagatatgatacaacctggatatgtggaaattttgtatcggatagcttactcatttcacatgccattgttcattttcgtgtccggatatctgttttatatgacacgtataagtaaacccatgccatacgcggaaatggtcttggataaattaaaacgtctgggtattccatttttattcttcactttggttgctatggttgtaaagactctttttgcaagtgatatggctcggccttctacgatttctgttaatgaatttataagaagtgtcatgtatccggggcaggggcctttaggggaattatggtttgtggcaacgatattttggatgtttcttatgagaccgatatgggcctggactttgaaaaatggttattcgagcgtttgtacattaattgtactcttgttaataagattgattacccccccccgtggtattgagttgctgtgtatatcgactgctatgagatatgctgtgttcttttatgtggggatgtgtttcaggcgattcgtgaatgtccaaagttttatgtctctaaaaagcggatatatgttgtgtgggatcgttattttagttggggttgagctagtattgtggcactattctttagcgttattacttgcctttacaggtataactatagctattgcggtcgctttgctttttgatcggtatattccgaaaatttttagccttttcagaaactatacttatcaaatttatctgatgggcatatttattcagatacttgtcaagatgttatataagagggatatatttccatcttatttttggggatacgctttgtgtatcctttgtggtctatatattccggtgcttattgcatatattgcaagaaagcttgatgttgaatttattaaattgtgtttgggactatcaaaataaattaattatgactggttcaataattgtcacttaccgctgtcccatgcggtgtaaaatgtgtaatatctgggaaaatccaactaagccatccgaagaattcgctcctgaactgttgaaaaaactgcctcgtatgaatggggtaaatattactggcggagaaccatttgtaagagaagatatcgaagatattgttaaagtgctcgaaacaaagacggagcgcattgttttttcgaccagtggttatttctcagatcggatccttgagatggcaaggaaacatccgcatgtcggttatcgcatcagcatcgaagggctctcttgtaaaaatgatgaattgagaggacgacaaggtgggtttgataaaggattgcatactttgctcgaattgcggcgaatgggaataaaagatatcggtttcggtattactgtatcgaataataattcggccgatatgctcaatctttatgagctgagtaagaatttgaaaatgcaatttgcaacggcttcgtttcataattctttttattttcataaatatgacaataaggttaccaatcttgatgaagtatgtggtaattttgatgaattgatacagcgattaatgcaagagaatgatccgaaatcgtggttccgtgcgttctttaatcttggtctgattaattatgttaaaggagggcgacgtatgttaccttgtgaggctggaaccgagaatttttttatcgatccggttggcaatgtgcttccttgcaatgggatggaggaaaattgctggtttgatacgatgggtaatctaaatgatgtatcttcatttgaagagatatggcaaagtgaaaaagctgctcaggttcgtgagaaagtggctaactgtccgaaaagctgctggatgatcggctctgtatctccggtaatgaagaaatatattcgtcaagctataccgtgggttataaaaaataaatggaaagtagtgcgtggtggaacggttgacacagaatgtattccattttttcatgtaggaaacaatgacaaacaaggattaagataatgtttgttggataagtattgttctctgctgttttattttgccgtatatgaaaatagcctttattggaggtcgcaatatccataaattaggtggtattgaaaattatatgtacaatttagcgaccgaacttgtaaaacggggctacgaaccgattgtattttgtgaaagcgatcggaatgggacagaatgggtaaatgggtttcaggtcgttcatcagaaatctctgaatagtaaattctggaataaaccgattctggggttaaaggctatcgttcggatattgcgatatgataaaactgttaatattttgcattttaatgctggagggccagcctattttgcatggattgcccggatgttcgggcgaattacgatttatcaaggacatggtatagagtggcgtcgaactaaatggaaatggtatcaacgcttgattatgcgattaacgaacgcttatgtagttcttttatgtactaaatacgctactgcggtttcggaagaacagactgaaatgttaaaccggctgtaccataagaaatgcgttacgattcctacggcagtaaatgtgcctgtttgttcggttgaaagtgctgttttacaaaaatatgggcttgaaaataatgattattttctctttttggggcgtcttgtgcaagataaaaatcccgattatttgatccgtgcatatattcagtctggaattattgataaaaaattagtgatcgcaggaagtaatgatgcggatccagcttatgttcgccaattgaaagaaatggcgcaagagtatgagaatattatctttacaggtgctgtttatggagtagataaagaaaaattactggaatcgtgttttgcattttgcataccttcgactattgagggattggctattaccctactcgaggcgatgagctatggaaagatatgtatagcttcggatattctagctaataaggaaggacttggggagaatggactttgggtaaaggctgaagacgaggagagtctttgtcgggcaatgaaatacgtatgtgagcattattcggaattaaaaaaatccgggatactaaatcaaaaccgtgtcaggacacattttacatgggataaaattgcaggaaaatacgaattatttattaaatcattaaaataatatttactatggaaattaatgaattcattgaaaagtttgctgaagttgtcgaagttgaagatgcatcagcgttaaatgccgataccaaattcagagatttggatgaatggagttcactcgccggattatctgtaattactatgtttgatgaggattttaatgttgagctgacagtggcggagttcagacaggctgtgacggttggcgatttgtataatatgttggaaaaataaagatatggcatttcttcaaattagccatgtagagataaaaggaataagtgcttgtgttccgaaacgtatagaacggaatcgggattatccgtatctttcggctgaggagattgagaagtatattgcaacaatcggggttgaacaacgtcattgtgctattcatgatggttcgatctgtacatccgatttgtgctttgaatctgcggagaagttactgaatgagttgcaatggaatcgcgatgaagtaggccttttggtttttatatcccatacggcagactataaacttccgtcgacggcctgcattctgcaagatcgtctaggcctgtcgaaacaatgcatggcgtttgattctcctttgggctgttccggatttgtatacgggttgggtatagcatccagtatcctgcaaacaggaatgatcaaaaaagccttgcttttggtcggtaatacccagtcattttatgcaagtcctgaggatcagagtactgcgttgcttttcggtgatgggggctctgctattgcattggaatataatccggattatgatcgtacgatggattttcatttttatagtgatggctcggggcgggatgcattgattgtaccggatgggggatgtcgtaatccgtttacaattgattctatgaggattgaaccctgtgaagaaggacatcgccgaaaccggttgcatgaaaaaatggatggtttagaggttttcacttttgcaacgaggaatgtccctaagtcgttaaatatgcttcttgaccaattttcaatcaacccgtctgatatcgattatttgttattacatcaagctaaccggtttttgtgtgaaaaaattcgtaaaaggatgcaatttgagggagaaaaagttccatataatattgataagtttggtaatacaagtggaacatctatccctttgttaatggttactaaccttacctcggatttgaaaacgaaatctttacggcatttggccactggatttggtgttggtctctctattggcagtgtctgcttttctacgcaccatattatatgtccggaacttttatatttataaatctatgttcaatcccttttctctggcaggtaaaacgattttggttaccggtgcttcatccggaataggccgtcaatgtgctattgactgtagtcgtatgggagctcgagttgttttgattggccgtagtgaggaacgtcttgctgaaacctttcacgagatgattggttgcgggcatatgataactgcaatcgatttgacggattttgatcgaataggcggatgtgtcaccgatattatttcgcaatgtgggcctattcatggtgtgttgcattgtgctggtatatcggctatattatcactcaaacaaatggatattttgcatttagaccatttttttcgaaataatgtctattctgctattgaactcacccgagaggtctgcaaagtgcaccatattgcaaaagaaggagccagtattgttttcttttcttcagtaatgggttgtgtcggtgaaagtggtaaatctctttatggtatgacaaaaggggcattaatcgctgggagtcgctcgttagcttgtgaatatgcaaaacgaaaggtaagattcaatgtaatttctcccggagctgtcgaaacaccgattaatgcccgacagccttatatggcagatcccgagttacgtcagctacttgaagaaaaacatttgcttggattaggccggacaatagatatttcttatgcctgtatttatcttttaagtgatgcatcacggtggataacaggccagaatttaattgtggatgggggatatacggctcgttaatactttgggttatggtggttgtatgtaaaacaactccggaaattaccgatgcggagataaaacaaatttattcattgttttttgaggtttttggcaaacatcgcgattgtcatacgtttcgtgaagaatattccaatacgccgtttggatattcgtatcatagtcttttatacaatgataatggacagattgttggtttccactcctgtatgccattctattatcgtaataacaacgagcgtttttttgtcgcgttgggaattgattcgatggtcaaaaaggagtatcgtgattatttctatttccgagatatgatcacaacttgtcagaaccgattgaaacaagaaggatgtattttgcgcattggttttccgaacgataactcgcatccagttttaaaacggggattaaaacataaggatatagggcgacttacaacctattgtctgattcgcaatatcggaagtgtgaggttctctctgtcttggttgaattttttcagtcgaagtgcagccaagattcaatattatttgtcttatttatctatcgggaataaactgtatgaatttaggtttcggaaagatcgtaggacattcgatgttgtacgttacaaatggtttggaggaaactatgaacatgttaatctgggtaaagcggagtgtttttacaaaattcaggattatgaaggtatttccactgcctttttgttagatgtatttccgttgtcgcgttcggcatttgagactgcagtccgttacatatataaaatagagcacaaaagaattgacatgattctgtatgttggtgcgcttccgtttacaccattgggtttagtcagaattccgcatcgttttgaacctaagcatttccattttacttgtaagcctttagtcgatggtgtttttgacgacggggtgtatgatctttgtcaatgggatgtaaatctctcaaatttcgatttgttatagattttctttgtatcatatgaatattcttactttcgatgtagaggaatggtttcatcttcttgataacgactctactcgtacagaaactcaatggaaaaattatgaggtgcgtatctacgaaaatatggatcggatattccgtattcttgaagataccgatactcgcgcaaccttttttattatcggatggattgccaaaacttatccggatattgtaaaaaagattgcggaaaaatatgagattggtagtcatacgatgaatcatcaattgatctggcaacaggatcgtgcgacctttcgagaagatctctattcttcaattgaattactgcaagatattacagggaacccggtcaaatgtttccgggcacctggattttctattcgggcgagtgaagcatgggcttttgaagagattaagcgttgtggaattgaaatcgactgttctgtgtttcccgctcatcatgcccatggaggattaccgtcttatggacaggctgtgccaagtattattagagtagagggtacggagttgaaagagttccctatttgttcgaaggaattattgggacatcaggtaattttttctggtggtggctattttcgattatttccttataggataattaaacgatggtttgcagaacgggactatactatctcctatatacatcctcgagatttggatgcaggtcagccaatgatccagggtttaccatttagtcgtaagttcaaatcttatattggacttcaaggtgcagagcataaattgcgccgtttgttgtctgattttagctttacggatatttctactgctgctgcaactatcgattgggacaaagtcccgatcgtaaatctttgatagttctattataatattgatattgtagatgactcattttattgaatcgaaaagtttattcaacataatagtccgtaatcttgaagtcctagtccggttaaaaggtcgtttcgggaggtttactgcagaatacttagtgtggagatagttggttatactttatatttgaaaaaatgctttaaaatgataagagaatatatccgtgctgattatgcccggtttgaaaaaaagaatcgtaaaatttacttttgggttcgattcgttcactatccagctttccggttgctggtaatatttcgtattattcaaggtcttagatgtagtgtgctgaaacgaattcttcgggtttattatcggcatttggagcgaaaatacttgattgatttgcccttaacagtcaaactgggtaaaggctgttttttccctcataatgggccggttgttttcaatccggccgccattgttggtgaaaattgcagtattcatccatgtacattgattggcactgtccggggagaggggggggaattccaattgtcgggaataatgtttttatcgggcatggtgctaaattattagggaatatagttgttggtgactattgttttatttgtccaggttccgtgcttctcaattctgttaagaaaggatgtactgttggcggaactcctgctcgggttttgaatgaaaatggaatggaaaattataaattatatttataagtgtccgtttatatattatctgttaaatcatgaaaggcataatcttggcaggcggcagcggaacgcgtttgtacccgatcacgaagggcgtcagcaagcagttgttgcctgtttacgacaagccgatggtctactaccctttatcggcgttgtttctggctggtatccgcgacatcctcctgatctctacgccagaggatgtgggttgtttccgtcgtttgctgggtgacggttctgactacggggttcgtatcagctacgcggagcagccgtccccggacggtcttgcgcaggcgttcctgatcggctcggatttcatcggcaatgactccgtgtgtctggttctgggcgacaacatcttccacggctcgggcttcacgggccttcttcgcgaggcggtacgcacggccgaggaggatggcaaggccacagttttcggctatcgggtcgacgacccgcagcgctacggggttgcggagttcgacgctgcgggcaactgcctgtcgatcgaggagaaaccggaacacccgaaatcgaactacgcggtggtgggtctctacttctaccccaacaaggtcgtggatgtggcccggggtatcaaaccctcggcgcgcggggagcttgagatcacgagcgtgaaccagtcgttcctgcaacgcggcgagctgaaggtgcagacgcttcagcgcggcttcgcgtggctggacacgggcacacacgactctctggccgaagcctcgatcttcgtggaggtcatcgagaaacgccagggtctcaagatcgcctgcctggagggaatcgcctaccataacggctggatcacggccgctaagctccgggagttggcgcagccgatgctcaggaatcagtacgggcagtacctgttgaaactcaccgacgaaaaccgacgctaaagccatgaaagtcatccctaccgaaatagaaggagtggtcatcctcgaacccgatgtcttcggggacgctcggggttatttcttcgagagctattctgagcagtccttcggcaggctcgtacgccccgtgcggttcgtgcaggacaacgagtcgatgtcgaagtacggcgttcttcgcggtcttcacttccagcgggggtcgcatgcgcagtcgaaactggtgcgcgttgtccggggccgcgtgctggacgtcgctgtggacatccgccggggctcgcccacgttcgggcggcacgtctccgtggagctctcgggggacaacaaacggcagttcttcgtaccgcggggcttcgcgcacggcttctcggtgctgagcgacgaggctgtattccaatacaagtgcgacaacctctatgcccccgaatcggagggcgccatcgcgtgggacgaccccgcgctgggcatcgactggcacctggcaccggaggatgtcgtcctctcacctaaggacagttgccacccgcggctggaagaggccgcggaactgttcgactataatacggactactatgcttaatatcctgattacgggcgccaacggacagttggggagctcgctgcggcagcttgggagcgtgtcgcccaacaactacctggccaccgacgtcgcggagctggacatcaccgacgccggggcggtgcttcaaacggtcaaggaacagcgtatcgacgtgatcgtcaactgtgcggcctacacgaacgtggagaaggccgaggaggatgaaccgacagccgacctgctcaaccacaaggccgcggcatacctcgcggcagcggccaaggagacgggtgcgacgctgatccacgtctcgacggactacgtcttcgacggcacggggcacaggccctacacggaggatatggcgacctcgccgctgggggcctacgggcgtacgaagctggcgggcgaggaggccgtgaaggcctcggggtgccgctacctgatcctgcgcacggcatggctctattcggagtacgggaacaactttctgaagacgatgctgcggctgacctcggagcgtgagacgctgcgcgtggtcttcgaccaggtgggcactccgacctacgccggcgacctggcgcttgcgatcttctccctgatcgaggcggggcgctatgcgggcaacgagggggtgtaccacttcaccgacgagggcgtgtgctcgtggtacgacttcgcggtggagatcgccgcggccgcgggacatgacacatgccgcatcatcccctgccacacgtcggaataccccacgaaggccacccgcccggcctactcggtgctggacaagacccgcttcaaggagaccttccaaatggatatcccgcactggagggaggctttgatctactgcatgaaacgactcacagaaaataacccatgaaacgcactatcctgattacgggcggagcgggctttatcggctcgcacgtagtacgcctgttcgtgaccaaataccccgattaccggatcgtcaacctcgacaagctgacctatgcgggcaaccttgccaacctgcgggacatcgaggattccccgaactacgtgttcgagaagggtgacatctgcgacctggatatgctgcgggcgctgttcaggcagtatgacatcgacggggtcatccaccttgcggccgaaagccatgtcgaccgctcgatcagggatccgttcaccttcgcgcgtacgaacgtcctgggcacgctctcgctgctcgaggctgcgcgggagtactggaacggtgattgggcaggcaagctgttctaccacatctccaccgacgaggtgtacggggcgctggagctgacccgtcccgagggagatgctgcgggcggggagagcggcggcgggcccttcggcgaggagttcttcaccgaagagacgaagtacgcgccgcacagcccctactcggcctcgaaagcctcgtccgaccacttcgtgcgggcttaccacgacacgtacgggatgccgacgctggtgaccaactgttcgaacaactacgggccctaccaattcccggagaagctcatcccgctgttcatcaacaatatccgccaccgaaggccgctgccggtgtacggccgcgggcagaacgtgcgcgactggttgtacgtcgaggatcatgcgcgggccatcgacgtgatcttccacaggggcaaggtcgccgagacgtacaacatcgggggcttcaacgagtggaagaacatcgacctgatacgggtcatcgtacggacggtggacaggctgctgggcaaccccgaggggtcgtcggagcagcttatcacgtacgtcacagaccgcgcaggccacgacctgagatacgccatcgactcgcgcaagctcaagcgcgaactgggctgggctcccagcctgcagttcgaggaaggaatcgaaaaaactgtccgctggtacctccaaaaccaaaaatggatggacgacataacttctggcgaataccaagagtactatcagagcatgtatgtaaacaggtagctttatgatattaggattgcataaatagattagaggggattttaggattttcaaattaattatgaaatacatgctcatctgggcggtattcctcgtcctgttctatattttcctgcggtgggttattcgccggacgccggtcacggaggacgacgacctgaaagtgcggcgtatctcccgccttctggaacgccttaatgaaaagtggaacccaaatagaaaataataaaggggctgtctaaaacttgttagacagcccctttcgattgtacggctcggcacctgcgttcgtgtttggcggcggccatgtttgcggcaaaccttgttacgcctcggccatgacggttgtgtgagcaggctctcttgcggcgatgcggtgtcggggttttatcttttgcgacgcattcccggtatcgggcgcgttgtccggctgcctcccggctgttctcccttggaggacgtcgttttggcgctaagctcctgcgtggcttttttgtcggctcctgctttgtctcccgggcgtgcgccttgggggcgggatgctttcgcccgcacgcccttcgatccctttctgtccggcgcctctcctttcccggccggccgttcatcgaagaaataggctttctgccgccgtttctcctcctgcgaacgggcgacgtagactttttcatgtgtataggggttctccccggtgtagaacatcaccgacgagagggtcatcggcgtcggggtgagatcctgtacctgttcgaggttgaaatggagcttgccgagtactttcgccgacagcgagcacatgtcacgttcggtgcagcccgggtgtgacgagataaagtaagggatcagttggtagggcagcccctcgcggcggcagatatgctggaaatcggcgttcagttgctcgaaaagtgcgaacggaggcttgcgcatcagtttcagcacggcatcttcggtgtgttcgggggcgaccttcaggcgtcccgaggtgtggtgtttcacgaccgtctcaagataggggctgtcgtcgaacaggtcgtaacggatgccactgccgacaaaggccttcttgatgcccttcacggctcggatcttttcgtacaaagccaacagcggccggtggtcgttgcccaggtttgggcacatcttcgggtgcaggcacgacggacggcggcatttgcggcacagttccctgtcgcgcccgcccatgcggtacatgttggccgacggcgcaccgacgtccgagaggtaacccctgaagtcgggcgtcgaggcgatccgccgcacctcgtcgaggatcgagcgctcgctgcgcgagttgatgaatttgccctggtgagccgatatagtgcagaacgcgcagccgccgaagcatcccctgtggatgttgaccgagtgcttgatcatctcccaagccgggatatcccccttgccgttgtagcgcgggtgcggtgcccgttcgtaaggcaggtcgaacgagtggtcgagttcttcggtcgtgagcgttgtgttgggcggcgtgacgaccacgtaacggtcgcccacggcctcgaccagcgtcgctgtcggttccatcaggttgctctgtgtctcgatgaccgtgaaattctccccgaaagcccgtttgtcgcgcgcgcactcctcgtaggagtgcagccggatcatctccgccgggtcgagccgctccacgtaatctttgccggccatgaacgccacctgccgcagtttgcgcagcaacttggcattgtatccgttgcgcagtgcccgggcgacctgctgtacgacccgttcgcccatgccgtagattagcaggtcggcgccgctttcggccagcaccgaaggcttgagcgaatcgctccagtagtcgtagtgcgtcagccgccgtagggaagcctctatccccccgactactaccgggacgtgcgggaacaatcgcttgacgattcgcgtgtagactgttacggcatagtcgggccgaaaccccgctttgccgccgggcgtataggcgtcgttgctcctgaggcggatgttggctgtatagtggttgaccatcgaatccatcgacccggccgtgatgccgaagaagagcctcggcgtgcccaacttggtgaagtcgcgcaggtcgtcccgccagttgggctgcggcacgatggccacgcggtaaccttcggcttcgagcagtcggccgatcactgccgcgccgaatgccggatggtcgatgtaggcgtcgcccgaaaagaggatgacgtccaactgttcccacccgcgtgcgcggacttcctttatcgtggtcggtaaaaacaaggtgcggtgagtttttttatttcgtcccggagtaattcggggctgtatccatgtgtttgcagggatcggactggcgctttatggcttcttttcggaacgtttgccgttttggggaaccgcaggtgcggcccgtcgtattgccgtaagtcagtccgctgccgtgccgtttatccgttatccgtctctttcgatgccgctgcgtaggtttcccatttgccgagcagcgcacggaaatcggcgggcagttcgctctcgaaatataccgtttcgcgggtcgtcgggtgtacgaacccgagtgaccgcgcgtgcagtgcatggcggggcagtacggcgaagcagttttcgacgaattgcctgtatttcgagaaggtcgtgcccttcaggatgcggtcgccgccataacgttcgtcgttgaagagcggatgtccctgccacgacatgtggacgcgtatctggtgcgtgcggcccgtttcgagccggcattcgaccagcgtcacatagccgtaacgtttcagcacccgccagtgggtcacggcgtgcttgccgtccgacccgtcttcgaatacgaacatcttctgccggtcgcgggggctgcggccgatgttgcccgtgatcgtcccctcgtcctggtcgaaattgccccacacgagtgccacataacggcgctggattgtatggtcgaagaactgcttggccagccgtgcgtgcgcctgttcgttcttggccaccacgagcagccccgacgtgttcttgtcgatgcggtgcaccagcccggcgcgcatgtcgccctcctggaacaggggcaggttgcgcaggtggtacgtgagcgcgtttacgagtgtaccgctgtaatttccgtgcccgggatgcaccaccagcccggcgggcttgttgacgatcagcaggtcgtcgtcctcgtagggaatttcgagcgggatatcttcggggatgatctccacttcgcgccgcgggtagggcatcacgatctggatacggtcgagcggcttgaccttgtagctcgatttcgcgggcttgccgttcacgaggatgttgccgcagtcggcagccgcctggatacggttgcgcgagcatttctccatgcgtacggtcaggaacttgtccagccgcagcggggtttgccccttgtcggccacgaccgcaaagtgctcgtacagtccggctccctcgccgtcttcttccatggcttccgatccctggtcgagttcgggatcctcctctatgtagcgttcgtcggccatcagtcgaaaaatccttcgtcgtttccggctgccgcaggctcgtctgccggctgttcctctgcggtgcctgccgccgcccgttcgaactccgcctgagccagcgaatccgcatggtcgcgttcggattgcagacgctcctcggccgcctccttcgcctgtttttcggctatggcgcgatgttgggcgagtttcttctcgtcgagcgtcagcctgaggtcgacgcgcgagcccagaccggcgctccgttcggccgtgggatgctggatatagacacgggcatccttctggttcaggaggttgatcccttcgtcgaaatccaccttgccgacgttgagccccagttcccacaggcggcccttggcctccttgagcgggaacccgaccaggcgcggtacgaccgtcgtgccgtagccgccttcgacgcccacatagagcgtcacgcccgagcccagctcggcctcgatcttgctcgtcgccgctacggggcggccgtcgcagtattcgtccagtacgtagttggtcgccatgtcggcgcggtagaccagctcgtcgatctccagccccgcgatctccagcatgttcttggcctgccgcagcgaacgccccgccacatagggcacgggcaccatcttctggcggaaggagttgatcgtgatgtagaccgtacggccgggcttgacctccacgcccccttcgggcagctggtcgaggacgatgcccccttcgtatgccggcacgaacagcgagtcgttgatgtgcagcttgaggtcgtacttgcgggccatgcgctgtgcctggtcgagcttcacgcccgaaaagtcgggcaccgtgcggcgggcgccgtggcgcgtgccgacctgcatgacgatatgggccgcgacggccatcgccaggatgatcgccccgatcagtacgaggttgtatgccagtcggttttgccggagccgtttccagtaatatgccagtttctccattgcggggtagggttatatttcgttatagaaggtgtcgcgttccacggcgcggtagccggccgcccggacgatgcggtgcatgtcgccgatgctcatcgaaggcttccggtcttcggccccggccatcgagtagatcctcgtcgtgtcgtcgatcgtgccgtcgatgtcgtcggcgccgaacgccaatgccagttcggtcgttgccttgccgtacatcacccagtaagccttgatgtggggtatgttgtccaggtagatccggctcatggccagcatccgcaggtcttcgatcaccgacacttcgccgatttcggacatcgggttgccgaaattgcggtatttgagcgggatgaaggcgttgaacccgcctgtgaggtcttgcagttccctgaggcgccgcaggtggtcgatgcggtggcggagttcctcgacatgcccgtagaggatcgtggcgttggtcgggatgccgagccggtgtgccgcctcgtgtactccgagccattcggccgtcgagcccttctcggggcatatccgctgccggatccgctcgtcgaatatctccgcccctccgcccggtatggcgtccatcccggcctgcttgagctgccgcaacccttcctccgtcgtcagtcccgccttgcggatcatgtatgacagttcgatcgccgtaaatgccttgacggccgctccgggcaatatggctttcacgcggcggatcatgtcggtgtagtaatccagcccgtggtcggggtgtaccccgcctacgatatgcacttcggtgatgcctttcccctgccgttcgcgggcgatttgttcgatttcgtccatcgtatagtcccacgcttcggggtcgcccgccggacgccggtaggagcagaaccggcagttgaagacgcagcggttcgtcggctcgatgtggaaattgcggttgtaataaaccttgtcgccgcttacgcgctgtttggctgcggtcgccagttcgcccagcagccacagcggggcctcgcgccagagccgtgtggcttcggcgtcgtcgatgcgctctgcgcggcgcactttggcggctatgtcgtcgatgtgtcgcatgttatttcggagctttccggtagaggtagatggcgatgaacaggtagatgatattgggtagccatacggccagcccgggtggcagggtgccgctcttggcgaactcctcgaagaagcggttgaagaggatgtacgagaaacagagccccgtgccgatgccgatatggagtcccgttccgccccgcaccttgcgcgaggagagcgagacgccgatcagcgtcaggatgaaggtcgagagcggataggcgaagcgggcgtgcttctctacctcgatgatgttgatcgaatctgaacccttggcgcgctgctggtcgaggaactcgttcagttccgtaatgttcatggtctgtatcaggtcgttgatctcgcccagctcggccacttcgaggttgatgagcgtgtcgaggttgcggaactgctcgaatttctcgatgcccagcgagtcgaattcgcgcttggtgtagcgcggtgccgtccagcgtttggtctcggggttgaatttcacgtcggccgcttcgagcgagcgggtcatcgtgccgctgtaatactcctccagcgcgaggaacgacgcctgctgcgaaccgtcgttgtagccgcggatgtaggcgaacgtccccggctcgatctgccggtagatgtggcggttgaacttggcgttctgcttgcgttttatgtactgcgactcgaaattgacgatgtgccgctgcgaaatgggtatcagccagaggttcagcgtcagcgaaaggctgccgatgatcagcgccccgaggaaatagggccacatcaggcggcggaacgacatgccgcccgagagcatggcgacgatctcggtctggtaggccatcttcgaggtgaagaagatgcaggcgatgaaggtgaacagtccgctgaattggttgatgaagaacgggatgaaattcaggtagtagtcgaagatcacctcgttgagcggggcgtgcagttccgtgaagtcgtcgatcttctccacgtagtcgaacagtacgaccacgacgataatcatcgcgatggcgaagaagtaggtcgcgaggaatttccccagtatgtagcggtctaagatcttaaaccccggaaaacgcagcttcatcttttcggttgtcaatatttttcgaatgcgatccattcggtttgatccggatcgtcgatcgcaggccgtgcgaacctgtacaactctccgcagccgtggataacggccgtattgccttcgaaccggataaacgaccagtagatgccgtcctcgtcgaagacgcactggtcgggactgaatttcgtgttgtcaattttcagcggttcggcgctctcggcgcggttgtcgggggccatgtaggcggtgtgctcccgcgagttgtccatcatacggacgttctgtgcgaaaagtccgccgtggtcgttaaaccgcaggcgggcggctcggcaatagacgaatcccggctcgatattgaacgtataactgtgccggttggttcccgcttggaagctgacggttccgttttcgcagtggcatctcgtgcccaagcaccattgctggatgcaggagccgatctccaacggcgaggctttcagcatctcgtagggtgcgacgacctcaaaattttccactttttcgagcatccgttcccgaccgtctaccacgatacgcagccgtccgtcgggctgcacggttcccaaatcggcggattgtcgtgcttctccgggtgtccagatatactgcatgagcaccgtgtcgggcgtgaatacggttttacccaataacacggtgtccgtggcgtccgtgagttgcaggagggaggttgttatgctgtcattgcgctcgaatagcagcgcgaagcgttttgaacggaacagttcgcagtccttatcagcccaaaccccaaccgcaggagatgccgtcgccggtttgttctccgaacaggacgggctggccagcaagacccacaacccgaacaggatgacttgaattggtcttttcataatctttttttcgtttggttgtttggtaaaagtcctttcacagtctgcgcatcagtttgccgaccatcgcctccttccactgcttgaaatccccggcagcgatgtgctcgcgggccatcgtcaccagccgcaggtagaaggcgatgttgtgcagcgaggcgatctgcgccgccagcatttcgccgcatgtcaccaggtggtgtaggtaggccttcgtatagagcgtgtcgacgaacgccgtgccctcggggtcgatcggcgagaaatcgtcctcccatttcttgttgcggatgttgatgacgccttcgcccgtgaacagctgcccgttgcggccgttgcgcgtcggcatcacgcagtcgaacatgtccacgccgcgctcgatcccttcgaggatgttcaccggcgtgcccacgcccattaaataacggggacggtcttcgggcagtatggcgttgaccacttcgatcatctcgtacatcacctcggtcggttcgccgaccgccagtccgccgatggcatacccgtcggcgccgtactgttgcacgttttcggccgcatgcgcccggaggtcggggtatgtgcatccctgtacgatggggaacagcgcctggtagtggccgtatttgggctcggtctgatggtagcggtcgaagcagcgatccagccatcgctcggtcagcgccagcgatttggccgcgtattcgcgcggggcgtcgcccggggggcattcgtcgaaagccatcatgatgtcggcgccgatcgtgcgctcggtgtccacgacgctttcgggggtgaagaggtgtttcgaaccgtcgatatgcgaccggaaatggcatccctcctccctgagtttgcggcaagctgcgagcgagaagacctggaagccgccgctgtcggtgagcatcggcccttcccaggtcgagaaacggtgtacgccccccgccttttcgatgatctccatgccggggcgcatgtagaggtggtaggtgttcgccaggatgatctgcgcccgggcctcgtcgcgcacgtcgcggtggaaaatgcctttgaccgtggcggctgtacccacaggcatgaaaatcggggtgcggatgacgccgtggtctgtcgccagttcgcccgcgcgggctttggacgccggatccttatgctgtaatgtaaacttcatgctcatatattcggcaaaaatacataaaataatctgatttgggaattctgaattctgaattgttttgtacctttgcacatatttcgcctgtatgcaattttttgatacttttctgacatgctacggctgggaaggcattgccctcgcaggggccgtgctcgccatgttcggcgtgcagttgtactactatattttcgtttacggccgtattcccggctacaagaacaaccgccgcccggccgtgctggaggccgatccccaggtgtcggtcgttatcccgctcttctcggaggactattcgttcgtcgaggagcggctgccgctgatcctggcgcagaactaccccgatttcgaggtggtgatcgtctacgtcggccacgattccgatttctacgaggagctcgtgcggctgaaacagtcgttcccccaaatcgtgacgaccaagattcacctcgatccccgctttcccatctcgcgcaagatggcgctcaacgtgggcatcaagtcggcgcactacgagtgcatggtcttcacttcgaccgatgccgtcccccagaccgaccgctggctggcattgatggccaagggctttacgcggggcgagatcgttgtgggttactgcggcgtggagcgcaggaaaggctttgcgaactacatgatgcgcgcctggcgcatgatgcactccgccgactggatcgcccgtgccgtacgccgaaacccttaccggggaacgctccacaacatcgggtttacgaagaacatctatttcggctccaaggggttcagccatctcaacatgaatatcggcgaggacgacctctacatgcagaaggtcatgacgcacgacaatgtgagcgtgattctctcgccgcgtgcgacgttgcgcgagaaaatgtggggcggtatgcgctggtggatggggcagttgcgttattacggttcggcattcgcgttctatccgcagcaggtgaagaattacatccagtgggaactggggtcgcgggcgctttttttcatcacggccgcctgtgcgctggcggtgatgccgttcgaatacaagatcgcggccctcgtgctggtgctggttcgctacctgctcgtggcgattcaggtgcgacgcatcgcacgccgcctgggagaggcgggcatggccggccgttattttgtttacgacctgctcagtccgctgtgggcgttcctgctcggggtgctgctgctgcgacgagatgaccgcgtatggagatagccgactatatcgtcgccgaagaccggcgcctggtggaactcgtgctcgaaggcgacgacagggccttcgaatacctgttcaaccgttaccgcgatgcgatccaccgccttttcgtgcagcggctggggggtgtcaacgatgccgacgacctgttgcaggagacgttcatcaaggtctacatcaacctgcaccgttacagtaccgcctataccttcgggcagtgggtttacaccatcgcccgcaatacgttcatcgacttcgtgcggcgccgccaggacgacctgtcgatcgacgaacgtttctcctcgcctccgtcgacgactccgacgcccgaagagagcgtcatcagcatgcagcagcggacgcagatcgagcattacctcgaacgcctcgccccgcgctaccggacgctgatcgtcatgcggttcttcgacgaatactcttacgaagagatcgccgccaacctcaaattgccgctcggcaccgtcaagacgcagatacaccgtgcccgcgaacagatgtgccgcctgataaccgaaggcgagaaaaactgaccccccccggaaaaaccgatccgcatggaacttatcgacaaatatttccccggcctgacggaattgcagcggcagcagttcgccgccctgtacggcctttacgccgactggaacgccaagatcaacgtcgtctcgcgcaaggatttcgaccagctctatctgcgccatgtgctgcattcgctcgccattgccaaggtctgtacgttcgatgccggtgcccgtatcctagacgtggggtgcggcggcggttttccttcggtaccgctggcgattctctttcccgaggcgcatttcaccgccgccgattccatccgcaagaagatcacggtcgtcgggggcgtcgccgccgggctcgggctgcggaacctcgatccccgctgcgtgcgtgtcgagacgctgcaggaacgctacgattatgtcgtttcgcgcgccgtcacggcaatgccggagttcgtccgatggatctgggcgaaaatcgggaagggacagaaaggctcgcttccgaacggcatcctctacctcaagggcggcgacc
